United States Patent Application Publication US 2024/0066114 A1 - sequence listing, part 8

SEQ ID NO: 11700 - RNA, 3822 nt, Artificial Sequence
  SARS-CoV-2/China/WF0004/2020__EPI_ISL_413694 spike protein CDS wt (1-1273)
auguuuguuuuucuuguuuuauugccacuagucucuagucaguguguuaaucuuacaaccagaacucaauuacccccugcauacacuaauucuuucacacgugguguuuauuacccugacaaaguuuucagauccucaguuuuacauucaacucaggacuuguucuuaccuuucuuuuccaauguuacuugguuccaugcuauacaugucucugggaccaaugguacuaagagguuugauaacccuguccuaccauuuaaugaugguguuuauuuugcuuccacugagaagucuaacauaauaagaggcuggauuuuugguacuacuuuagauucgaagacccagucccuacuuauuguuaauaacgcuacuaauguuguuauuaaagucugugaauuucaauuuuguaaugauccauuuuuggguguuuauuaccacaaaaacaacaaaaguuggacggaaagugaguucagaguuuauucuagugcgaauaauugcacuuuugaauaugucucucagccuuuucuuauggaccuugaaggaaaacaggguaauuucaaaaaucuuagggaauuuguguuuaagaauauugaugguuauuuuaaaauauauucuaagcacacgccuauuaauuuagugcgugaucucccucaggguuuuucggcuuuagaaccauugguagauuugccaauagguauuaacaucacuagguuucaaacuuuacuugcuuuacauagaaguuauuugacuccuggugauucuucuucagguuggacagcuggugcugcagcuuauuauguggguuaucuucaaccuaggacuuuucuauuaaaauauaaugaaaauggaaccauuacagaugcuguagacugugcacuugacccucucucagaaacaaaguguacguugaaauccuucacuguagaaaaaggaaucuaucaaacuucuaacuuuagaguccaaccaacagaaucuauuguuagauuuccuaauauuacaaacuugugcccuuuuggugaaguuuuuaacgccaccagauuugcaucuguuuaugcuuggaacaggaagagaaucagcaacuguguugcugauuauucuguccuauauaauuccgcaucauuuuccacuuuuaaguguuauggagugucuccuacuaaauuaaaugaucucugcuuuacuaaugucuaugcagauucauuuguaauuagaggugaugaagucagacaaaucgcuccagggcaaacuggaaagauugcugauuauaauuauaaauuaccagaugauuuuacaggcugcguuauagcuuggaauucuaacaaucuugauucuaagguuggugguaauuauaauuaccuguauagauuguuuaggaagucuaaucucaaaccuuuugagagagauauuucaacugaaaucuaucaggccgguagcacaccuuguaaugguguugaagguuuuaauuguuacuuuccuuuacaaucauaugguuuccaacccacuaaugguguugguuaccaaccauacagaguaguaguacuuucuuuugaacuucuacaugcaccagcaacuguuuguggaccuaaaaagucuacuaauuugguuaaaaacaaaugugucaauuucaacuucaaugguuuaacaggcacagguguucuuacugagucuaacaaaaaguuucugccuuuccaacaauuuggcagagacauugcugacacuacugaugcuguccgugauccacagacacuugagauucuugacauuacaccauguucuuuugguggugucaguguuauaacaccaggaacaaauacuucuaaccagguugcuguucuuuaucaggauguuaacugcacagaagucccuguugcuauucaugcagaucaacuuacuccuacuuggcguguuuauucuacagguucuaauguuuuucaaacacgugcaggcuguuuaauaggggcugaacaugucaacaacucauaugagugugacauacccauuggugcagguauaugcgcuaguuaucagacucagacuaauucuccucggcgggcacguaguguagcuagucaauccaucauugccuacacuaugucacuuggugcagaaaauucaguugcuuacucuaauaacucuauugccauacccacaaauuuuacuauuaguguuaccacagaaauucuaccagugucuaugaccaagacaucaguagauuguacaauguacauuuguggugauucaacugaaugcagcaaucuuuuguugcaauauggcaguuuuuguacacaauuaaaccgugcuuuaacuggaauagcuguugaacaagacaaaaacacccaagaaguuuuugcacaagucaaacaaauuuacaaaacaccaccaauuaaagauuuuggugguuuuaauuuuucacaaauauuaccagauccaucaaaaccaagcaagaggucauuuauugaagaucuacuuuucaacaaagugacacuugcagaugcuggcuucaucaaacaauauggugauugccuuggugauauugcugcuagagaccucauuugugcacaaaaguuuaacggccuuacuguuuugccaccuuugcucacagaugaaaugauugcucaauacacuucugcacuguuagcggguacaaucacuucugguuggaccuuuggugcaggugcugcauuacaaauaccauuugcuaugcaaauggcuuauagguuuaaugguauuggaguuacacagaauguucucuaugagaaccaaaaauugauugccaaccaauuuaauagugcuauuggcaaaauucaagacucacuuucuuccacagcaagugcacuuggaaaacuucaagauguggucaaccaaaaugcacaagcuuuaaacacgcuuguuaaacaacuuagcuccaauuuuggugcaauuucaaguguuuuaaaugauauccuuucacgucuugacaaaguugaggcugaagugcaaauugauagguugaucacaggcagacuucaaaguuugcagacauaugugacucaacaauuaauuagagcugcagaaaucagagcuucugcuaaucuugcugcuacuaaaaugucagaguguguacuuggacaaucaaaaagauuugauuuuuguggaaagggcuaucaucuuauguccuucccucagucagcaccucaugguguagucuucuugcaugugacuuaugucccugcacaagaaaagaacuucacaacugcuccugccauuugucaugauggaaaagcacacuuuccucgugaaggugucuuuguuucaaauggcacacacugguuuguaacacaaaggaauuuuuaugaaccacaaaucauuacuacagacaacacauuugugucugguaacugugauguuguaauaggaauugucaacaacacaguuuaugauccuuugcaaccugaauuagacucauucaaggaggaguuagauaaauauuuuaagaaucauacaucaccagauguugauuuaggugacaucucuggcauuaaugcuucaguuguaaacauucaaaaagaaauugaccgccucaaugagguugccaagaauuuaaaugaaucucucaucgaucuccaagaacuuggaaaguaugagcaguauauaaaauggccaugguacauuuggcuagguuuuauagcuggcuugauugccauaguaauggugacaauuaugcuuugcuguaugaccaguugcuguaguugucucaagggcuguuguucuuguggauccugcugcaaauuugaugaagacgacucugagccagugcucaaaggagucaaauuacauuacacauaa

SEQ ID NO: 11701 - RNA, 3822 nt, Artificial Sequence
  SARS-CoV-2/China/WF0028/2020__EPI_ISL_413791 spike protein CDS wt (1-1273)
auguuuguuuuucuuguuuuauugccacuagucucuagucaguguguuaaucuuacaaccagaacucaauuacccccugcauacacuaauucuuucacacgugguguuuauuacccugacaaaguuuucagauccucaguuuuacauucaacucaggacuuguucuuaccuuucuuuuccaauguuacuugguuccaugcuauacaugucucugggaccaaugguacuaagagguuugauaacccuguccuaccauuuaaugaugguguuuauuuugcuuccacugagaagucuaacauaauaagaggcuggauuuuugguacuacuuuagauucgaagacccagucccuacuuauuguuaauaacgcuacuaauguuguuauuaaagucugugaauuucaauuuuguaaugauccauuuuuggguguuuauuaccacaaaaacaacaaaaguuggauggaaagugaguucagaguuuauucuagugcgaauaauugcacuuuugaauaugucucucagccuuuucuuauggaccuugaaggaaaacaggguaauuucaaaaaucuuagggaauuuguguuuaagaauauugaugguuauuuuaaaauauauucuaagcacacgccuauuaauuuagugcgugaucucccucaggguuuuucggcuuuagaaccauugguagauuugccaauagguauuaacaucacuagguuucaaacuuuacuugcuuuacauagaaguuauuugacuccuggugauucuucuucagguuggacagcuggugcugcagcuuauuauguggguuaucuucaaccuaggacuuuucuauuaaaauauaaugaaaauggaaccauuacagaugcuguagacugugcacuugacccucucucagaaacaaaguguacguugaaauccuucacuguagaaaaaggaaucuaucaaacuucuaacuuuagaguccaaccaacagaaucuauuguuagauuuccuaauauuacaaacuugugcccuuuuggugaaguuuuuaacgccaccagauuugcaucuguuuaugcuuggaacaggaagagaaucagcaacuguguugcugauuauucuguccuauauaauuccgcaucauuuuccacuuuuaaguguuauggagugucuccuacuaaauuaaaugaucucugcuuuacuaaugucuaugcagauucauuuguaauuagaggugaugaagucagacaaaucgcuccagggcaaacuggaaagauugcugauuauaauuauaaauuaccagaugauuuuacaggcugcguuauagcuuggaauucuaacaaucuugauucuaagguuggugguaauuauaauuaccuguauagauuguuuaggaagucuaaucucaaaccuuuugagagagauauuucaacugaaaucuaucaggccgguagcacaccuuguaaugguguugaagguuuuaauuguuacuuuccuuuacaaucauaugguuuccaacccacuaaugguguugguuaccaaccauacagaguaguaguacuuucuuuugaacuucuacaugcaccagcaacuguuuguggaccuaaaaagucuacuaauuugguuaaaaacaaaugugucaauuucaacuucaaugguuuaacaggcacagguguucuuacugagucuaacaaaaaguuucugccuuuccaacaauuuggcagagacauugcugacacuacugaugcuguccgugauccacagacacuugagauucuugacauuacaccauguucuuuugguggugucaguguuauaacaccaggaacaaauacuucuaaccagguugcuguucuuuaucaggauguuaacugcacagaagucccuguugcuauucaugcagaucaacuuacuccuacuuggcguguuuauucuacagguucuaauguuuuucaaacacgugcaggcuguuuaauaggggcugaacaugucaacaacucauaugagugugacauacccauuggugcagguauaugcgcuaguuaucagacucagacuaauucuccucggcgggcacguaguguagcuagucaauccaucauugccuacacuaugucacuuggugcagaaaauucaguugcuuacucuaauaacucuauugccauacccacaaauuuuacuauuaguguuaccacagaaauucuaccagugucuaugaccaagacaucaguagauuguacaauguacauuuguggugauucaacugaaugcagcaaucuuuuguugcaauauggcaguuuuuguacacaauuaaaccgugcuuuaacuggaauagcuguugaacaagacaaaaacacccaagaaguuuuugcacaagucaaacaaauuuacaaaacaccaccaauuaaagauuuuggugguuuuaauuuuucacaaauauuaccagauccaucaaaaccaagcaagaggucauuuauugaagaucuacuuuucaacaaagugacacuugcagaugcuggcuucaucaaacaauauggugauugccuuggugauauugcugcuagagaccucauuugugcacaaaaguuuaacggccuuacuguuuugccaccuuugcucacagaugaaaugauugcucaauacacuucugcacuguuagcggguacaaucacuucugguuggaccuuuggugcaggugcugcauuacaaauaccauuugcuaugcaaauggcuuauagguuuaaugguauuggaguuacacagaauguucucuaugagaaccaaaaauugauugccaaccaauuuaauagugcuauuggcaaaauucaagacucacuuucuuccacagcaagugcacuuggaaaacuucaagauguggucaaccaaaaugcacaagcuuuaaacacgcuuguuaaacaacuuagcuccaauuuuggugcaauuucaaguguuuuaaaugauauccuuucacgucuugacaaaguugaggcugaagugcaaauugauagguugaucacaggcagacuucaaaguuugcagacauaugugacucaacaauuaauuagagcugcagaaaucagagcuucugcuaaucuugcugcuacuaaaaugucagaguguguacuuggacaaucaaaaagaguugauuuuuguggaaagggcuaucaucuuauguccuucccucagucagcaccucaugguguagucuucuugcaugugacuuaugucccugcacaagaaaagaacuucacaacugcuccugccauuugucaugauggaaaagcacacuuuccucgugaaggugucuuuguuucaaauggcacacacugguuuguaacacaaaggaauuuuuaugaaccacaaaucauuacuacagacaacacauuugugucugguaacugugauguuguaauaggaauugucaacaacacaguuuaugauccuuugcaaccugaauuagaaucauucaaggaggaguuagauaaauauuuuaagaaucauacaucaccagauguugauuuaggugacaucucuggcauuaaugcuucaguuguaaacauucaaaaagaaauugaccgccucaaugagguugccaagaauuuaaaugaaucucucaucgaucuccaagaacuuggaaaguaugagcaguauauaaaauggccaugguacauuuggcuagguuuuauagcuggcuugauugccauaguaauggugacaauuaugcuuugcuguaugaccaguugcuguaguugucucaagggcuguuguucuuguggauccugcugcaaauuugaugaagacgacucugagccagugcucaaaggagucaaauuacauuacacauaa

SEQ ID NO: 11702 - RNA, 3822 nt, Artificial Sequence
  SARS-CoV-2/2019-nCoV/USA-CruiseA-18/2020__MT159716.1 spike protein CDS wt (1-1273)
auguuuguuuuucuuguuuuauugccacuagucucuagucaguguguuaaucuuacaaccagaacucaauuacccccugcauacacuaauucuuucacacgugguguuuauuacccugacaaaguuuucagauccucaguuuuacauucaacucaggacuuguucuuaccuuucuuuuccaauguuacuugguuccaugcuauacaugucucugggaccaaugguacuaagagguuugauaacccuguccuaccauuuaaugaugguguuuauuuugcuuccacugagaagucuaacauaauaagaggcuggauuuuugguacuacuuuagauucgaagacccagucccuacuuauuguuaauaacgcuacuaauguuguuauuaaagucugugaauuucaauuuuguaaugauccauuuuuggguguuuauuaccacaaaaacaacaaaaguuggauggaaagugaguuaagaguuuauucuagugcgaauaauugcacuuuugaauaugucucucagccuuuucuuauggaccuugaaggaaaacaggguaauuucaaaaaucuuagggaauuuguguuuaagaauauugaugguuauuuuaaaauauauucuaagcacacgccuauuaauuuagugcgugaucucccucaggguuuuucggcuuuagaaccauugguagauuugccaauagguauuaacaucacuagguuucaaacuuuacuugcuuuacauagaaguuauuugacuccuggugauucuucuucagguuggacagcuggugcugcagcuuauuauguggguuaucuucaaccuaggacuuuucuauuaaaauauaaugaaaauggaaccauuacagaugcuguagacugugcacuugacccucucucagaaacaaaguguacguugaaauccuucacuguagaaaaaggaaucuaucaaacuucuaacuuuagaguccaaccaacagaaucuauuguuagauuuccuaauauuacaaacuugugcccuuuuggugaaguuuuuaacgccaccagauuugcaucuguuuaugcuuggaacaggaagagaaucagcaacuguguugcugauuauucuguccuauauaauuccgcaucauuuuccacuuuuaaguguuauggagugucuccuacuaaauuaaaugaucucugcuuuacuaaugucuaugcagauucauuuguaauuagaggugaugaagucagacaaaucgcuccagggcaaacuggaaagauugcugauuauaauuauaaauuaccagaugauuuuacaggcugcguuauagcuuggaauucuaacaaucuugauucuaagguuggugguaauuauaauuaccuguauagauuguuuaggaagucuaaucucaaaccuuuugagagagauauuucaacugaaaucuaucaggccgguagcacaccuuguaaugguguugaagguuuuaauuguuacuuuccuuuacaaucauaugguuuccaacccacuaaugguguugguuaccaaccauacagaguaguaguacuuucuuuugaacuucuacaugcaccagcaacuguuuguggaccuaaaaagucuacuaauuugguuaaaaacaaaugugucaauuucaacuucaaugguuuaacaggcacagguguucuuacugagucuaacaaaaaguuucugccuuuccaacaauuuggcagagacauugcugacacuacugaugcuguccgugauccacagacacuugagauucuugacauuacaccauguucuuuugguggugucaguguuauaacaccaggaacaaauacuucuaaccagguugcuguucuuuaucaggauguuaacugcacagaagucccuguugcuauucaugcagaucaacuuacuccuacuuggcguguuuauucuacagguucuaauguuuuucaaacacgugcaggcuguuuaauaggggcugaacaugucaacaacucauaugagugugacauacccauuggugcagguauaugcgcuaguuaucagacucagacuaauucuccucggcgggcacguaguguagcuagucaauccaucauugccuacacuaugucacuuggugcagaaaauucaguugcuuacucuaauaacucuauugccauacccacaaauuuuacuauuaguguuaccacagaaauucuaccagugucuaugaccaagacaucaguagauuguacaauguacauuuguggugauucaacugaaugcagcaaucuuuuguugcaauauggcaguuuuuguacacaauuaaaccgugcuuuaacuggaauagcuguugaacaagacaaaaacacccaagaaguuuuugcacaagucaaacaaauuuacaaaacaccaccaauuaaagauuuuggugguuuuaauuuuucacaaauauuaccagauccaucaaaaccaagcaagaggucauuuauugaagaucuacuuuucaacaaagugacacuugcagaugcuggcuucaucaaacaauauggugauugccuuggugauauugcugcuagagaccucauuugugcacaaaaguuuaacggccuuacuguuuugccaccuuugcucacagaugaaaugauugcucaauacacuucugcacuguuagcggguacaaucacuucugguuggaccuuuggugcaggugcugcauuacaaauaccauuugcuaugcaaauggcuuauagguuuaaugguauuggaguuacacagaauguucucuaugagaaccaaaaauugauugccaaccaauuuaauagugcuauuggcaaaauucaagacucacuuucuuccacagcaagugcacuuggaaaacuucaagauguggucaaccaaaaugcacaagcuuuaaacacgcuuguuaaacaacuuagcuccaauuuuggugcaauuucaaguguuuuaaaugauauccuuucacgucuugacaaaguugaggcugaagugcaaauugauagguugaucacaggcagacuucaaaguuugcagacauaugugacucaacaauuaauuagagcugcagaaaucagagcuucugcuaaucuugcugcuacuaaaaugucagaguguguacuuggacaaucaaaaagaguugauuuuuguggaaagggcuaucaucuuauguccuucccucagucagcaccucaugguguagucuucuugcaugugacuuaugucccugcacaagaaaagaacuucacaacugcuccugccauuugucaugauggaaaagcacacuuuccucgugaaggugucuuuguuucaaauggcacacacugguuuguaacacaaaggaauuuuuaugaaccacaaaucauuacuacagacaacacauuugugucugguaacugugauguuguaauaggaauugucaacaacacaguuuaugauccuuugcaaccugaauuagacucauucaaggaggaguuagauaaauauuuuaagaaucauacaucaccagauguugauuuaggugacaucucuggcauuaaugcuucaguuguaaacauucaaaaagaaauugaccgccucaaugagguugccaagaauuuaaaugaaucucucaucgaucuccaagaacuuggaaaguaugagcaguauauaaaauggccaugguacauuuggcuagguuuuauagcuggcuugauugccauaguaauggugacaauuaugcuuugcuguaugaccaguugcuguaguugucucaagggcuguuguucuuguggauccugcugcaaauuugaugaagacgacucugagccagugcucaaaggagucaaauuacauuacacauaa

SEQ ID NO: 11703 - RNA, 3822 nt, Artificial Sequence
  SARS-CoV-2/SARS-CoV-2/Yunnan-01/human/2020/CHN__MT049951.1 spike protein CDS wt (1-1273)
auguuuguuuuucuuguuuuauugccacuagucucuagucaguguguuaaucuuacaaccagaacucaauuacccccugcaaacacuaauucuuucacacgugguguuuauuacccugacaaaguuuucagauccucaguuuuacauucaacucaggacuuguucuuaccuuucuuuuccaauguuacuugguuccaugcuauacaugucucugggaccaaugguacuaagagguuugauaacccuguccuaccauuuaaugaugguguuuauuuugcuuccacugagaagucuaacauaauaagaggcuggauuuuugguacuacuuuagauucgaagacccagucccuacuuauuguuaauaacgcuacuaauguuguuauuaaagucugugaauuucaauuuuguaaugauccauuuuuggguguuuauuaccacaaaaacaacaaaaguuggauggaaagugaguucagaguuuauucuagugcgaauaauugcacuuuugaauaugucucucagccuuuucuuauggaccuugaaggaaaacaggguaauuucaaaaaucuuagggaauuuguguuuaagaauauugaugguuauuuuaaaauauauucuaagcacacgccuauuaauuuagugcgugaucucccucaggguuuuucggcuuuagaaccauugguagauuugccaauagguauuaacaucacuagguuucaaacuuuacuugcuuuacauagaaguuauuugacuccuggugauucuucuucagguuggacagcuggugcugcagcuuauuauguggguuaucuucaaccuaggacuuuucuauuaaaauauaaugaaaauggaaccauuacagaugcuguagacugugcacuugacccucucucagaaacaaaguguacguugaaauccuucacuguagaaaaaggaaucuaucaaacuucuaacuuuagaguccaaccaacagaaucuauuguuagauuuccuaauauuacaaacuugugcccuuuuggugaaguuuuuaacgccaccagauuugcaucuguuuaugcuuggaacaggaagagaaucagcaacuguguugcugauuauucuguccuauauaauuccgcaucauuuuccacuuuuaaguguuauggagugucuccuacuaaauuaaaugaucucugcuuuacuaaugucuaugcagauucauuuguaauuagaggugaugaagucagacaaaucgcuccagggcaaacuggaaagauugcugauuauaauuauaaauuaccagaugauuuuacaggcugcguuauagcuuggaauucuaacaaucuugauucuaagguuggugguaauuauaauuaccuguauagauuguuuaggaagucuaaucucaaaccuuuugagagagauauuucaacugaaaucuaucaggccgguagcacaccuuguaaugguguugaagguuuuaauuguuacuuuccuuuacaaucauaugguuuccaacccacuaaugguguugguuaccaaccauacagaguaguaguacuuucuuuugaacuucuacaugcaccagcaacuguuuguggaccuaaaaagucuacuaauuugguuaaaaacaaaugugucaauuucaacuucaaugguuuaacaggcacagguguucuuacugagucuaacaaaaaguuucugccuuuccaacaauuuggcagagacauugcugacacuacugaugcuguccgugauccacagacacuugagauucuugacauuacaccauguucuuuugguggugucaguguuauaacaccaggaacaaauacuucuaaccagguugcuguucuuuaucaggauguuaacugcacagaagucccuguugcuauucaugcagaucaacuuacuccuacuuggcguguuuauucuacagguucuaauguuuuucaaacacgugcaggcuguuuaauaggggcugaacaugucaacaacucauaugagugugacauacccauuggugcagguauaugcgcuaguuaucagacucagacuaauucuccucggcgggcacguaguguagcuagucaauccaucauugccuacacuaugucacuuggugcagaaaauucaguugcuuacucuaauaacucuauugccauacccacaaauuuuacuauuaguguuaccacagaaauucuaccagugucuaugaccaagacaucaguagauuguacaauguacauuuguggugauucaacugaaugcagcaaucuuuuguugcaauauggcaguuuuuguacacaauuaaaccgugcuuuaacuggaauagcuguugaacaagacaaaaacacccaagaaguuuuugcacaagucaaacaaauuuacaaaacaccaccaauuaaagauuuuggugguuuuaauuuuucacaaauauuaccagauccaucaaaaccaagcaagaggucauuuauugaagaucuacuuuucaacaaagugacacuugcagaugcuggcuucaucaaacaauauggugauugccuuggugauauugcugcuagagaccucauuugugcacaaaaguuuaacggccuuacuguuuugccaccuuugcucacagaugaaaugauugcucaauacacuucugcacuguuagcggguacaaucacuucugguuggaccuuuggugcaggugcugcauuacaaauaccauuugcuaugcaaauggcuuauagguuuaaugguauuggaguuacacagaauguucucuaugagaaccaaaaauugauugccaaccaauuuaauagugcuauuggcaaaauucaagacucacuuucuuccacagcaagugcacuuggaaaacuucaagauguggucaaccaaaaugcacaagcuuuaaacacgcuuguuaaacaacuuagcuccaauuuuggugcaauuucaaguguuuuaaaugauauccuuucacgucuugacaaaguugaggcugaagugcaaauugauagguugaucacaggcagacuucaaaguuugcagacauaugugacucaacaauuaauuagagcugcagaaaucagagcuucugcuaaucuugcugcuacuaaaaugucagaguguguacuuggacaaucaaaaagaguugauuuuuguggaaagggcuaucaucuuauguccuucccucagucagcaccucaugguguagucuucuugcaugugacuuaugucccugcacaagaaaagaacuucacaacugcuccugccauuugucaugauggaaaagcacacuuuccucgugaaggugucuuuguuucaaauggcacacacugguuuguaacacaaaggaauuuuuaugaaccacaaaucauuacuacagacaacacauuugugucugguaacugugauguuguaauaggaauugucaacaacacaguuuaugauccuuugcaaccugaauuagacucauucaaggaggaguuagauaaauauuuuaagaaucauacaucaccagauguugauuuaggugacaucucuggcauuaaugcuucaguuguaaacauucaaaaagaaauugaccgccucaaugagguugccaagaauuuaaaugaaucucucaucgaucuccaagaacuuggaaaguaugagcaguauauaaaauggccaugguacauuuggcuagguuuuauagcuggcuugauugccauaguaauggugacaauuaugcuuugcuguaugaccaguugcuguaguugucucaagggcuguuguucuuguggauccugcugcaaauuugaugaagacgacucugagccagugcucaaaggagucaaauuacauuacacauaa

SEQ ID NO: 11704 - RNA, 3822 nt, Artificial Sequence
  SARS-CoV-2/USA/WA-UW292/2020__EPI_ISL_418077 spike protein CDS wt (1-1273)
auguuuguuuuucuuguuuuauugccacuagucucuagucaguguguuaaucuuacaaccagaacucaauuacccccugcauacacuaauucuuucacacgugguguuuauuacccugacaaaguuuucagauccucaguuuuacauucaacucaggacuuguucuuaccuuucuuuuccaauguuacuugguuccaugcuauacaugucucugggaccaaugguacuaagagguuugauaacccuguccuaccauuuaaugaugguguuuauuuugcuuccacugagaagucuaacauaauaagaggcuggauuuuugguacuacuuuagauucgaagacccagucccuacuuauuguuaauaacgcuacuaauguuguuauuaaagucugugaauuucaauuuuguaaugauccauuuuuggguguuuauuaccacaaaaacaacaaaaguuggauggaaagugaguucagaguuuauucuagugcgaauaauugcacuuuugaauaugucucucagccuuuucuuauggaccuugaaggaaaacaggguaauuucaaaaaucuuagggaauuuguguuuaagaauauugaugguuauuuuaaaauauauucuaagcacacgccuauuaauuuagugcgugaucucccucaggguuuuucggcuuuagaaccauugguagauuugccaauagguauuaacaucacuagguuucaaacuuuacuugcuuuacauagaaguuauuugacuccuggugauucuucuucagguuggacagcuggugcugcagcuuauuauguggguuaucuucaaccuaggacuuuucuauuaaaauauaaugaaaauggaaccauuacagaugcuguagacugugcacuugacccucucucagaaacaaaguguacguugaaauccuucacuguagaaaaaggaaucuaucaaacuucuaacuuuagaguccaaccaacagaaucuauuguuagauuuccuaauauuacaaacuugugcccuuuuggugaaguuuuuaacgccaccagauuugcaucuguuuaugcuuggaacaggaagagaaucagcaacuguguugcugauuauucuguccuauauaauuccgcaucauuuuccacuuuuaaguguuauggagugucuccuacuaaauuaaaugaucucugcuuuacuaaugucuaugcagauucauuuguaauuagaggugaugaagucagacaaaucgcuccagggcaaacuggaaagauugcugauuauaauuauaaauuaccagaugauuuuacaggcugcguuauagcuuggaauucuaacaaucuugauucuaagguuggugguaauuauaauuaccuguauagauuguuuaggaagucuaaucucaaaccuuuugagagagauauuucaacugaaaucuaucaggccaguagcacaccuuguaaugguguugaagguuuuaauuguuacuuuccuuuacaaucauaugguuuccaacccacuaaugguguugguuaccaaccauacagaguaguaguacuuucuuuugaacuucuacaugcaccagcaacuguuuguggaccuaaaaagucuacuaauuugguuaaaaacaaaugugucaauuucaacuucaaugguuuaacaggcacagguguucuuacugagucuaacaaaaaguuucugccuuuccaacaauuuggcagagacauugcugacacuacugaugcuguccgugauccacagacacuugagauucuugacauuacaccauguucuuuugguggugucaguguuauaacaccaggaacaaauacuucuaaccagguugcuguucuuuaucaggauguuaacugcacagaagucccuguugcuauucaugcagaucaacuuacuccuacuuggcguguuuauucuacagguucuaauguuuuucaaacacgugcaggcuguuuaauaggggcugaacaugucaacaacucauaugagugugacauacccauuggugcagguauaugcgcuaguuaucagacucagacuaauucuccucggcgggcacguaguguagcuagucaauccaucauugccuacacuaugucacuuggugcagaaaauucaguugcuuacucuaauaacucuauugccauacccacaaauuuuacuauuaguguuaccacagaaauucuaccagugucuaugaccaagacaucaguagauuguacaauguacauuuguggugauucaacugaaugcagcaaucuuuuguugcaauauggcaguuuuuguacacaauuaaaccgugcuuuaacuggaauagcuguugaacaagacaaaaacacccaagaaguuuuugcacaagucaaacaaauuuacaaaacaccaccaauuaaagauuuuggugguuuuaauuuuucacaaauauuaccagauccaucaaaaccaagcaagaggucauuuauugaagaucuacuuuucaacaaagugacacuugcagaugcuggcuucaucaaacaauauggugauugccuuggugauauugcugcuagagaccucauuugugcacaaaaguuuaacggccuuacuguuuugccaccuuugcucacagaugaaaugauugcucaauacacuucugcacuguuagcggguacaaucacuucugguuggaccuuuggugcaggugcugcauuacaaauaccauuugcuaugcaaauggcuuauagguuuaaugguauuggaguuacacagaauguucucuaugagaaccaaaaauugauugccaaccaauuuaauagugcuauuggcaaaauucaagacucacuuucuuccacagcaagugcacuuggaaaacuucaagauguggucaaccaaaaugcacaagcuuuaaacacgcuuguuaaacaacuuagcuccaauuuuggugcaauuucaaguguuuuaaaugauauccuuucacgucuugacaaaguugaggcugaagugcaaauugauagguugaucacaggcagacuucaaaguuugcagacauaugugacucaacaauuaauuagagcugcagaaaucagagcuucugcuaaucuugcugcuacuaaaaugucagaguguguacuuggacaaucaaaaagaguugauuuuuguggaaagggcuaucaucuuauguccuucccucagucagcaccucaugguguagucuucuugcaugugacuuaugucccugcacaagaaaagaacuucacaacugcuccugccauuugucaugauggaaaagcacacuuuccucgugaaggugucuuuguuucaaauggcacacacugguuuguaacacaaaggaauuuuuaugaaccacaaaucauuacuacagacaacacauuugugucugguaacugugauguuguaauaggaauugucaacaacacaguuuaugauccuuugcaaccugaauuagacucauucaaggaggaguuagauaaauauuuuaagaaucauacaucaccagauguugauuuaggugacaucucuggcauuaaugcuucaguuguaaacauucaaaaagaaauugaccgccucaaugagguugccaagaauuuaaaugaaucucucaucgaucuccaagaacuuggaaaguaugagcaguauauaaaauggccaugguacauuuggcuagguuuuauagcuggcuugauugccauaguaauggugacaauuaugcuuugcuguaugaccaguugcuguaguugucucaagggcuguuguucuuguggauccugcugcaaauuugaugaagacgacucugagccagugcucaaaggagucaaauuacauuacacauaa

SEQ ID NO: 11705 - RNA, 3822 nt, Artificial Sequence
  SARS-CoV-2/Iceland/192/2020__EPI_ISL_417819 spike protein CDS wt (1-1273)
auguuuguuuuuuuuguuuuauugccacuagucucuagucaguguguuaaucuuacaaccagaacucaauuacccccugcauacacuaauucuuucacacgugguguuuauuacccugacaaaguuuucagauccucaguuuuacauucaacucaggacuuguucuuaccuuucuuuuccaauguuacuugguuccaugcuauacaugucucugggaccaaugguacuaagagguuugauaacccuguccuaccauuuaaugaugguguuuauuuugcuuccacugagaagucuaacauaauaagaggcuggauuuuugguacuacuuuagauucgaagacccagucccuacuuauuguuaauaacgcuacuaauguuguuauuaaagucugugaauuucaauuuuguaaugauccauuuuuggguguuuauuaccacaaaaacaacaaaaguuggauggaaagugaguucagaguuuauucuagugcgaauaauugcacuuuugaauaugucucucagccuuuucuuauggaccuugaaggaaaacaggguaauuucaaaaaucuuagggaauuuguguuuaagaauauugaugguuauuuuaaaauauauucuaagcacacgccuauuaauuuagugcgugaucucccucaggguuuuucggcuuuagaaccauugguagauuugccaauagguauuaacaucacuagguuucaaacuuuacuugcuuuacauagaaguuauuugacuccuggugauucuucuucagguuggacagcuggugcugcagcuuauuauguggguuaucuucaaccuaggacuuuucuauuaaaauauaaugaaaauggaaccauuacagaugcuguagacugugcacuugacccucucucagaaacaaaguguacguugaaauccuucacuguagaaaaaggaaucuaucaaacuucuaacuuuagaguccaaccaacagaaucuauuguuagauuuccuaauauuacaaacuugugcccuuuuggugaaguuuuuaacgccaccagauuugcaucuguuuaugcuuggaacaggaagagaaucagcaacuguguugcugauuauucuguccuauauaauuccgcaucauuuuccacuuuuaaguguuauggagugucuccuacuaaauuaaaugaucucugcuuuacuaaugucuaugcagauucauuuguaauuagaggugaugaagucagacaaaucgcuccagggcaaacuggaaagauugcugauuauaauuauaaauuaccagaugauuuuacaggcugcguuauagcuuggaauucuaacaaucuugauucuaagguuggugguaauuauaauuaccuguauagauuguuuaggaagucuaaucucaaaccuuuugagagagauauuucaacugaaaucuaucaggccgguagcacaccuuguaaugguguugaagguuuuaauuguuacuuuccuuuacaaucauaugguuuccaacccacuaaugguguugguuaccaaccauacagaguaguaguacuuucuuuugaacuucuacaugcaccagcaacuguuuguggaccuaaaaagucuacuaauuugguuaaaaacaaaugugucaauuucaacuucaaugguuuaacaggcacagguguucuuacugagucuaacaaaaaguuucugccuuuccaacaauuuggcagagacauugcugacacuacugaugcuguccgugauccacagacacuugagauucuugacauuacaccauguucuuuugguggugucaguguuauaacaccaggaacaaauacuucuaaccagguugcuguucuuuaucaggguguuaacugcacagaagucccuguugcuauucaugcagaucaacuuacuccuacuuggcguguuuauucuacagguucuaauguuuuucaaacacgugcaggcuguuuaauaggggcugaacaugucaacaacucauaugagugugacauacccauuggugcagguauaugcgcuaguuaucagacucagacuaauucuccucggcgggcacguaguguagcuagucaauccaucauugccuacacuaugucacuuggugcagaaaauucaguugcuuacucuaauaacucuauugccauacccacaaauuuuacuauuaguguuaccacagaaauucuaccagugucuaugaccaagacaucaguagauuguacaauguacauuuguggugauucaacugaaugcagcaaucuuuuguugcaauauggcaguuuuuguacacaauuaaaccgugcuuuaacuggaauagcuguugaacaagacaaaaacacccaagaaguuuuugcacaagucaaacaaauuuacaaaacaccaccaauuaaagauuuuggugguuuuaauuuuucacaaauauuaccagauccaucaaaaccaagcaagaggucauuuauugaagaucuacuuuucaacaaagugacacuugcagaugcuggcuucaucaaacaauauggugauugccuuggugauauugcugcuagagaccucauuugugcacaaaaguuuaacggccuuacuguuuugccaccuuugcucacagaugaaaugauugcucaauacacuucugcacuguuagcggguacaaucacuucugguuggaccuuuggugcaggugcugcauuacaaauaccauuugcuaugcaaauggcuuauagguuuaaugguauuggaguuacacagaauguucucuaugagaaccaaaaauugauugccaaccaauuuaauagugcuauuggcaaaauucaagacucacuuucuuccacagcaagugcacuuggaaaacuucaagauguggucaaccaaaaugcacaagcuuuaaacacgcuuguuaaacaacuuagcuccaauuuuggugcaauuucaaguguuuuaaaugauauccuuucacgucuugacaaaguugaggcugaagugcaaauugauagguugaucacaggcagacuucaaaguuugcagacauaugugacucaacaauuaauuagagcugcagaaaucagagcuucugcuaaucuugcugcuacuaaaaugucagaguguguacuuggacaaucaaaaagaguugauuuuuguggaaagggcuaucaucuuauguccuucccucagucagcaccucaugguguagucuucuugcaugugacuuaugucccugcacaagaaaagaacuucacaacugcuccugccauuugucaugauggaaaagcacacuuuccucgugaaggugucuuuguuucaaauggcacacacugguuuguaacacaaaggaauuuuuaugaaccacaaaucauuacuacagacaacacauuugugucugguaacugugauguuguaauaggaauugucaacaacacaguuuaugauccuuugcaaccugaauuagacucauucaaggaggaguuagauaaauauuuuaagaaucauacaucaccagauguugauuuaggugacaucucuggcauuaaugcuucaguuguaaacauucaaaaagaaauugaccgccucaaugagguugccaagaauuuaaaugaaucucucaucgaucuccaagaacuuggaaaguaugagcaguauauaaaauggccaugguacauuuggcuagguuuuauagcuggcuugauugccauaguaauggugacaauuaugcuuugcuguaugaccaguugcuguaguugucucaagggcuguuguucuuguggauccugcugcaaauuugaugaagacgacucugagccagugcucaaaggagucaaauuacauuacacauaa

SEQ ID NO: 11706 - RNA, 3822 nt, Artificial Sequence
  SARS-CoV-2/Belgium/ULG-6939/2020__EPI_ISL_417020 spike protein CDS wt (1-1273)
auguuuguuuuucuuguuuuauugccacuagucucuagucaguguguuaaucuuacaaccagaacucaauuacccccugcauacacuaauucuuucacacgugguguuuauuacccugacaaaguuuucagauccucaguuuuacauucaacucaggacuuguucuuaccuuucuuuuccaauguuacuugguuccaugcuauacaugucucugggaccaaugguacuaagagguuugauaacccuguccuaccauuuaaugaugguguuuauuuugcuuccacugagaagucuaacauaauaagaggcuggauuuuugguacuacuuuagauucgaagacccagucccuacuuauuguuaauaacgcuacuaauguuguuauuaaagucugugaauuucaauuuuguaaugauccauuuuuggguguuuauuaccacaaaaacaacaaaaguuggauggaaagugaguucagaguuuauucuagugcgaauaauugcacuuuugaauaugucucucagccuuuucuuauggaccuugaaggaaaacaggguaauuucaaaaaucuuagggaauuuguguuuaagaauauugaugguuauuuuaaaauauauucuaagcacacgccuauuaauuuagugcgugaucucccucaggguuuuucggcuuuagaaccauugguagauuugccaauagguauuaacaucacuagguuucaaacuuuacuugcuuuacauagaaguuauuugacuccuggugauucuucuucagguuggacagcuggugcugcagcuuauuauguggguuaucuucaaccuaggacuuuucuauuaaaauauaaugaaaauggaaccauuacagaugcuguagacugugcacuugacccucucucagaaacaaaguguacguugaaauccuucacuguagaaaaaggaaucuaucaaacuucuaacuuuagaguccaaccaacagaaucuauuguuagauuuccuaauauuacaaacuugugcccuuuuggugaaguuuuuaacgccaccagauuugcaucuguuuaugcuuggaacaggaagagaaucagcaacuguguugcugauuauucuguccuauauaauuccgcaucauuuuccacuuuuaaguguuauggagugucuccuacuaaauuaaaugaucucugcuuuacuaaugucuaugcagauucauuuguaauuagaggugaugaagucagacaaaucgcuccagggcaaacuggaaagauugcugauuauaauuauaaauuaccagaugauuuuacaggcugcguuauagcuuggaauucuaacaaucuugauucuaagguuggugguaauuauaauuaccuguauagauuguuuaggaagucuaaucucaaaccuuuugagagagauauuucaacugaaaucuaucaggccgguagcacaccuuguaaugguguugaagguuuuaauuguuacuuuccuuuacaaucauaugguuuccaacccacuaaugguguugguuaccaaccauacagaguaguaguacuuucuuuugaacuucuacaugcaccagcaacuguuuguggaccuaaaaagucuacuaauuugguuaaaaacaaaugugucaauuucaacuucaaugguuuaacaggcacagguguucuuacugagucuaacaaaaaguuucugccuuuccaacaauuuggcagagacauugcugacacuacugaugcuguccgugauccacagacacuugagauucuugacauuacaccauguucuuuugguggugucaguguuauaacaccaggaacaaauacuucuaaccagguugcuguucuuuaucaggguguuaacugcacagaagucccuguugcuauucaugcagaucaacuuacuccuacuuggcguguuuauucuacagguucuaauguuuuucaaacacgugcaggcuguuuaauaggggcugaacaugucaacaacucauaugagugugacauacccauuggugcagguauaugcgcuaguuaucagacucagacuaauucuccucggcgggcacguaguguagcuagucaauccaucauugccuacacuaugucacuuggugcagaaaauucaguuguuuacucuaauaacucuauugccauacccacaaauuuuacuauuaguguuaccacagaaauucuaccagugucuaugaccaagacaucaguagauuguacaauguacauuuguggugauucaacugaaugcagcaaucuuuuguugcaauauggcaguuuuuguacacaauuaaaccgugcuuuaacuggaauagcuguugaacaagacaaaaacacccaagaaguuuuugcacaagucaaacaaauuuacaaaacaccaccaauuaaagauuuuggugguuuuaauuuuucacaaauauuaccagauccaucaaaaccaagcaagaggucauuuauugaagaucuacuuuucaacaaagugacacuugcagaugcuggcuucaucaaacaauauggugauugccuuggugauauugcugcuagagaccucauuugugcacaaaaguuuaacggccuuacuguuuugccaccuuugcucacagaugaaaugauugcucaauacacuucugcacuguuagcggguacaaucacuucugguuggaccuuuggugcaggugcugcauuacaaauaccauuugcuaugcaaauggcuuauagguuuaaugguauuggaguuacacagaauguucucuaugagaaccaaaaauugauugccaaccaauuuaauagugcuauuggcaaaauucaagacucacuuucuuccacagcaagugcacuuggaaaacuucaagauguggucaaccaaaaugcacaagcuuuaaacacgcuuguuaaacaacuuagcuccaauuuuggugcaauuucaaguguuuuaaaugauauccuuucacgucuugacaaaguugaggcugaagugcaaauugauagguugaucacaggcagacuucaaaguuugcagacauaugugacucaacaauuaauuagagcugcagaaaucagagcuucugcuaaucuugcugcuacuaaaaugucagaguguguacuuggacaaucaaaaagaguugauuuuuguggaaagggcuaucaucuuauguccuucccucagucagcaccucaugguguagucuucuugcaugugacuuaugucccugcacaagaaaagaacuucacaacugcuccugccauuugucaugauggaaaagcacacuuuccucgugaaggugucuuuguuucaaauggcacacacugguuuguaacacaaaggaauuuuuaugaaccacaaaucauuacuacagacaacacauuugugucugguaacugugauguuguaauaggaauugucaacaacacaguuuaugauccuuugcaaccugaauuagacucauucaaggaggaguuagauaaauauuuuaagaaucauacaucaccagauguugauuuaggugacaucucuggcauuaaugcuucaguuguaaacauucaaaaagaaauugaccgccucaaugagguugccaagaauuuaaaugaaucucucaucgaucuccaagaacuuggaaaguaugagcaguauauaaaauggccaugguacauuuggcuagguuuuauagcuggcuugauugccauaguaauggugacaauuaugcuuugcuguaugaccaguugcuguaguugucucaagggcuguuguucuuguggauccugcugcaaauuugaugaagacgacucugagccagugcucaaaggagucaaauuacauuacacauaa

SEQ ID NO: 11707 - RNA, 3822 nt, Artificial Sequence
  SARS-CoV-2/France/HF2496/2020__EPI_ISL_418231 spike protein CDS wt (1-1273)
auguuuguuuuucuuguuuuauugccacuagucucuagucaguguguuaaucuuacaaccagaacucaauuacccccugcauacacuaauucuuucacacgugguguuuauuacccugacaaaguuuucagauccucaguuuuacauucaacucaggacuuguucuuaccuuucuuuuccaauguuacuugguuccaugcuauacaugucucugggaccaaugguacuaagagguuugauaacccuguccuaccauuuaaugaugguguuuauuuugcuuccacugagaagucuaacauaauaagaggcuggauuuuugguacuacuuuagauucgaagacccagucccuacuuauuguuaauaacgcuacuaauguuguuauuaaagucugugaauuucaauuuuguaaugauccauuuuuggguguuuauuaccacaaaaacaacaaaaguuggauggaaagugaguucagaguuuauucuagugcgaauaauugcacuuuugaauaugucucucagccuuuucuuauggaccuugaaggaaaacaggguaauuucaaaaaucuuagggaauuuguguuuaagaauauugaugguuauuuuaaaauauauucuaagcacacgccuauuaauuuagugcgugaucucccucaggguuuuucggcuuuagaaccauugguagauuugccaauagguauuaacaucacuagguuucaaacuuuacuugcuuuacauagaaguuauuugacuccuggugauucuucuucagguuggacagcuggugcugcagcuuauuauguggguuaucuucaaccuaggacuuuucuauuaaaauauaaugaaaauggaaccauuacagaugcuguagacugugcacuugacccucucucagaaacaaaguguacguugaaauccuucacuguagaaaaaggaaucuaucaaacuucuaacuuuagaguccaaccaacagaaucuauuguuagauuuccuaauauuacaaacuugugcccuuuuggugaaguuuuuaacgccaccagauuugcaucuguuuaugcuuggaacaggaagagaaucagcaacuguguugcugauuauucuguccuauauaauuccgcaucauuuuccacuuuuaaguguuauggagugucuccuacuaaauuaaaugaucucugcuuuacuaaugucuaugcagauucauuuguaauuagaggugaugaagucagacaaaucgcuccagggcaaacuggaaagauugcugauuauaauuauaaauuaccagaugauuuuacaggcugcguuauagcuuggaauucuaacaaucuugauucuaagguuggugguaauuauaauuaccuguauagauuguuuaggaagucuaaucucaaaccuuuugagagagauauuucaacugaaaucuaucaggccgguagcacaccuuguaaugguguugaagguuuuaauuguuacuuuccuuuacaaucauaugguuuccaacccacuaaugguguugguuaccaaccauacagaguaguaguacuuucuuuugaacuucuacaugcaccagcaacuguuuguggaccuaaaaagucuacuaauuugguuaaaaacaaaugugucaauuucaacuucaaugguuuaacaggcacagguguucuuacugagucuaacaaaaaguuucugccuuuccaacaauuuggcagagacauugcugacacuacugaugcuguccgugauccacagacacuugagauucuugacauuacaccauguucuuuugguggugucaguguuauaacaccaggaacaaauacuucuaaccagguugcuguucuuuaucaggguguuaacugcacagaagucccuguugcuauucaugcagaucaacuuacuccuacuuggcguguuuauucuacagguucuaauguuuuucaaacacgugcaggcuguuuaauaggggcugaacaugucaacaacucauaugagugugacauacccauuggugcagguauaugcgcuaguuaucagacucagacuaauucuccucggcgggcacguaguguagcuagucaauccaucauugccuacacuaugucacuuggugcagaaaauucaguugcuuacucuaauaacucuauugccauacccacaaauuuuacuauuaguguuaccacagaaauucuaccagugucuaugaccaagacaucaguagauuguacaauguacauuuguggugauucaacugaaugcagcaaucuuuuguugcaauauggcaguuuuuguacacaauuaaaccgugcuuuaacuggaauagcuguugaacaagacaaaaacacccaagaaguuuuugcacaagucaaacaaauuuacaaaacaccaccaauuaaagauuuuggugguuuuaauuuuucacaaauauuaccagauccaucaaaaccaagcaagaggucauuuauugaagaucuacuuuucaacaaagugacacuugcagaugcuggcuucaucaaacaauauggugauugccuuggugauauuguugcuagagaccucauuugugcacaaaaguuuaacggccuuacuguuuugccaccuuugcucacagaugaaaugauugcucaauacacuucugcacuguuagcggguacaaucacuucugguuggaccuuuggugcaggugcugcauuacaaauaccauuugcuaugcaaauggcuuauagguuuaaugguauuggaguuacacagaauguucucuaugagaaccaaaaauugauugccaaccaauuuaauagugcuauuggcaaaauucaagacucacuuucuuccacagcaagugcacuuggaaaacuucaagauguggucaaccaaaaugcacaagcuuuaaacacgcuuguuaaacaacuuagcuccaauuuuggugcaauuucaaguguuuuaaaugauauccuuucacgucuugacaaaguugaggcugaagugcaaauugauagguugaucacaggcagacuucaaaguuugcagacauaugugacucaacaauuaauuagagcugcagaaaucagagcuucugcuaaucuugcugcuacuaaaaugucagaguguguacuuggacaaucaaaaagaguugauuuuuguggaaagggcuaucaucuuauguccuucccucagucagcaccucaugguguagucuucuugcaugugacuuaugucccugcacaagaaaagaacuucacaacugcuccugccauuugucaugauggaaaagcacacuuuccucgugaaggugucuuuguuucaaauggcacacacugguuuguaacacaaaggaauuuuuaugaaccacaaaucauuacuacagacaacacauuugugucugguaacugugauguuguaauaggaauugucaacaacacaguuuaugauccuuugcaaccugaauuagacucauucaaggaggaguuagauaaauauuuuaagaaucauacaucaccagauguugauuuaggugacaucucuggcauuaaugcuucaguuguaaacauucaaaaagaaauugaccgccucaaugagguugccaagaauuuaaaugaaucucucaucgaucuccaagaacuuggaaaguaugagcaguauauaaaauggccaugguacauuuggcuagguuuuauagcuggcuugauugccauaguaauggugacaauuaugcuuugcuguaugaccaguugcuguaguugucucaagggcuguuguucuuguggauccugcugcaaauuugaugaagacgacucugagccagugcucaaaggagucaaauuacauuacacauaa

SEQ ID NO: 11708 - RNA, 3822 nt, Artificial Sequence
  SARS-CoV-2/USA/WA-UW291/2020__EPI_ISL_418076 spike protein CDS wt (1-1273)
auguuuguuuuucuuguuuuauugccacuagucucuagucaguguguuaaucuuacaaccagaacucaauuacccccugcauacacuaauucuuucacacgugguguuuauuacccugacaaaguuuucagauccucaguuuuacauucaacucaggacuuguucuuaccuuucuuuuccaauguuacuugguuccaugcuauacaugucucugggaccaaugguacuaagagguuugauaacccuguccuaccauuuaaugaugguguuuauuuugcuuccacugagaagucuaacauaauaagaggcuggauuuuugguacuacuuuagauucgaagacccagucccuacuuauuguuaauaacgcuacuaauguuguuauuaaagucugugaauuucaauuuuguaaugauccauuuuuggguguuuauuaccacaaaaacaacaaaaguuggauggaaagugaguucagaguuuauucuagugcgaauaauugcacuuuugaauaugucucucagccuuuucuuauggaccuugaaggaaaacaggguaauuucaaaaaucuuagggaauuuguguuuaagaauauugaugguuauuuuaaaauauauucuaagcacacgccuauuaauuuagugcgugaucucccucaggguuuuucggcuuuagaaccauugguagauuugccaauagguauuaacaucacuagguuucaaacuuuacuugcuuuacauagaaguuauuugacuccuggugauucuucuucagguuggacagcuggugcugcagcuuauuauguggguuaucuucaaccuaggacuuuucuauuaaaauauaaugaaaauggaaccauuacagaugcuguagacugugcacuugacccucucucagaaacaaaguguacguugaaauccuucacuguagaaaaaggaaucuaucaaacuucuaacuuuagaguccaaccaacagaaucuauuguuagauuuccuaauauuacaaacuugugcccuuuuggugaaguuuuuaacgccaccagauuugcaucuguuuaugcuuggaacaggaagagaaucagcaacuguguugcugauuauucuguccuauauaauuccgcaucauuuuccacuuuuaaguguuauggagugucuccuacuaaauuaaaugaucucugcuuuacuaaugucuaugcagauucauuuguaauuagaggugaugaagucagacaaaucgcuccagggcaaacuggaaagauugcugauuauaauuauaaauuaccagaugauuuuacaggcugcguuauagcuuggaauucuaacaaucuugauucuaagguuggugguaauuauaauuaccuguauagauuguuuaggaagucuaaucucaaaccuuuugagagagauauuucaacugaaaucuaucaggccgguagcacaccuuguaaugguguugaagguuuuaauuguuacuuuccuuuacaaucauaugguuuccaacccacuaaugguguugguuaccaaccauacagaguaguaguacuuucuuuugaacuucuacaugcaccagcaacuguuuguggaccuaaaaagucuacuaauuugguuaaaaacaaaugugucaauuucaacuucaaugguuuaacaggcacagguguucuuacugagucuaacaaaaaguuucugccuuuccaacaauuuggcagagacauugcugacacuacugaugcuguccgugauccacagacacuugagauucuugacauuacaccauguucuuuugguggugucaguguuauaacaccaggaacaaauacuucuaaccagguugcuguucuuuaucaggguguuaacugcacagaagucccuguugcuauucaugcagaucaacuuacuccuacuuggcguguuuauucuacagguucuaauguuuuucaaacacgugcaggcuguuuaauaggggcugaacaugucaacaacucauaugagugugacauacccauuggugcagguauaugcgcuaguuaucagacucagacuaauucuccucggcgggcacguaguguagcuagucaauccaucauugccuacacuaugucacuuggugcagaaaauucaguugcuuacucuaauaacucuauugccauacccacaaauuuuacuauuaguguuaccacagaaauucuaccagugucuaugaccaagacaucaguagauuguacaauguacauuuguggugauucaacugaaugcagcaaucuuuuguugcaauauggcaguuuuuguacacaauuaaaccgugcuuuaacuggaauagcuguugaacaagacaaaaacacccaagaaguuuuugcacaagucaaacaaauuuacaaaacaccaccaauuaaagauuuuggugguuuuaauuuuucacaaauauuaccagauccaucaaaaccaagcaagaggucauuuauugaagaucuacuuuucaacaaagugacacuugcagaugcuggcuucaucaaacaauauggugauugccuuggugauauugcugcuagagaccucauuugugcacaaaaguuuaacggccuuacuguuuugccaccuuugcucacagaugaaaugauugcucaauacacuucugcacuguuagcggguacaaucacuucugguuggaccuuuggugcaggugcugcauuacaaauaccauuugcuaugcaaauggcuuauagguuuaaugguauuggaguuacacagaauguucucuaugagaaccaaaaauugauugccaaccaauuuaauagugcuauuggcaaaauucaauacucacuuucuuccacagcaagugcacuuggaaaacuucaagauguggucaaccaaaaugcacaagcuuuaaacacgcuuguuaaacaacuuagcuccaauuuuggugcaauuucaaguguuuuaaaugauauccuuucacgucuugacaaaguugaggcugaagugcaaauugauagguugaucacaggcagacuucaaaguuugcagacauaugugacucaacaauuaauuagagcugcagaaaucagagcuucugcuaaucuugcugcuacuaaaaugucagaguguguacuuggacaaucaaaaagaguugauuuuuguggaaagggcuaucaucuuauguccuucccucagucagcaccucaugguguagucuucuugcaugugacuuaugucccugcacaagaaaagaacuucacaacugcuccugccauuugucaugauggaaaagcacacuuuccucgugaaggugucuuuguuucaaauggcacacacugguuuguaacacaaaggaauuuuuaugaaccacaaaucauuacuacagacaacacauuugugucugguaacugugauguuguaauaggaauugucaacaacacaguuuaugauccuuugcaaccugaauuagacucauucaaggaggaguuagauaaauauuuuaagaaucauacaucaccagauguugauuuaggugacaucucuggcauuaaugcuucaguuguaaacauucaaaaagaaauugaccgccucaaugagguugccaagaauuuaaaugaaucucucaucgaucuccaagaacuuggaaaguaugagcaguauauaaaauggccaugguacauuuggcuagguuuuauagcuggcuugauugccauaguaauggugacaauuaugcuuugcuguaugaccaguugcuguaguugucucaagggcuguuguucuuguggauccugcugcaaauuugaugaagacgacucugagccagugcucaaaggagucaaauuacauuacacauaa

SEQ ID NO: 11709 - RNA, 3822 nt, Artificial Sequence
  SARS-CoV-2/Portugal/PT0034/2020__EPI_ISL_418019 spike protein CDS wt (1-1273)
auguuuguuuuucuuguuuuauugccacuagucucuagucaguguguuaaucuuacaaccagaacucaauuacccccugcauacacuaauucuuucacacgugguguuuauuacccugacaaaguuuucagauccucaguuuuacauucaacucaggacuuguucuuaccuuucuuuuccaauguuacuugguuccaugcuauacaugucucugggaccaaugguacuaagagguuugauaacccuguccuaccauuuaaugaugguguuuauuuugcuuccacugagaagucuaacauaauaagaggcuggauuuuugguacuacuuuagauucgaagacccagucccuacuuauuguuaauaacgcuacuaauguuguuauuaaagucugugaauuucaauuuuguaaugauccauuuuuggguguuuauuaccacaaaaacaacaaaaguuggauggaaagugaguucagaguuuauucuagugcgaauaauugcacuuuugaauaugucucucagccuuuucuuauggaccuugaaggaaaacaggguaauuucaaaaaucuuagggaauuuguguuuaagaauauugaugguuauuuuaaaauauauucuaagcacacgccuauuaauuuagugcgugaucucccucaggguuuuucggcuuuagaaccauugguagauuugccaauagguauuaacaucacuagguuucaaacuuuacuugcuuuacauagaaguuauuugacuccuggugauucuucuucagguuggacagcuggugcugcagcuuauuauguggguuaucuucaaccuaggacuuuucuauuaaaauauaaugaaaauggaaccauuacagaugcuguagacugugcacuugacccucucucagaaacaaaguguacguugaaauccuucacuguagaaaaaggaaucuaucaaacuucuaacuuuagaguccaaccaacagaaucuauuguuagauuuccuaauauuacaaacuugugcccuuuuggugaaguuuuuaacgccaccagauuugcaucuguuuaugcuuggaacaggaagagaaucagcaacuguguugcugauuauucuguccuauauaauuccgcaucauuuuccacuuuuaaguguuauggagugucuccuacuaaauuaaaugaucucugcuuuacuaaugucuaugcagauucauuuguaauuagaggugaugaagucagacaaaucgcuccagggcaaacuggaaagauugcugauuauaauuauaaauuaccagaugauuuuacaggcugcguuauagcuuggaauucuaacaaucuugauucuaagguuggugguaauuauaauuaccuguauagauuguuuaggaagucuaaucucaaaccuuuugagagagauauuucaacugaaaucuaucaggccgguagcacaccuuguaaugguguugaagguuuuaauuguuacuuuccuuuacaaucauaugguuuccaacccacuaaugguguugguuaccaaccauacagaguaguaguacuuucuuuugaacuucuacaugcaccagcaacuguuuguggaccuaaaaagucuacuaauuugguuaaaaacaaaugugucaauuucaacuucaaugguuuaacaggcacagguguucuuacugagucuaacaaaaaguuucugccuuuccaacaauuuggcagagacauugcugacacuacugaugcuguccgugauccacagacacuugagauucuugacauuacaccauguucuuuugguggugucaguguuauaacaccaggaacaaauacuucuaaccagguugcuguucuuuaucaggguguuaacugcacagaagucccuguugcuauucaugcagaucaacuuacuccuacuuggcguguuuauucuacagguucuaauguuuuucaaacacgugcaggcuguuuaauaggggcugaacaugucaacaacucauaugagugugacauacccauuggugcagguauaugcgcuaguuaucagacucagacuaauucuccucggcgggcacguaguguagcuagucaauccaucauugccuacacuaugucacuuggugcagaaaauucaguugcuuacucuaauaacucuauugccauacccacaaauuuuacuauuaguguuaccacagaaauucuaccagugucuaugaccaagacaucaguagauuguacaauguacauuuguggugauucaacugaaugcagcaaucuuuuguugcaauauggcaguuuuuguacacaauuaaaccgugcuuuaacuggaauagcuguugaacaagacaaaaacacccaagaaguuuuugcacaagucaaacaaauuuacaaaacaccaccaauuaaagauuuuggugguuuuaauuuuucacaaauauuaccagauccaucaaaaccaagcaagaggucauuuauugaagaucuacuuuucaacaaagugacacuugcagaugcuggcuucaucaaacaauauggugauugccuuggugauauugcugcuagagaccucauuugugcacaaaaguuuaacggccuuacuguuuugccaccuuugcucacagaugaaaugauugcucaauacacuucugcacuguuagcggguacaaucacuucugguuggaccuuuggugcaggugcugcauuacaaauaccauuugcuaugcaaauggcuuauagguuuaaugguauuggaguuacacagaauguucucuaugagaaccaaaaauugauugccaaccaauuuaauagugcuauuggcaaaauucaagacucacuuucuuccacagcaagugcacuuggaaaacuucaagauguggucaaccaaaaugcacaagcuuuaaacacgcuuguuaaacaacuuagcuccaauuuuggugcaauuucaaguguuuuaaaugauauccuuucacgucuugacaaaguugaggcugaagugcaaauugauagguugaucacaggcagacuucaaaguuugcagacauaugugacucaacaauuaauuagagcugcagaaaucagagcuucugcuaaucuugcugcuacuaaaaugucagaguguguacuuggacaaucaaaaagaguugauuuuuguggaaagggcuaucaucuuauguccuucccucagucagcaccucaugguguagucuucuugcaugugacuuaugucccugcacaagaaaagaacuucacaacugcuccugccauuugucaugauggaaaagcacacuuuccucgugaaggugucuuuguuucaaauggcacacacugguuuguaacacaaaggaauuuuuaugaaccacaaaucauuacuacagacaacacauuugugucugguaacugugauguuguaauaggaauugucaacaacacaguuuaugauccuuugcaaccugaauuagacucauucaaggaggaguuagauaaauauuuuaagaaucauacaucaccagauguugauuuaggugacaucucuggcauuaaugcuucaguuguaaacauucaaaaagaaauugaccgccucaaugagguugccaagaauuuaaaugaaucucucaucgaucuccaagaacuuggaaaguaugagcaguauauaaaauggccaugguacauuuggcuagguuuuauagcuggcuugauugccauaguaauggugacaauuaugcuuugcuguauuaccaguugcuguaguugucucaagggcuguuguucuuguggauccugcugcaaauuugaugaagacgacucugagccagugcucaaaggagucaaauuacauuacacauaa

SEQ ID NO: 11710 - RNA, 3822 nt, Artificial Sequence
  SARS-CoV-2/Iceland/202/2020__EPI_ISL_417750 spike protein CDS wt (1-1273)
auguuuguuuuucuuguuuuauugccacuagucucuagucaguguguuaaucuuacaaccagaacucaauuacccccugcauacacuaauucuuucacacgugguguuuauuacccugacaaaguuuucagauccucaguuuuacauucaacucaggacuuguucuuaccuuucuuuuccaauguuacuugguuccaugcuauacaugucucugggaccaaugguacuaagagguuugauaacccuguccuaccauuuaaugaugguguuuauuuugcuuccacugagaagucuaacauaauaagaggcuggauuuuugguacuacuuuagauucgaagacccagucccuacuuauuguuaauaacgcuacuaauguuguuauuaaagucugugaauuucaauuuuguaaugauccauuuuuggguguuuauuaccacaaaaacaacaaaaguuggauggaaagugaguucagaguuuauucuagugcgaauaauugcacuuuugaauaugucucucagccuuuucuuauggaccuugaaggaaaacaggguaauuucaaaaaucuuagggaauuuguguuuaagaauauugaugguuauuuuaaaauauauucuaagcacacgccuauuaauuuagugcgugaucucccucaggguuuuucggcuuuagaaccauugguagauuugccaauagguauuaacaucacuagguuucaaacuuuacuugcuuuacauagaaguuauuugacuccuggugauucuucuucagguuggacagcuggugcugcagcuuauuauguggguuaucuucaaccuaggacuuuucuauuaaaauauaaugaaaauggaaccauuacagaugcuguagacugugcacuugacccucucucagaaacaaaguguacguugaaauccuucacuguagaaaaaggaaucuaucaaacuucuaacuuuagaguccaaccaacagaaucuauuguuagauuuccuaauauuacaaacuugugcccuuuuggugaaguuuuuaacgccaccagauuugcaucuguuuaugcuuggaacaggaagagaaucagcaacuguguugcugauuauucuguccuauauaauuccgcaucauuuuccacuuuuaaguguuauggagugucuccuacuaaauuaaaugaucucugcuuuacuaaugucuaugcagauucauuuguaauuagaggugaugaagucagacaaaucgcuccagggcaaacuggaaagauugcugauuauaauuauaaauuaccagaugauuuuacaggcugcguuauagcuuggaauucuaacaaucuugauucuaagguuggugguaauuauaauuaccuguauagauuguuuaggaagucuaaucucaaaccuuuugagagagauauuucaacugaaaucuaucaggccgguagcacaccuuguaaugguguugaagguuuuaauuguuacuuuccuuuacaaucauaugguuuccaacccacuaaugguguugguuaccaaccauacagaguaguaguacuuucuuuugaacuucuacaugcaccagcaacuguuuguggaccuaaaaagucuacuaauuugguuaaaaacaaaugugucaauuucaacuucaaugguuuaacaggcacagguguucuuacugagucuaacaaaaaguuucugccuuuccaacaauuuggcagagacauugcugacacuacugaugcuguccgugauccacagacacuugagauucuugacauuacaccauguucuuuugguggugucaguguuauaacaccaggaacaaauacuucuaaccagguugcuguucuuuaucaggauguuaacugcacagaagucccuguugcuauucaugcagaucaacuuacuccuacuuggcguguuuauucuacagguucuaauguuuuucaaacacgugcaggcuguuuaauaggggcugaacaugucaacaacucauaugagugugacauacccauuggugcagguauaugcgcuaguuaucagacucagacuaauucuccucggcgggcacguaguguagcuagucaauccaucauugccuacacuaugucacuuggugcagaaaauucaguugcuuacucuaauaacucuauugccauacccacaaauuuuacuauuaguguuaccacagaaauucuaccagugucuaugaccaagacaucaguagauuguacaauguacauuuguggugauucaacugaaugcagcaaucuuuuguugcaauauggcaguuuuuguacacaauuaaaccgugcuuuaacuggaauagcuguugaacaagacaaaaacacccaagaaguuuuugcacaagucaaacaaauuuacaaaacaccaccaauuaaagauuuuggugguuuuaauuuuucacaaauauuaccagauccaucaaaaccaagcaagaggucauuuauugaagaucuacuuuucaacaaagugacacuugcagaugcuggcuucaucaaacaauauggugauugccuuggugauauugcugcuagagaccucauuugugcacaaaaguuuaacggccuuacuguuuugccaccuuugcucacagaugaaaugauugcucaauacacuucugcacuguuagcggguacaaucacuucugguuggaccuuuggugcaggugcugcauuacaaauaccauuugcuaugcaaauggcuuauagguuuaaugguauuggaguuacacagaauguucucuaugagaaccaaaaauugauugccaaccaauuuaauagugcuauuggcaaaauucaagacucacuuucuuccacagcaagugcacuuggaaaacuucaagauguggucaaccaaaaugcacaagcuuuaaacacgcuuguuaaacaacuuagcuccaauuuuggugcaauuucaaguguuuuaaaugauauccuuucacgucuugacaaaguugaggcugaagugcaaauugauagguugaucacaggcagacuucaaaguuugcagacauaugugacucaacaauuaauuagagcugcagaaaucagagcuucugcuaaucuugcugcuacuaaaaugucagaguguguacuuggacaaucaaaaagaguugauuuuuguggaaagggcuaucaucuuauguccuucccucagucagcaccucaugguguagucuucuugcaugugacuuaugucccugcacaagaaaagaacuucacaacugcuccugccauuugucaugauggaaaagcacacuuuccucgugaaggugucuuuguuucaaauggcacacacugguuuguaacacaaaggaauuuuuaugaaccacaaaucauuacuacagacaacacauuugugucugguaacugugauguuguaauaggaauugucaacaacacaguuuaugauccuuugcaaccugaauuagacucauucaaggaggaguuagauaaauauuuuaagaaucauacaucaccagauguugauuuaggugacaucccuggcauuaaugcuucaguuguaaacauucaaaaagaaauugaccgccucaaugagguugccaagaauuuaaaugaaucucucaucgaucuccaagaacuuggaaaguaugagcaguauauaaaauggccaugguacauuuggcuagguuuuauagcuggcuugauugccauaguaauggugacaauuaugcuuugcuguaugaccaguugcuguaguugucucaagggcuguuguucuuguggauccugcugcaaauuugaugaagacgacucugagccagugcucaaaggagucaaauuacauuacacauaa

SEQ ID NO: 11711 - RNA, 3822 nt, Artificial Sequence
  SARS-CoV-2/USA/WA-UW261/2020__EPI_ISL_418046 spike protein CDS wt (1-1273)
auguuuguuuuucuuguuuuauugccacuagucucuagucaguguguuaaucuuacaaccagaacucaauuacccccugcauacacuaauucuuucacacgugguguuuauuacccugacaaaguuuucagauccucaguuuuacauucaacucaggacuuguucuuaccuuucuuuuccaauguuacuugguuccaugcuauacaugucucugggaccaaugguacuaagagguuugauaacccuguccuaccauuuaaugaugguguuuauuuugcuuccacugagaagucuaacauaauaagaggcuggauuuuugguacuacuuuagauucgaagacccagucccuacuuauuguuaauaacgcuacuaauguuguuauuaaagucugugaauuucaauuuuguaaugauccauuuuuggguguuuauuaccacaaaaacaacaaaaguuggauggaaagugaguucagaguuuauucuagugcgaauaauugcacuuuugaauaugucucucagccuuuucuuauggaccuugaaggaaaacaggguaauuucaaaaaucuuagggaauuuguguuuaagaauauugaugguuauuuuaaaauauauucuaagcacacgccuauuaauuuagugcgugaucucccucaggguuuuucggcuuuagaaccauugguagauuugccaauagguauuaacaucacuagguuucaaacuuuacuugcuuuacauagaaguuauuugacuccuggugauucuucuucagguuggacagcuggugcugcagcuuauuauguggguuaucuucaaccuaggacuuuucuauuaaaauauaaugaaaauggaaccauuacagaugcuguagacugugcacuugacccucucucagaaacaaaguguacguugaaauccuucacuguagaaaaaggaaucuaucaaacuucuaacuuuagaguccaaccaacagaaucuauuguuagauuuccuaauauuacaaacuugugcccuuuuggugaaguuuuuaacgccaccagauuuacaucuguuuaugcuuggaacaggaagagaaucagcaacuguguugcugauuauucuguccuauauaauuccgcaucauuuuccacuuuuaaguguuauggagugucuccuacuaaauuaaaugaucucugcuuuacuaaugucuaugcagauucauuuguaauuagaggugaugaagucagacaaaucgcuccagggcaaacuggaaagauugcugauuauaauuauaaauuaccagaugauuuuacaggcugcguuauagcuuggaauucuaacaaucuugauucuaagguuggugguaauuauaauuaccuguauagauuguuuaggaagucuaaucucaaaccuuuugagagagauauuucaacugaaaucuaucaggccgguagcacaccuuguaaugguguugaagguuuuaauuguuacuuuccuuuacaaucauaugguuuccaacccacuaaugguguugguuaccaaccauacagaguaguaguacuuucuuuugaacuucuacaugcaccagcaacuguuuguggaccuaaaaagucuacuaauuugguuaaaaacaaaugugucaauuucaacuucaaugguuuaacaggcacagguguucuuacugagucuaacaaaaaguuucugccuuuccaacaauuuggcagagacauugcugacacuacugaugcuguccgugauccacagacacuugagauucuugacauuacaccauguucuuuugguggugucaguguuauaacaccaggaacaaauacuucuaaccagguugcuguucuuuaucaggauguuaacugcacagaagucccuguugcuauucaugcagaucaacuuacuccuacuuggcguguuuauucuacagguucuaauguuuuucaaacacgugcaggcuguuuaauaggggcugaacaugucaacaacucauaugagugugacauacccauuggugcagguauaugcgcuaguuaucagacucagacuaauucuccucggcgggcacguaguguagcuagucaauccaucauugccuacacuaugucacuuggugcagaaaauucaguugcuuacucuaauaacucuauugccauacccacaaauuuuacuauuaguguuaccacagaaauucuaccagugucuaugaccaagacaucaguagauuguacaauguacauuuguggugauucaacugaaugcagcaaucuuuuguugcaauauggcaguuuuuguacacaauuaaaccgugcuuuaacuggaauagcuguugaacaagacaaaaacacccaagaaguuuuugcacaagucaaacaaauuuacaaaacaccaccaauuaaagauuuuggugguuuuaauuuuucacaaauauuaccagauccaucaaaaccaagcaagaggucauuuauugaagaucuacuuuucaacaaagugacacuugcagaugcuggcuucaucaaacaauauggugauugccuuggugauauugcugcuagagaccucauuugugcacaaaaguuuaacggccuuacuguuuugccaccuuugcucacagaugaaaugauugcucaauacacuucugcacuguuagcggguacaaucacuucugguuggaccuuuggugcaggugcugcauuacaaauaccauuugcuaugcaaauggcuuauagguuuaaugguauuggaguuacacagaauguucucuaugagaaccaaaaauugauugccaaccaauuuaauagugcuauuggcaaaauucaagacucacuuucuuccacagcaagugcacuuggaaaacuucaagauguggucaaccaaaaugcacaagcuuuaaacacgcuuguuaaacaacuuagcuccaauuuuggugcaauuucaaguguuuuaaaugauauccuuucacgucuugacaaaguugaggcugaagugcaaauugauagguugaucacaggcagacuucaaaguuugcagacauaugugacucaacaauuaauuagagcugcagaaaucagagcuucugcuaaucuugcugcuacuaaaaugucagaguguguacuuggacaaucaaaaagaguugauuuuuguggaaagggcuaucaucuuauguccuucccucagucagcaccucaugguguagucuucuugcaugugacuuaugucccugcacaagaaaagaacuucacaacugcuccugccauuugucaugauggaaaagcacacuuuccucgugaaggugucuuuguuucaaauggcacacacugguuuguaacacaaaggaauuuuuaugaaccacaaaucauuacuacagacaacacauuugugucugguaacugugauguuguaauaggaauugucaacaacacaguuuaugauccuuugcaaccugaauuagacucauucaaggaggaguuagauaaauauuuuaagaaucauacaucaccagauguugauuuaggugacaucucuggcauuaaugcuucaguuguaaacauucaaaaagaaauugaccgccucaaugagguugccaagaauuuaaaugaaucucucaucgaucuccaagaacuuggaaaguaugagcaguauauaaaauggccaugguacauuuggcuagguuuuauagcuggcuugauugccauaguaauggugacaauuaugcuuugcuguaugaccaguugcuguaguugucucaagggcuguuguucuuguggauccugcugcaaauuugaugaagacgacucugagccagugcucaaaggagucaaauuacauuacacauaa

SEQ ID NO: 11712 - RNA, 3822 nt, Artificial Sequence
  SARS-CoV-2/Portugal/PT0035/2020__EPI_ISL_418020 spike protein CDS wt (1-1273)
auguuuguuuuucuuguuuuauugccacuagucucuagucaguguguuaaucuuacaaccagaacucaauuacccccugcauacacuaauucuuucacacgugguguuuauuacccugacaaaguuuucagauccucaguuuuacauucaacucaggacuuguucuuaccuuucuuuuccaauguuacuugguuccaugcuauacaugucucugggaccaaugguacuaagagguuugauaacccuguccuaccauuuaaugaugguguuuauuuugcuuccacugagaagucuaacauaauaagaggcuggauuuuugguacuacuuuagauucgaagacccagucccuacuuauuguuaauaacgcuacuaauguuguuauuaaagucugugaauuucaauuuuguaaugauccauuuuuggguguuuauuaccacaaaaacaacaaaaguuggauggaaagugaguucagaguuuauucuagugcgaauaauugcacuuuugaauaugucucucagccuuuucuuauggaccuugaaggaaaacaggguaauuucaaaaaucuuagggaauuuguguuuaagaauauugaugguuauuuuaaaauauauucuaagcacacgccuauuaauuuagugcgugaucucccucaggguuuuucggcuuuagaaccauugguagauuugccaauagguauuaacaucacuagguuucaaacuuuacuugcuuuacauagaaguuauuugacuccuggugauucuucuucagguuggacagcuggugcugcagcuuauuauguggguuaucuucaaccuaggacuuuucuauuaaaauauaaugaaaauggaaccauuacagaugcuguagacugugcacuugacccucucucagaaacaaaguguacguugaaauccuucacuguagaaaaaggaaucuaucaaacuucuaacuuuagaguccaaccaacagaaucuauuguuagauuuccuaauauuacaaacuugugcccuuuuggugaaguuuuuaacgccaccagauuugcaucuguuuaugcuuggaacaggaagagaaucagcaacuguguugcugauuauucuguccuauauaauuccgcaucauuuuccacuuuuaaguguuauggagugucuccuacuaaauuaaaugaucucugcuuuacuaaugucuaugcagauucauuuguaauuagaggugaugaagucagacaaaucgcuccagggcaaacuggaaagauugcugauuauaauuauaaauuaccagaugauuuuacaggcugcguuauagcuuggaauucuaacaaucuugauucuaagguuggugguaauuauaauuaccuguauagauuguuuaggaagucuaaucucaaaccuuuugagagagauauuucaacugaaaucuaucaggccgguagcacaccuuguaaugguguugaagguuuuaauuguuacuuuccuuuacaaucauaugguuuccaacccacuaaugguguugguuaccaaccauacagaguaguaguacuuucuuuugaacuucuacaugcaccagcaacuguuuguggaccuaaaaagucuacuaauuugguuaaaaacaaaugugucaauuucaacuucaaugguuuaacaggcacagguguucuuacugagucuaacaaaaaguuucugccuuuccaacaauuuggcagagacauugcugacacuacugaugcuguccgugauccacagacacuugagauucuugacauuacaccauguucuuuugguggugucaguguuauaacaccaggaacaaauacuucuaaccagguugcuguucuuuaucaggauguuaacugcacagaagucccuguugcuauucaugcagaucaacuuacuccuacuuggcguguuuauucuacagguucuaauguuuuucaaacacgugcaggcuguuuaauaggggcugaacaugucaacaacucauaugagugugacauacccauuggugcagguauaugcgcuaguuaucagacucagacuaauucuccucggcgggcacguaguguagcuagucaauccaucauugccuacacuaugucacuuggugcagaaaauucaguugcuuacucuaauaacucuauugccauacccacaaauuuuacuauuaguguuaccacagaaauucuaccagugucuaugaccaagacaucaguagauuguacaauguacauuuguggugauucaacugaaugcagcaaucuuuuguugcaauauggcaguuuuuguacacaauuaaaccgugcuuuaacuggaauagcuguugaacaagacaaaaacacccaagaaguuuuugcacaagucaaacaaauuuacaaaacaccaccaauuaaagauuuuggugguuuuaauuuuucacaaauauuaccagauccaucaaaaccaagcaagaggucauuuauugaagaucuacuuuucaacaaagugacacuugcagaugcuggcuucaucaaacaauauggugauugccuuggugauauuucugcuagagaccucauuugugcacaaaaguuuaacggccuuacuguuuugccaccuuugcucacagaugaaaugauugcucaauacacuucugcacuguuagcggguacaaucacuucugguuggaccuuuggugcaggugcugcauuacaaauaccauuugcuaugcaaauggcuuauagguuuaaugguauuggaguuacacagaauguucucuaugagaaccaaaaauugauugccaaccaauuuaauagugcuauuggcaaaauucaagacucacuuucuuccacagcaagugcacuuggaaaacuucaagauguggucaaccaaaaugcacaagcuuuaaacacgcuuguuaaacaacuuagcuccaauuuuggugcaauuucaaguguuuuaaaugauauccuuucacgucuugacaaaguugaggcugaagugcaaauugauagguugaucacaggcagacuucaaaguuugcagacauaugugacucaacaauuaauuagagcugcagaaaucagagcuucugcuaaucuugcugcuacuaaaaugucagaguguguacuuggacaaucaaaaagaguugauuuuuguggaaagggcuaucaucuuauguccuucccucagucagcaccucaugguguagucuucuugcaugugacuuaugucccugcacaagaaaagaacuucacaacugcuccugccauuugucaugauggaaaagcacacuuuccucgugaaggugucuuuguuucaaauggcacacacugguuuguaacacaaaggaauuuuuaugaaccacaaaucauuacuacagacaacacauuugugucugguaacugugauguuguaauaggaauugucaacaacacaguuuaugauccuuugcaaccugaauuagacucauucaaggaggaguuagauaaauauuuuaagaaucauacaucaccagauguugauuuaggugacaucucuggcauuaaugcuucaguuguaaacauucaaaaagaaauugaccgccucaaugagguugccaagaauuuaaaugaaucucucaucgaucuccaagaacuuggaaaguaugagcaguauauaaaauggccaugguacauuuggcuagguuuuauagcuggcuugauugccauaguaauggugacaauuaugcuuugcuguaugaccaguugcuguaguugucucaagggcuguuguucuuguggauccugcugcaaauuugaugaagacgacucugagccagugcucaaaggagucaaauuacauuacacauaa

SEQ ID NO: 11713 - RNA, 3822 nt, Artificial Sequence
  SARS-CoV-2/USA/NY-NYUMC7/2020__EPI_ISL_418192 spike protein CDS wt (1-1273)
auguuuguuuuucuuguuuuauugccacuagucucuagucaguguguuaaucuuacaaccagaacucaauuacccccugcauacacuaauucuuucacacgugguguuuauuacccugacaaaguuuucagauccucaguuuuacauucaacucaggacuuguucuuaccuuucuuuuccaauguuacuugguuccaugcuauacaugucucugggaccaaugguacuaagagguuugauaacccuguccuaccauuuaaugaugguguuuauuuugcuuccacugagaagucuaacauaauaagaggcuggauuuuugguacuacuuuagauucgaagacccagucccuacuuauuguuaauaacgcuacuaauguuguuauuaaagucugugaauuucaauuuuguaaugauccauuuuuggguguuuaucaccacaaaaacaacaaaaguuggauggaaagugaguucagaguuuauucuagugcgaauaauugcacuuuugaauaugucucucagccuuuucuuauggaccuugaaggaaaacaggguaauuucaaaaaucuuagggaauuuguguuuaagaauauugaugguuauuuuaaaauauauucuaagcacacgccuauuaauuuagugcgugaucucccucaggguuuuucggcuuuagaaccauugguagauuugccaauagguauuaacaucacuagguuucaaacuuuacuugcuuuacauagaaguuauuugacuccuggugauucuucuucagguuggacagcuggugcugcagcuuauuauguggguuaucuucaaccuaggacuuuucuauuaaaauauaaugaaaauggaaccauuacagaugcuguagacugugcacuugacccucucucagaaacaaaguguacguugaaauccuucacuguagaaaaaggaaucuaucaaacuucuaacuuuagaguccaaccaacagaaucuauuguuagauuuccuaauauuacaaacuugugcccuuuuggugaaguuuuuaacgccaccagauuugcaucuguuuaugcuuggaacaggaagagaaucagcaacuguguugcugauuauucuguccuauauaauuccgcaucauuuuccacuuuuaaguguuauggagugucuccuacuaaauuaaaugaucucugcuuuacuaaugucuaugcagauucauuuguaauuagaggugaugaagucagacaaaucgcuccagggcaaacuggaaagauugcugauuauaauuauaaauuaccagaugauuuuacaggcugcguuauagcuuggaauucuaacaaucuugauucuaagguuggugguaauuauaauuaccuguauagauuguuuaggaagucuaaucucaaaccuuuugagagagauauuucaacugaaaucuaucaggccgguagcacaccuuguaaugguguugaagguuuuaauuguuacuuuccuuuacaaucauaugguuuccaacccacuaaugguguugguuaccaaccauacagaguaguaguacuuucuuuugaacuucuacaugcaccagcaacuguuuguggaccuaaaaagucuacuaauuugguuaaaaacaaaugugucaauuucaacuucaaugguuuaacaggcacagguguucuuacugagucuaacaaaaaguuucugccuuuccaacaauuuggcagagacauugcugacacuacugaugcuguccgugauccacagacacuugagauucuugacauuacaccauguucuuuugguggugucaguguuauaacaccaggaacaaauacuucuaaccagguugcuguucuuuaucaggguguuaacugcacagaagucccuguugcuauucaugcagaucaacuuacuccuacuuggcguguuuauucuacagguucuaauguuuuucaaacacgugcaggcuguuuaauaggggcugaacaugucaacaacucauaugagugugacauacccauuggugcagguauaugcgcuaguuaucagacucagacuaauucuccucggcgggcacguaguguagcuagucaauccaucauugccuacacuaugucacuuggugcagaaaauucaguugcuuacucuaauaacucuauugccauacccacaaauuuuacuauuaguguuaccacagaaauucuaccagugucuaugaccaagacaucaguagauuguacaauguacauuuguggugauucaacugaaugcagcaaucuuuuguugcaauauggcaguuuuuguacacaauuaaaccgugcuuuaacuggaauagcuguugaacaagacaaaaacacccaagaaguuuuugcacaagucaaacaaauuuacaaaacaccaccaauuaaagauuuuggugguuuuaauuuuucacaaauauuaccagauccaucaaaaccaagcaagaggucauuuauugaagaucuacuuuucaacaaagugacacuugcagaugcuggcuucaucaaacaauauggugauugccuuggugauauugcugcuagagaccucauuugugcacaaaaguuuaacggccuuacuguuuugccaccuuugcucacagaugaaaugauugcucaauacacuucugcacuguuagcggguacaaucacuucugguuggaccuuuggugcaggugcugcauuacaaauaccauuugcuaugcaaauggcuuauagguuuaaugguauuggaguuacacagaauguucucuaugagaaccaaaaauugauugccaaccaauuuaauagugcuauuggcaaaauucaagacucacuuucuuccacagcaagugcacuuggaaaacuucaagauguggucaaccaaaaugcacaagcuuuaaacacgcuuguuaaacaacuuagcuccaauuuuggugcaauuucaaguguuuuaaaugauauccuuucacgucuugacaaaguugaggcugaagugcaaauugauagguugaucacaggcagacuucaaaguuugcagacauaugugacucaacaauuaauuagagcugcagaaaucagagcuucugcuaaucuugcugcuacuaaaaugucagaguguguacuuggacaaucaaaaagaguugauuuuuguggaaagggcuaucaucuuauguccuucccucagucagcaccucaugguguagucuucuugcaugugacuuaugucccugcacaagaaaagaacuucacaacugcuccugccauuugucaugauggaaaagcacacuuuccucgugaaggugucuuuguuucaaauggcacacacugguuuguaacacaaaggaauuuuuaugaaccacaaaucauuacuacagacaacacauuugugucugguaacugugauguuguaauaggaauugucaacaacacaguuuaugauccuuugcaaccugaauuagacucauucaaggaggaguuagauaaauauuuuaagaaucauacaucaccagauguugauuuaggugacaucucuggcauuaaugcuucaguuguaaacauucaaaaagaaauugaccgccucaaugagguugccaagaauuuaaaugaaucucucaucgaucuccaagaacuuggaaaguaugagcaguauauaaaauggccaugguacauuuggcuagguuuuauagcuggcuugauugccauaguaauggugacaauuaugcuuugcuguaugaccaguugcuguaguugucucaagggcuguuguucuuguggauccugcugcaaauuugaugaagacgacucugagccagugcucaaaggagucaaauuacauuacacauaa

SEQ ID NO: 11714 - RNA, 3822 nt, Artificial Sequence
  SARS-CoV-2/Iceland/189/2020__EPI_ISL_417709 spike protein CDS wt (1-1273)
auguuuguuuuucuuguuuuauugccacuagucucuagucaguguguuaaucuuacaaccagaacucaauuacccccugcauacacuaauucuuucacacgugguguuuauuacccugacaaaguuuucagauccucaguuuuacauucaacucaggacuuguucuuaccuuucuuuuccaauguuacuugguuccaugcuauacaugucucugggaccaaugguacuaagagguuugauaacccuguccuaccauuuaaugaugguguuuauuuugcuuccacugagaagucuaacauaauaagaggcuggauuuuugguacuacuuuagauucgaagacccagucccuacuuauuguuaauaacgcuacuaauguuguuauuaaagucugugaauuucaauuuuguaaugauccauuuuuggguguuuauuaccacaaaaacaacaaaaguuggauggaaagugaguucagaguuuauucuagugcgaauaauugcacuuuugaauaugucucucagccuuuucuuauggaccuugaaggaaaacaggguaauuucaaaaaucuuagggaauuuguguuuaagaauauugaugguuauuuuaaaauauauucuaagcacacgccuauuaauuuagugcgugaucucccucaggguuuuucggcuuuagaaccauugguagauuugccaauagguauuaacaucacuagguuucaaacuuuacuugcuuuacauagaaguuauuugacuccuggugauucuucuucagguuggacagcuggugcugcagcuuauuauguggguuaucuucaaccuaggacuuuucuauuaaaauauaaugaaaauggaaccauuacagaugcuguagacugugcacuugacccucucucagaaacaaaguguacguugaaauccuucacuguagaaaaaggaaucuaucaaacuucuaacuuuagaguccaaccaacagaaucuauuguuagauuuccuaauauuacaaacuugugcccuuuuggugaaguuuuuaacgccaccagauuugcaucuguuuaugcuuggaacaggaagagaaucagcaacuguguugcugauuauucuguccuauauaauuccgcaucauuuuccacuuuuaaguguuauggagugucuccuacuaaauuaaaugaucucugcuuuacuaaugucuaugcagauucauuuguaauuagaggugaugaagucagacaaaucgcuccagggcaaacuggaaagauugcugauuauaauuauaaauuaccagaugauuuuacaggcugcguuauagcuuggaauucuaacaaucuugauucuaagguuggugguaauuauaauuaccuguauagauuguuuaggaagucuaaucucaaaccuuuugagagagauauuucaacugaaaucuaucaggccgguagcacaccuuguaaugguguugaagguuuuaauuguuacuuuccuuuacaaucauaugguuuccaacccacuaaugguguugguuaccaaccauacagaguaguaguacuuucuuuugaacuucuacaugcaccagcaacuguuuguggaccuaaaaagucuacuaauuugguuaaaaacaaaugugucaauuucaacuucaaugguuuaacaggcacagguguucuuacugagucuaacaaaaaguuucugccuuuccaacaauuuggcagagacauugcugacacuacugaugcuguccgugauccacagacacuugagauucuugacauuacaccauguucuuuugguggugucaguguuauaacaccaggaacaaauacuucuaaccagguugcuguucuuuaucaggguguuaacugcacagaagucccuguugcuauucaugcagaucaacuuacuccuacuuggcguguuuauucuacagguucuaauguuuuucaaacacgugcaggcuguuuaauaggggcugaacaugucaacaacucauaugagugugacauacccauuggugcagguauaugcgcuaguuaucagacucagacuaauucuccucggcgggcacguaguguagcuagucaauccaucauugccuacacuaugucacuuggugcagaaaauucaguugcuuacucuaauaacucuauugccauacccacaaauuuuacuauuaguguuaccacagaaauucuaccagugucuaugaccaagacaucaguagauuguacaauguacauuuguggugauucaacugaaugcagcaaucuuuuguugcaauauggcaguuuuuguacacaauuaaaccgugcuuuaacuggaauagcuguugaacaagacaaaaacacccaagaaguuuuugcacaagucaaacaaauuuacaaaacaccaccaauuaaagauuuuggugguuuuaauuuuucacaaauauuaccagauccaucaaaaccaagcaagaggucauuuauugaagaucuacuuuucaacaaagugacacuugcagaugcuggcuucaccaaacaauauggugauugccuuggugauauugcugcuagagaccucauuugugcacaaaaguuuaacggccuuacuguuuugccaccuuugcucacagaugaaaugauugcucaauacacuucugcacuguuagcggguacaaucacuucugguuggaccuuuggugcaggugcugcauuacaaauaccauuugcuaugcaaauggcuuauagguuuaaugguauuggaguuacacagaauguucucuaugagaaccaaaaauugauugccaaccaauuuaauagugcuauuggcaaaauucaagacucacuuucuuccacagcaagugcacuuggaaaacuucaagauguggucaaccaaaaugcacaagcuuuaaacacgcuuguuaaacaacuuagcuccaauuuuggugcaauuucaaguguuuuaaaugauauccuuucacgucuugacaaaguugaggcugaagugcaaauugauagguugaucacaggcagacuucaaaguuugcagacauaugugacucaacaauuaauuagagcugcagaaaucagagcuucugcuaaucuugcugcuacuaaaaugucagaguguguacuuggacaaucaaaaagaguugauuuuuguggaaagggcuaucaucuuauguccuucccucagucagcaccucaugguguagucuucuugcaugugacuuaugucccugcacaagaaaagaacuucacaacugcuccugccauuugucaugauggaaaagcacacuuuccucgugaaggugucuuuguuucaaauggcacacacugguuuguaacacaaaggaauuuuuaugaaccacaaaucauuacuacagacaacacauuugugucugguaacugugauguuguaauaggaauugucaacaacacaguuuaugauccuuugcaaccugaauuagacucauucaaggaggaguuagauaaauauuuuaagaaucauacaucaccagauguugauuuaggugacaucucuggcauuaaugcuucaguuguaaacauucaaaaagaaauugaccgccucaaugagguugccaagaauuuaaaugaaucucucaucgaucuccaagaacuuggaaaguaugagcaguauauaaaauggccaugguacauuuggcuagguuuuauagcuggcuugauugccauaguaauggugacaauuaugcuuugcuguaugaccaguugcuguaguugucucaagggcuguuguucuuguggauccugcugcaaauuugaugaagacgacucugagccagugcucaaaggagucaaauuacauuacacauaa

SEQ ID NO: 11715 - RNA, 3822 nt, Artificial Sequence
  SARS-CoV-2/Australia/NSW56/2020__EPI_ISL_417408 spike protein CDS wt (1-1273)
auguuuguuuuucuuguuuuauugccacuagucucuagucaguguguuaaucuuacaaccagaacucaauuacccccugcauacacuaauucuuucacacgugguguuuauuacccugacaaaguuuucagauccucaguuuuacauucaacucaggacuuguucuuaccuuucuuuuccaauguuacuugguuccaugcuauacaugucucugggaccaaugguacuaagagguuugauaacccuguccuaccauuuaaugaugguguuuauuuugcuuccacugagaagucuaacauaauaagaggcuggauuuuugguacuacuuuagauucgaagacccagucccuacuuauuguuaauaacgcuacuaauguuguuauuaaagucugugaauuucaauuuuguaaugauccauuuuuggguguuuauuaccacaaaaacaacaaaaguuggauggaaagugaguucagaguuuauucuagugcgaauaauugcacuuuugaauaugucucucagccuuuucuuauggaccuugaaggaaaacaggguaauuucaaaaaucuuagggaauuuguguuuaagaauauugaugguuauuuuaaaauauauucuaagcacacgccuauuaauuuagugcgugaucucccucaggguuuuucggcuuuagaaccauugguagauuugccaauagguauuaacaucacuagguuucaaacuuuacuugcuuuacauagaaguuauuugacuccuggugauucuucuucagguuggacagcuggugcugcagcuuauuauguggguuaucuucaaccuaggacuuuucuauuaaaauauaaugaaaauggaaccauuacagaugcuguagacugugcacuugacccucucucagaaacaaaguguacguugaaauccuucacuguagaaaaaggaaucuaucaaacuucuaacuuuagaguccaaccaacagaaucuauuguuagauuuccuaauauuacaaacuugugcccuuuuggugaaguuuuuaacgccaccagauuugcaucuguuuaugcuuggaacaggaagagaaucagcaacuguguugcugauuauucuguccuauauaauuccgcaucauuuuccacuuuuaaguguuauggagugucuccuacuaaauuaaaugaucucugcuuuacuaaugucuaugcagauucauuuguaauuagaggugaugaagucagacaaaucgcuccagggcaaacuggaaagauugcugauuauaauuauaaauuaccagaugauuuuacaggcugcguuauagcuuggaauucuaacaaucuugauucuaagguuggugguaauuauaauuaccuguauagauuguuuaggaagucuaaucucaaaccuuuugagagagauauuucaacugaaaucuaucaggccgguagcacaccuuguaaugguguugaagguuuuaauuguuacuuuccuuuacaaucauaugguuuccaacccacuaaugguguugguuaccaaccauacagaguaguaguacuuucuuuugaacuucuacaugcaccagcaacuguuuguggaccuaaaaagucuacuaauuugguuaaaaacaaaugugucaauuucaacuucaaugguuuaacaggcacagguguucuuacugagucuaacaaaaaguuucugccuuuccaacaauuuggcagagacauugcugacacuacugaugcuguccgugauccacagacacuugagauucuugacauuacaccauguucuuuugguggugucaguguuauaacaccaggaacaaauacuucuaaccagguugcuguucuuuaucaggauguuaacugcacagaagucccuguugcuauucaugcagaucaacuuacuccuacuuggcguguuuauucuacagguucuaauguuuuucaaacacgugcaggcuguuuaauaggggcugaacaugucaacaacucauaugagugugacauacccauuggugcagguauaugcgcuaguuaucagacucagacuaauucuccucggcgggcacguaguguagcuagucaauccaucauugccuacacuaugucacuuggugcagaaaauucaguugcuuacucuaauaacucuauugccauacccacaaauuuuacuauuaguguuaccacagaaauucuaccagugucuaugaccaagacaucaguagauuguacaauguacauuuguggugauucaacugaaugcagcaaucuuuuguugcaauauggcaguuuuuguacacaauuaaaccgugcuuuaacuggaauagcuguugaacaagacaaaaacacccaagaaguuuuugcacaagucaaacaaauuuacaaaacaccaccaauuaaagauuuuggugguuuuaauuuuucacaaauauuaccagauucaucaaaaccaagcaagaggucauuuauugaagaucuacuuuucaacaaagugacacuugcagaugcuggcuucaucaaacaauauggugauugccuuggugauauugcugcuagagaccucauuugugcacaaaaguuuaacggccuuacuguuuugccaccuuugcucacagaugaaaugauugcucaauacacuucugcacuguuagcggguacaaucacuucugguuggaccuuuggugcaggugcugcauuacaaauaccauuugcuaugcaaauggcuuauagguuuaaugguauuggaguuacacagaauguucucuaugagaaccaaaaauugauugccaaccaauuuaauagugcuauuggcaaaauucaagacucacuuucuuccacagcaagugcacuuggaaaacuucaagauguggucaaccaaaaugcacaagcuuuaaacacgcuuguuaaacaacuuagcuccaauuuuggugcaauuucaaguguuuuaaaugauauccuuucacgucuugacaaaguugaggcugaagugcaaauugauagguugaucacaggcagacuucaaaguuugcagacauaugugacucaacaauuaauuagagcugcagaaaucagagcuucugcuaaucuugcugcuacuaaaaugucagaguguguacuuggacaaucaaaaagaguugauuuuuguggaaagggcuaucaucuuauguccuucccucagucagcaccucaugguguagucuucuugcaugugacuuaugucccugcacaagaaaagaacuucacaacugcuccugccauuugucaugauggaaaagcacacuuuccucgugaaggugucuuuguuucaaauggcacacacugguuuguaacacaaaggaauuuuuaugaaccacaaaucauuacuacagacaacacauuugugucugguaacugugauguuguaauaggaauugucaacaacacaguuuaugauccuuugcaaccugaauuagacucauucaaggaggaguuagauaaauauuuuaagaaucauacaucaccagauguugauuuaggugacaucucuggcauuaaugcuucaguuguaaacauucaaaaagaaauugaccgccucaaugagguugccaagaauuuaaaugaaucucucaucgaucuccaagaacuuggaaaguaugagcaguauauaaaauggccaugguacauuuggcuagguuuuauagcuggcuugauugccauaguaauggugacaauuaugcuuugcuguaugaccaguugcuguaguugucucaagggcuguuguucuuguggauccugcugcaaauuugaugaagacgacucugagccagugcucaaaggagucaaauuacauuacacauaa

SEQ ID NO: 11716 - RNA, 3822 nt, Artificial Sequence
  SARS-CoV-2/Iceland/280/2020__EPI_ISL_417608 spike protein CDS wt (1-1273)
auguuuguuuuucuuguuuuauugccacuagucucuagucaguguguuaaucuuacaaccagaacucaauuacccccugcauacacuaauucuuucacacgugguguuuauuacccugacaaaguuuucagauccucaguuuuacauucaacucaggacuuguucuuaccuuucuuuuccaauguuacuugguuccaugcuauacaugucucugggaccaaugguacuaagagguuugauaacccuguccuaccauuuaaugaugguguuuauuuugcuuccacugagaagucuaacauaauaagaggcuggauuuuugguacuacuuuagauucgaagacccagucccuacuuauuguuaauaacgcuacuaauguuguuauuaaagucugugaauuucaauuuuguaaugauccauuuuuggguguuuauuaccacaaaaacaacaaaaguuggauggaaagugaguucagaguuuauucuagugcgaauaauugcacuuuugaauaugucucucagccuuuucuuauggaccuugaaggaaaacaggguaauuucaaaaaucuuagggaauuuguguuuaagaauauugaugguuauuuuaaaauauauucuaagcacacgccuauuaauuuagugcgugaucucccucaggguuuuucggcuuuagaaccauugguagauuugccaauagguauuaacaucacuagguuucaaacuuuacuugcuuuacauagaaguuauuugacuccuggugauucuucuucagguuggacagcuggugcugcagcuuauuauguggguuaucuucaaccuaggacuuuucuauuaaaauauaaugaaaauggaaccauuacagaugcuguagacugugcacuugacccucucucagaaacaaaguguacguugaaauccuucacuguagaaaaaggaaucuaucaaacuucuaacuuuagaguccaaccaacagaaucuauuguuagauuuccuaauauuacaaacuugugcccuuuuggugaaguuuuuaacgccaccagauuugcaucuguuuaugcuuggaacaggaagagaaucagcaacuguguugcugauuauucuguccuauauaauuccgcaucauuuuccacuuuuaaguguuauggagugucuccuacuaaauuaaaugaucucugcuuuacuaaugucuaugcagauucauuuguaauuagaggugaugaagucagacaaaucgcuccagggcaaacuggaaagauugcugauuauaauuauaaauuaccagaugauuuuacaggcugcguuauagcuuggaauucuaacaaucuugauucuaagguuggugguaauuauaauuaccuguauagauuguuuaggaagucuaaucucaaaccuuuugagagagauauuucaacugaaaucuaucaggccgguagcacaccuuguaaugguguugaagguuuuaauuguuacuuuccuuuacaaucauaugguuuccaacccacuaaugguguugguuaccaaccauacagaguaguaguacuuucuuuugaacuucuacaugcaccagcaacuguuuguggaccuaaaaagucuacuaauuugguuaaaaacaaaugugucaauuucaacuucaaugguuuaacaggcacagguguucuuacugagucuaacaaaaaguuucugccuuuccaacaauuuggcagagacauugcugacacuacugaugcuguccgugauccacagacacuugagauucuugacauuacaccauguucuuuugguggugucaguguuauaacaccaggaacaaauacuucuaaccagguugcuguucuuuaucaggguguuaacugcacagaagucccuguugcuauucaugcagaucaacuuacuccuacuuggcguguuuauucuacagguucuaauguuuuucaaacacgugcaggcuguuuaauaggggcugaacaugucaacaacucauaugagugugacauacccauuggugcagguauaugcgcuaguuaucauacucagacuaauucuccucggcgggcacguaguguagcuagucaauccaucauugccuacacuaugucacuuggugcagaaaauucaguugcuuacucuaauaacucuauugccauacccacaaauuuuacuauuaguguuaccacagaaauucuaccagugucuaugaccaagacaucaguagauuguacaauguacauuuguggugauucaacugaaugcagcaaucuuuuguugcaauauggcaguuuuuguacacaauuaaaccgugcuuuaacuggaauagcuguugaacaagacaaaaacacccaagaaguuuuugcacaagucaaacaaauuuacaaaacaccaccaauuaaagauuuuggugguuuuaauuuuucacaaauauuaccagauccaucaaaaccaagcaagaggucauuuauugaagaucuacuuuucaacaaagugacacuugcagaugcuggcuucaucaaacaauauggugauugccuuggugauauugcugcuagagaccucauuugugcacaaaaguuuaacggccuuacuguuuugccaccuuugcucacagaugaaaugauugcucaauacacuucugcacuguuagcggguacaaucacuucugguuggaccuuuggugcaggugcugcauuacaaauaccauuugcuaugcaaauggcuuauagguuuaaugguauuggaguuacacagaauguucucuaugagaaccaaaaauugauugccaaccaauuuaauagugcuauuggcaaaauucaagacucacuuucuuccacagcaagugcacuuggaaaacuucaagauguggucaaccaaaaugcacaagcuuuaaacacgcuuguuaaacaacuuagcuccaauuuuggugcaauuucaaguguuuuaaaugauauccuuucacgucuugacaaaguugaggcugaagugcaaauugauagguugaucacaggcagacuucaaaguuugcagacauaugugacucaacaauuaauuagagcugcagaaaucagagcuucugcuaaucuugcugcuacuaaaaugucagaguguguacuuggacaaucaaaaagaguugauuuuuguggaaagggcuaucaucuuauguccuucccucagucagcaccucaugguguagucuucuugcaugugacuuaugucccugcacaagaaaagaacuucacaacugcuccugccauuugucaugauggaaaagcacacuuuccucgugaaggugucuuuguuucaaauggcacacacugguuuguaacacaaaggaauuuuuaugaaccacaaaucauuacuacagacaacacauuugugucugguaacugugauguuguaauaggaauugucaacaacacaguuuaugauccuuugcaaccugaauuagacucauucaaggaggaguuagauaaauauuuuaagaaucauacaucaccagauguugauuuaggugacaucucuggcauuaaugcuucaguuguaaacauucaaaaagaaauugaccgccucaaugagguugccaagaauuuaaaugaaucucucaucgaucuccaagaacuuggaaaguaugagcaguauauaaaauggccaugguacauuuggcuagguuuuauagcuggcuugauugccauaguaauggugacaauuaugcuuugcuguaugaccaguugcuguaguugucucaagggcuguuguucuuguggauccugcugcaaauuugaugaagacgacucugagccagugcucaaaggagucaaauuacauuacacauaa

SEQ ID NO: 11717 - RNA, 3822 nt, Artificial Sequence
  SARS-CoV-2/Iceland/247/2020__EPI_ISL_417575 spike protein CDS wt (1-1273)
auguuuguuuuucuuguuuuauugccacuagucucuagucaguguguuaaucuuacaaccagaacucaauuacccccugcauacacuaauucuuucacacgugguguuuauuacccugacaaaguuuucagauccucaguuuuacauucaacucaggacuuguucuuaccuuucuuuuccaauguuacuugguuccaugcuauacaugucucugggaccaaugguacuaagagguuugauaacccuguccuaccauuuaaugaugguguuuauuuugcuuccacugagaagucuaacauaauaagaggcuggauuuuugguacuacuuuagauucgaagacccagucccuacuuauuguuaauaacgcuacuaauguuguuauuaaagucugugaauuucaauuuuguaaugauccauuuuuggguguuuauuaccacaaaaacaacaaaaguuggauggaaagugaguucagaguuuauucuagugcgaauaauugcacuuuugaauaugucucucagccuuuucuuauggaccuugaaggaaaacaggguaauuucaaaaaucuuagggaauuuguguuuaagaauauugaugguuauuuuaaaauauauucuaagcacacgccuauuaauuuagugcgugaucucccucaggguuuuucggcuuuagaaccauugguagauuugccaauagguauuaacaucacuagguuucaaacuuuacuugcuuuacauagaaguuauuugacuccuggugauucuucuucagguuggacagcuggugcugcagcuuauuauguggguuaucuucaaccuaggacuuuucuauuaaaauauaaugaaaauggaaccauuacagaugcuguagacugugcacuugacccucucucagaaacaaaguguacguugaaauccuucacuguagaaaaaggaaucuaucaaacuucuaacuuuagaguccaaccaacagaaucuauuguuagauuuccuaauauuacaaacuugugcccuuuuggugaaguuuuuaacgccaccagauuugcaucuguuuaugcuuggaacaggaagagaaucagcaacuguguugcugauuauucuguccuauauaauuccgcaucauuuuccacuuuuaaguguuauggagugucuccuacuaaauuaaaugaucucugcuuuacuaaugucuaugcagauucauuuguaauuagaggugaugaagucagacaaaucgcuccagggcaaacuggaaagauugcugauuauaauuauaaauuaccagaugauuuuacaggcugcguuauagcuuggaauucuaacaaucuugauucuaagguuggugguaauuauaauuaccuguauagauuguuuaggaagucuaaucucaaaccuuuugagagagauauuucaacugaaaucuaucaggccgguagcacaccuuguaaugguguugaagguuuuaauuguuacuuuccuuuacaaucauaugguuuccaacccacuaaugguguugguuaccaaccauacagaguaguaguacuuucuuuugaacuucuacaugcaccagcaacuguuuguggaccuaaaaagucuacuaauuugguuaaaaacaaaugugucaauuucaacuucaaugguuuaacaggcacagguguucuuacugagucuaacaaaaaguuucugccuuuccaacaauuuggcagagacauugcugacacuacugaugcuguccgugauccacagacacuugagauucuugacauuacaccauguucuuuugguggugucaguguuauaacaccaggaacaaauacuucuaaccagguugcuguucuuuaucaggguguuaacugcacagaagucccuguugcuauucaugcagaucaacuuacuccuacuuggcguguuuauucuacagguucuaauguuuuucaaacacgugcaggcuguuuaauaggggcugaacaugucaacaacucauaugagugugacauacccauuggugcagguauaugcgcuaguuaucagacucagacuaauucuccucggcgggcacguaguguagcuagucaauccaucauugccuacacuaugucacuuggugcagaaaauucaguugcuuacucuaauaacucuauugccauacccacaaauuuuacuauuaguguuaccacagaaauucuaccagugucuaugaccaagacaucaguagauuguacaauguacauuuguggugauucaacugaaugcagcaaucuuuuguugcaauauggcaguuuuuguacacaauuaaaccgugcuuuaacuggaauagcuguugaacaagacaaaaacacccaagaaguuuuugcacaagucaaacaaauuuacaaaacaccaccaauuaaagauuuuggugguuuuaauuuuucacaaauauuaccagauccaucaaaaccaagcaagaggucauuuauugaagaucuacuuuucaacaaagugacacuugcagaugcuggcuucaucaaacaauauggugauugccuuggugauauugcugcuagagaccucauuugugcacaaaaguuuaacggccuuacuguuuugccaccuuugcucacagaugaaaugauugcucaauacacuucugcacuguuagcggguacaaucacuucugguuggaccuuuggugcaggugcugcauuacaaauaccauuugcuaugcaaauggcuuauagguuuaaugguauuggaguuacacagaauguucucuaugagaaccaaaaauugauugccaaccaauuuaauagugcuauuggcaaaauucaagacucacuuucuuccacagcaagugcacuuggaaaacuucaagauguggucaaccaaaaugcacaagcuuuaaacacgcuuguuaaacaacuuagcuccaauuuuggugcaauuucaaguguuuuaaaugauauccuuucacgucuugacaaaguugaggcugaagugcaaauugauagguugaucacaggcagacuucaaaguuugcagacauaugugacucaacaauuaauuagagcugcagaaaucagagcuucugcuaaucuugcugcuacuaaaaugucagaguguguacuuggacaaucaaaaagaguugauuuuuguggaaagggcuaucaucuuauguccuucccucagucagcaccucaugguguagucuucuugcaugugacuuaugucccugcacaagaaaagaacuucacaacugcuccugccauuugucaugauggaaaagcacacuuuccucgugaaggugucuuuguuucaaauggcacacacugguuuguaacacaaaggaauuuuuaugaaccacaaaucauuacuacagacaacacauuugugucugguaacugugauguuguaauaggaauugucaacaacacaguuuaugauccuuugcaaccugaauuagacucauucaaggaggaguuagauaaauauuuuaagaaucauacaucaccagauguugauuuaggugacaucucuggcauuaaugcuucaguuguaaacauucaaaaagaaauugaccgccucaaugagguugccaagaauuuaaaugaaucucucaucgaucuccaagaacuuggaaaguaugagcaguauauaaaauggccaugguacauuuggcuagguuuuauagcuggcuugauugccauaguaauugugacaauuaugcuuugcuguaugaccaguugcuguaguugucucaagggcuguuguucuuguggauccugcugcaaauuugaugaagacgacucugagccagugcucaaaggagucaaauuacauuacacauaa

SEQ ID NO: 11718 - RNA, 3822 nt, Artificial Sequence
  SARS-CoV-2/Iceland/238/2020__EPI_ISL_417566 spike protein CDS wt (1-1273)
auguuuguuuuucuuguuuuauugccacuagucucuagucaguguguuaaucuuacaaccagaacucaauuacccccugcauacacuaauucuuucacacgugguguuuauuacccugacaaaguuuucagauccucaguuuuacauucaacucaggacuuguucuuaccuuucuuuuccaauguuacuugguuccaugcuauacaugucucugggaccaaugguacuaagagguuugauaacccuguccuaccauuuaaugaugguguuuauuuugcuuccacugagaagucuaacauaauaagaggcuggauuuuugguacuacuuuagauucgaagacccagucccuacuuauuguuaauaacgcuacuaauguuguuauuaaagucugugaauuucaauuuuguaaugauccauuuuuggguguuuauuaccacaaaaacaacaaaaguuggauggaaagugaguucagaguuuauucuagugcgaauaauugcacuuuugaauaugucucucagccuuuucuuauggaccuugaaggaaaacaggguaauuucaaaaaucuuagggaauuuguguuuaagaauauugaugguuauuuuaaaauauauucuaagcacacgccuauuaauuuagugcgugaucucccucaggguuuuucggcuuuagaaccauugguagauuugccaauagguauuaacaucacuagguuucaaacuuuacuugcuuuacauagaaguuauuugacuccuggugauucuucuucagguuggacagcuggugcugcagcuuauuauguggguuaucuucaaccuaggacuuuucuauuaaaauauaaugaaaauggaaccauuacagaugcuguagacugugcacuugacccucucucagaaacaaaguguacguugaaauccuucacuguagaaaaaggaaucuaucaaacuucuaacuuuagaguccaaccaacagaaucuauuguuagauuuccuaauauuacaaacuugugcccuuuuggugaaguuuuuaacgccaccagauuugcaucuguuuaugcuuggaacaggaagagaaucagcaacuguguugcugauuauucuguccuauauaauuccgcaucauuuuccacuuuuaaguguuauggagugucuccuacuaaauuaaaugaucucugcuuuacuaaugucuaugcagauucauuuguaauuagaggugaugaagucagacaaaucgcuccagggcaaacuggaaagauugcugauuauaauuauaaauuaccagaugauuuuacaggcugcguuauagcuuggaauucuaacaaucuugauucuaagguuggugguaauuauaauuaccuguauagauuguuuaggaagucuaaucucaaaccuuuugagagagauauuucaacugaaaucuaucaggccgguagcacaccuuguaaugguguugaagguuuuaauuguuacuuuccuuuacaaucauaugguuuccaacccacuaaugguguugguuaccaaccauacagaguaguaguacuuucuuuugaacuucuacaugcaccagcaacuguuuguggaccuaaaaagucuacuaauuugguuaaaaacaaaugugucaauuucaacuucaaugguuuaacaggcacagguguucuuacugagucuaacaaaaaguuucugccuuuccaacaauuuggcagagacauugcugacacuacugaugcuguccgugauccacagacacuugagauucuugacauuacaccauguucuuuugguggugucaguguuauaacaccaggaacaaauacuucuaaccagguugcuguucuuuaucaggguguuaacugcacagaagucccuguugcuauucaugcagaucaacuuacuccuacuuggcguguuuauucuacagguucuaauguuuuucaaacacgugcaggcuguuuaauaggggcugaacaugucaacaacucauaugagugugacauacccauuggugcagguauaugcgcuaguuaucagacucagacuaauucuccucggcgggcacguaguguagcuagucaauccaucauugccuacacuaugucacuuggugcagaaaauucaguugcuuacucuaauaacucuauugccauacccacaaauuuuacuauuaguguuaccacagaaauucuaccagugucuaugaccaagacaucaguagauuguacaauguacauuuguggugauucaacugaaugcagcaaucuuuuguugcaauauggcaguuuuuguacacaauuaaaccgugcuuuaacuggaauagcuguugaacaagacaaaaacacccaagaaguuuuugcacaagucaaacaaauuuacaaaacaccaccaauuaaagauuuuggugguuuuaauuuuucacaaauauuaccagauccaucaaaaccaagcaagaggucauuuauugaagaucuacuuuucaacaaagugacacuugcagauguuggcuucaucaaacaauauggugauugccuuggugauauugcugcuagagaccucauuugugcacaaaaguuuaacggccuuacuguuuugccaccuuugcucacagaugaaaugauugcucaauacacuucugcacuguuagcggguacaaucacuucugguuggaccuuuggugcaggugcugcauuacaaauaccauuugcuaugcaaauggcuuauagguuuaaugguauuggaguuacacagaauguucucuaugagaaccaaaaauugauugccaaccaauuuaauagugcuauuggcaaaauucaagacucacuuucuuccacagcaagugcacuuggaaaacuucaagauguggucaaccaaaaugcacaagcuuuaaacacgcuuguuaaacaacuuagcuccaauuuuggugcaauuucaaguguuuuaaaugauauccuuucacgucuugacaaaguugaggcugaagugcaaauugauagguugaucacaggcagacuucaaaguuugcagacauaugugacucaacaauuaauuagagcugcagaaaucagagcuucugcuaaucuugcugcuacuaaaaugucagaguguguacuuggacaaucaaaaagaguugauuuuuguggaaagggcuaucaucuuauguccuucccucagucagcaccucaugguguagucuucuugcaugugacuuaugucccugcacaagaaaagaacuucacaacugcuccugccauuugucaugauggaaaagcacacuuuccucgugaaggugucuuuguuucaaauggcacacacugguuuguaacacaaaggaauuuuuaugaaccacaaaucauuacuacagacaacacauuugugucugguaacugugauguuguaauaggaauugucaacaacacaguuuaugauccuuugcaaccugaauuagacucauucaaggaggaguuagauaaauauuuuaagaaucauacaucaccagauguugauuuaggugacaucucuggcauuaaugcuucaguuguaaacauucaaaaagaaauugaccgccucaaugagguugccaagaauuuaaaugaaucucucaucgaucuccaagaacuuggaaaguaugagcaguauauaaaauggccaugguacauuuggcuagguuuuauagcuggcuugauugccauaguaauggugacaauuaugcuuugcuguaugaccaguugcuguaguugucucaagggcuguuguucuuguggauccugcugcaaauuugaugaagacgacucugagccagugcucaaaggagucaaauuacauuacacauaa

SEQ ID NO: 11719 - RNA, 3822 nt, Artificial Sequence
  SARS-CoV-2/Greece/16/2020__EPI_ISL_418265 spike protein CDS wt (1-1273)
auguuuguuuuucuuguuuuauugccacuagucucuagucaguguguuaaucuuacaaccagaacucaauuacccccugcauacacuaauucuuucacacgugguguuuauuacccugacaaaguuuucagauccucaguuuuacauucaacucaggacuuguucuuaccuuucuuuuccaauguuacuugguuccaugcuauacaugucucugggaccaaugguacuaagagguuugauaacccuguccuaccauuuaaugaugguguuuauuuugcuuccacugagaagucuaacauaauaagaggcuggauuuuugguacuacuuuagauucgaagacccagucccuacuuauuguuaauaacgcuacuaauguuguuauuaaagucugugaauuucaauuuuguaaugauccauuuuuggguguuuauuaccacaaaaacaacaaaaguuggauggaaagugaguucagaguuuauucuagugcgaauaauugcacuuuugaauaugucucucagccuuuucuuauggaccuugaaggaaaacaggguaauuucaaaaaucuuagggaauuuguguuuaagaauguugaugguuauuuuaaaauauauucuaagcacacgccuauuaauuuagugcgugaucucccucaggguuuuucggcuuuagaaccauugguagauuugccaauagguauuaacaucacuagguuucaaacuuuacuugcuuuacauagaaguuauuugacuccuggugauucuucuucagguuggacagcuggugcugcagcuuauuauguggguuaucuucaaccuaggacuuuucuauuaaaauauaaugaaaauggaaccauuacagaugcuguagacugugcacuugacccucucucagaaacaaaguguacguugaaauccuucacuguagaaaaaggaaucuaucaaacuucuaacuuuagaguccaaccaacagaaucuauuguuagauuuccuaauauuacaaacuugugcccuuuuggugaaguuuuuaacgccaccagauuugcaucuguuuaugcuuggaacaggaagagaaucagcaacuguguugcugauuauucuguccuauauaauuccgcaucauuuuccacuuuuaaguguuauggagugucuccuacuaaauuaaaugaucucugcuuuacuaaugucuaugcagauucauuuguaauuagaggugaugaagucagacaaaucgcuccagggcaaacuggaaagauugcugauuauaauuauaaauuaccagaugauuuuacaggcugcguuauagcuuggaauucuaacaaucuugauucuaagguuggugguaauuauaauuaccuguauagauuguuuaggaagucuaaucucaaaccuuuugagagagauauuucaacugaaaucuaucaggccgguagcacaccuuguaaugguguugaagguuuuaauuguuacuuuccuuuacaaucauaugguuuccaacccacuaaugguguugguuaccaaccauacagaguaguaguacuuucuuuugaacuucuacaugcaccagcaacuguuuguggaccuaaaaagucuacuaauuugguuaaaaacaaaugugucaauuucaacuucaaugguuuaacaggcacagguguucuuacugagucuaacaaaaaguuucugccuuuccaacaauuuggcagagacauugcugacacuacugaugcuguccgugauccacagacacuugagauucuugacauuacaccauguucuuuugguggugucaguguuauaacaccaggaacaaauacuucuaaccagguugcuguucuuuaucaggauguuaacugcacagaagucccuguugcuauucaugcagaucaacuuacuccuacuuggcguguuuauucuacagguucuaauguuuuucaaacacgugcaggcuguuuaauaggggcugaacaugucaacaacucauaugagugugacauacccauuggugcagguauaugcgcuaguuaucagacucagacuaauucuccucggcgggcacguaguguagcuagucaauccaucauugccuacacuaugucacuuggugcagaaaauucaguugcuuacucuaauaacucuauugccauacccacaaauuuuacuauuaguguuaccacagaaauucuaccagugucuaugaccaagacaucaguagauuguacaauguacauuuguggugauucaacugaaugcagcaaucuuuuguugcaauauggcaguuuuuguacacaauuaaaccgugcuuuaacuggaauagcuguugaacaagacaaaaacacccaagaaguuuuugcacaagucaaacaaauuuacaaaacaccaccaauuaaagauuuuggugguuuuaauuuuucacaaauauuaccagauccaucaaaaccaagcaagaggucauuuauugaagaucuacuuuucaacaaagugacacuugcagaugcuggcuucaucaaacaauauggugauugccuuggugauauugcugcuagagaccucauuugugcacaaaaguuuaacggccuuacuguuuugccaccuuugcucacagaugaaaugauugcucaauacacuucugcacuguuagcggguacaaucacuucugguuggaccuuuggugcaggugcugcauuacaaauaccauuugcuaugcaaauggcuuauagguuuaaugguauuggaguuacacagaauguucucuaugagaaccaaaaauugauugccaaccaauuuaauagugcuauuggcaaaauucaagacucacuuucuuccacagcaagugcacuuggaaaacuucaagauguggucaaccaaaaugcacaagcuuuaaacacgcuuguuaaacaacuuagcuccaauuuuggugcaauuucaaguguuuuaaaugauauccuuucacgucuugacaaaguugaggcugaagugcaaauugauagguugaucacaggcagacuucaaaguuugcagacauaugugacucaacaauuaauuagagcugcagaaaucagagcuucugcuaaucuugcugcuacuaaaaugucagaguguguacuuggacaaucaaaaagaguugauuuuuguggaaagggcuaucaucuuauguccuucccucagucagcaccucaugguguagucuucuugcaugugacuuaugucccugcacaagaaaagaacuucacaacugcuccugccauuugucaugauggaaaagcacacuuuccucgugaaggugucuuuguuucaaauggcacacacugguuuguaacacaaaggaauuuuuaugaaccacaaaucauuacuacagacaacacauuugugucugguaacugugauguuguaauaggaauugucaacaacacaguuuaugauccuuugcaaccugaauuagacucauucaaggaggaguuagauaaauauuuuaagaaucauacaucaccagauguugauuuaggugacaucucuggcauuaaugcuucaguuguaaacauucaaaaagaaauugaccgccucaaugagguugccaagaauuuaaaugaaucucucaucgaucuccaagaacuuggaaaguaugagcaguauauaaaauggccaugguacauuuggcuagguuuuauagcuggcuugauugccauaguaauggugacaauuaugcuuugcuguaugaccaguugcuguaguugucucaagggcuguuguucuuguggauccugcugcaaauuugaugaagacgacucugagccagugcucaaaggagucaaauuacauuacacauaa

SEQ ID NO: 11720 - RNA, 3822 nt, Artificial Sequence
  SARS-CoV-2/Iceland/319/2020__EPI_ISL_417648 spike protein CDS wt (1-1273)
auguuuguuuuucuuguuuuauugccacuagucucuagucaguguguuaaucuuacaaccagaacucaauuacccccugcauacacuaauucuuucacacgugguguuuauuacccugacaaaguuuucagauccucaguuuuacauucaacucaggacuuguucuuaccuuucuuuuccaauguuacuugguuccaugcuauacaugucucugggaccaaugguacuaagagguuugauaacccuguccuaccauuuaaugaugguguuuauuuugcuuccacugagaagucuaacauaauaagaggcuggauuuuugguacuacuuuagauucgaagacccagucccuacuuauuguuaauaacgcuacuaauguuguuauuaaagucugugaauuucaauuuuguaaugauccauuuuuggguguuuauuaccacaaaaacaacaaaaguuggauggaaagugaguucagaguuuauucuagugcgaauaauugcacuuuugaauaugucucucagccuuuucuuauagaccuugaaggaaaacaggguaauuucaaaaaucuuagggaauuuguguuuaagaauauugaugguuauuuuaaaauauauucuaagcacacgccuauuaauuuagugcgugaucucccucaggguuuuucggcuuuagaaccauugguagauuugccaauagguauuaacaucacuagguuucaaacuuuacuugcuuuacauagaaguuauuugacuccuggugauucuucuucagguuggacagcuggugcugcagcuuauuauguggguuaucuucaaccuaggacuuuucuauuaaaauauaaugaaaauggaaccauuacagaugcuguagacugugcacuugacccucucucagaaacaaaguguacguugaaauccuucacuguagaaaaaggaaucuaucaaacuucuaacuuuagaguccaaccaacagaaucuauuguuagauuuccuaauauuacaaacuugugcccuuuuggugaaguuuuuaacgccaccagauuugcaucuguuuaugcuuggaacaggaagagaaucagcaacuguguugcugauuauucuguccuauauaauuccgcaucauuuuccacuuuuaaguguuauggagugucuccuacuaaauuaaaugaucucugcuuuacuaaugucuaugcagauucauuuguaauuagaggugaugaagucagacaaaucgcuccagggcaaacuggaaagauugcugauuauaauuauaaauuaccagaugauuuuacaggcugcguuauagcuuggaauucuaacaaucuugauucuaagguuggugguaauuauaauuaccuguauagauuguuuaggaagucuaaucucaaaccuuuugagagagauauuucaacugaaaucuaucaggccgguagcacaccuuguaaugguguugaagguuuuaauuguuacuuuccuuuacaaucauaugguuuccaacccacuaaugguguugguuaccaaccauacagaguaguaguacuuucuuuugaacuucuacaugcaccagcaacuguuuguggaccuaaaaagucuacuaauuugguuaaaaacaaaugugucaauuucaacuucaaugguuuaacaggcacagguguucuuacugagucuaacaaaaaguuucugccuuuccaacaauuuggcagagacauugcugacacuacugaugcuguccgugauccacagacacuugagauucuugacauuacaccauguucuuuugguggugucaguguuauaacaccaggaacaaauacuucuaaccagguugcuguucuuuaucaggguguuaacugcacagaagucccuguugcuauucaugcagaucaacuuacuccuacuuggcguguuuauucuacagguucuaauguuuuucaaacacgugcaggcuguuuaauaggggcugaacaugucaacaacucauaugagugugacauacccauuggugcagguauaugcgcuaguuaucagacucagacuaauucuccucggcgggcacguaguguagcuagucaauccaucauugccuacacuaugucacuuggugcagaaaauucaguugcuuacucuaauaacucuauugccauacccacaaauuuuacuauuaguguuaccacagaaauucuaccagugucuaugaccaagacaucaguagauuguacaauguacauuuguggugauucaacugaaugcagcaaucuuuuguugcaauauggcaguuuuuguacacaauuaaaccgugcuuuaacuggaauagcuguugaacaagacaaaaacacccaagaaguuuuugcacaagucaaacaaauuuacaaaacaccaccaauuaaagauuuuggugguuuuaauuuuucacaaauauuaccagauccaucaaaaccaagcaagaggucauuuauugaagaucuacuuuucaacaaagugacacuugcagaugcuggcuucaucaaacaauauggugauugccuuggugauauugcugcuagagaccucauuugugcacaaaaguuuaacggccuuacuguuuugccaccuuugcucacagaugaaaugauugcucaauacacuucugcacuguuagcggguacaaucacuucugguuggaccuuuggugcaggugcugcauuacaaauaccauuugcuaugcaaauggcuuauagguuuaaugguauuggaguuacacagaauguucucuaugagaaccaaaaauugauugccaaccaauuuaauagugcuauuggcaaaauucaagacucacuuucuuccacagcaagugcacuuggaaaacuucaagauguggucaaccaaaaugcacaagcuuuaaacacgcuuguuaaacaacuuagcuccaauuuuggugcaauuucaaguguuuuaaaugauauccuuucacgucuugacaaaguugaggcugaagugcaaauugauagguugaucacaggcagacuucaaaguuugcagacauaugugacucaacaauuaauuagagcugcagaaaucagagcuucugcuaaucuugcugcuacuaaaaugucagaguguguacuuggacaaucaaaaagaguugauuuuuguggaaagggcuaucaucuuauguccuucccucagucagcaccucaugguguagucuucuugcaugugacuuaugucccugcacaagaaaagaacuucacaacugcuccugccauuugucaugauggaaaagcacacuuuccucgugaaggugucuuuguuucaaauggcacacacugguuuguaacacaaaggaauuuuuaugaaccacaaaucauuacuacagacaacacauuugugucugguaacugugauguuguaauaggaauugucaacaacacaguuuaugauccuuugcaaccugaauuagacucauucaaggaggaguuagauaaauauuuuaagaaucauacaucaccagauguugauuuaggugacaucucuggcauuaaugcuucaguuguaaacauucaaaaagaaauugaccgccucaaugagguugccaagaauuuaaaugaaucucucaucgaucuccaagaacuuggaaaguaugagcaguauauaaaauggccaugguacauuuggcuagguuuuauagcuggcuugauugccauaguaauggugacaauuaugcuuugcuguaugaccaguugcuguaguugucucaagggcuguuguucuuguggauccugcugcaaauuugaugaagacgacucugagccagugcucaaaggagucaaauuacauuacacauaa

SEQ ID NO: 11721 - RNA, 3822 nt, Artificial Sequence
  SARS-CoV-2/Congo/94/2020__EPI_ISL_417947 spike protein CDS wt (1-1273)
auguuuguuuuucuuguuuuauugccacuagucucuagucaguguguuaaucuuacaaccagaacucaauuacccccugcauacacuaauucuuucacacgugguguuuauuacccugacaaaguuuucagauccucaguuuuacauucaacucaggacuuguucuuaccuuucuuuuccaauguuacuugguuccaugcuauacaugucucugggaccaaugguacuaagagguuugauaacccuguccuaccauuuaaugaugguguuuauuuugcuuccacugagaagucuaacauaauaagaggcuggauuuuugguacuacuuuagauucgaagacccagucccuacuuauuguuaauaacgcuacuaauguuguuauuaaagucugugaauuucaauuuuguaaugauccauuuuuggguguuuauuaccacaaaaacaacaaaaguuggauggaaagugaguucagaguuuauucuagugcgaauaauugcacuuuugaauaugucucucagccuuuucuuauggaccuugaaggaaaacaggguaauuucaaaaaucuuagggaauuuguguuuaagaauauugaugguuauuuuaaaauauauucuaagcacacgccuauuaauuuagugcgugaucucccucaggguuuuucggcuuuagaaccauugguagauuugccaauagguauuaacaucacuagguuucaaacuuuacuugcuuuacauagaaguuauuugacuccuggugauucuucuucagguuggacagcuggugcugcagcuuauuauguggguuaucuucaaccuaggacuuuucuauuaaaauauaaugaaaauggaaccauuacagaugcuguagacugugcacuugacccucucucagaaacaaaguguacguugaaauccuucacuguagaaaaaggaaucuaucaaacuucuaacuuuagaguccaaccaacagaaucuauuguuagauuuccuaauauuacaaacuugugcccuuuuggugaaguuuuuaacgccaccagauuugcaucuguuuaugcuuggaacaggaagagaaucagcaacuguguugcugauuauucuguccuauauaauuccgcaucauuuuccacuuuuaaguguuauggagugucuccuacuaaauuaaaugaucucugcuuuacuaaugucuaugcagauucauuuguaauuagaggugaugaagucagacaaaucgcuccagggcaaacuggaaagauugcugauuauaauuauaaauuaccagaugauuuuacaggcugcguuauagcuuggaauucuaacaaucuugauucuaagguuggugguaauuauaauuaccuguauagauuguuuaggaagucuaaucucaaaccuuuugagagagauauuucaacugaaaucuaucaggccgguagcacaccuuguaaugguguugaagguuuuaauuguuacuuuccuuuacaaucauaugguuuccaacccacuaaugguguugguuaccaaccauacagaguaguaguacuuucuuuugaacuucuacaugcaccagcaacuguuuguggaccuaaaaagucuacuaauuugguuaaaaacaaaugugucaauuucaacuucaaugguuuaacaggcacagguguucuuacugagucuaacaaaaaguuucugccuuuccaacaauuuggcagagacauugcugacacuacugaugcuguccgugauccacagacacuugagauucuugacauuacaccauguucuuuugguggugucaguguuauaacaccaggaacaaauacuucuaaccagguugcuguucuuuaucaggguguuaacugcacagaagucccuguugcuauucaugcagaucaacuuacuccuacuuggcguguuuauucuacagguucuaauguuuuucaaacacgugcaggcuguuuaauaggggcugaacaugucaacaacucauaugagugugacauacccauuggugcagguauaugcgcuaguuaucagacucagacuaauucuccucggcgggcacguaguguagcuagucaauccaucauugccuacacuaugucacuuggugcagaaaauucaguugcuuacucuaauaacucuauugccauacccacaaauuuuacuauuaguguuaccacagaaauucuaccagugucuaugaccaagacaucaguagauuguacaauguacauuuguggugauucaacugaaugcagcaaucuuuuguugcaauauggcaguuuuuguacacaauuaaaccgugcuuuaacuggaauagcuguugaacaagacaaaaacacccaagaaguuuuugcacaagucaaacaaauuuacaaaacaccaccaauuaaagauuuuggugguuuuaauuuuucacaaauauuaccagauccaucaaaaccaagcaagaggucauuuauugaagauauacuuuucaacaaagugacacuugcagaugcuggcuucaucaaacaauauggugauugccuuggugauauugcugcuagagaccucauuugugcacaaaaguuuaacggccuuacuguuuugccaccuuugcucacagaugaaaugauugcucaauacacuucugcacuguuagcggguacaaucacuucugguuggaccuuuggugcaggugcugcauuacaaauaccauuugcuaugcaaauggcuuauagguuuaaugguauuggaguuacacagaauguucucuaugagaaccaaaaauugauugccaaccaauuuaauagugcuauuggcaaaauucaagacucacuuucuuccacagcaagugcacuuggaaaacuucaagauguggucaaccaaaaugcacaagcuuuaaacacgcuuguuaaacaacuuagcuccaauuuuggugcaauuucaaguguuuuaaaugauauccuuucacgucuugacaaaguugaggcugaagugcaaauugauagguugaucacaggcagacuucaaaguuugcagacauaugugacucaacaauuaauuagagcugcagaaaucagagcuucugcuaaucuugcugcuacuaaaaugucagaguguguacuuggacaaucaaaaagaguugauuuuuguggaaagggcuaucaucuuauguccuucccucagucagcaccucaugguguagucuucuugcaugugacuuaugucccugcacaagaaaagaacuucacaacugcuccugccauuugucaugauggaaaagcacacuuuccucgugaaggugucuuuguuucaaauggcacacacugguuuguaacacaaaggaauuuuuaugaaccacaaaucauuacuacagacaacacauuugugucugguaacugugauguuguaauaggaauugucaacaacacaguuuaugauccuuugcaaccugaauuagacucauucaaggaggaguuagauaaauauuuuaagaaucauacaucaccagauguugauuuaggugacaucucuggcauuaaugcuucaguuguaaacauucaaaaagaaauugaccgccucaaugagguugccaagaauuuaaaugaaucucucaucgaucuccaagaacuuggaaaguaugagcaguauauaaaauggccaugguacauuuggcuagguuuuauagcuggcuugauugccauaguaauggugacaauuaugcuuugcuguaugaccaguugcuguaguugucucaagggcuguuguucuuguggauccugcugcaaauuugaugaagacgacucugagccagugcucaaaggagucaaauuacauuacacauaa

SEQ ID NO: 11722 - RNA, 3822 nt, Artificial Sequence
  SARS-CoV-2/Congo/158/2020__EPI_ISL_417950 spike protein CDS wt (1-1273)
auguuuguuuuucuuguuuuauugccacuagucucuagucaguguguuaaucuuacaaccagaacucaauuacccccugcauacacuaauucuuucacacgugguguuuauuacccugacaaaguuuucagauccucaguuuuacauucaacucaggacuuguucuuaccuuucuuuuccaauguuacuugguuccaugcuauacaugucucugggaccaaugguacuaagagguuugauaacccuguccuaccauuuaaugaugguguuuauuuugcuuccacugagaagucuaacauaauaagaggcuggauuuuugguacuacuuuagauucgaagacccagucccuacuuauuguuaauaacgcuacuaauguuguuauuaaagucugugaauuucaauuuuguaaugauccauuuuuggguguuuauuaccacaaaaacaacaaaaguuggauggaaagugaguucagaguuuauucuagugcgaauaauugcacuuuugaauaugucucucagccuuuucuuauggaccuugaaggaaaacaggguaauuucaaaaaucuuagggaauuuguguuuaagaauauugaugguuauuuuaaaauauauucuaagcacacgccuauuaauuuagugcgugaucucccucaggguuuuucggcuuuagaaccauugguagauuugccaauagguauuaacaucacuagguuucaaacuuuacuugcuuuacauagaaguuauuugacuccuggugauucuucuucagguuggacagcuggugcugcagcuuauuauguggguuaucuucaaccuaggacuuuucuauuaaaauauaaugaaaauggaaccauuacagaugcuguagacugugcacuugacccucucucagaaacaaaguguacguugaaauccuucacuguagaaaaaggaaucuaucaaacuucuaacuuuagaguccaaccaacagaaucuauuguuagauuuccuaauauuacaaacuugugcccuuuuggugaaguuuuuaacgccaccagauuugcaucuguuuaugcuuggaacaggaagagaaucagcaacuguguugcugauuauucuguccuauauaauuccgcaucauuuuccacuuuuaaguguuauggagugucuccuacuaaauuaaaugaucucugcuuuacuaaugucuaugcagauucauuuguaauuagaggugaugaagucagacaaaucgcuccagggcaaacuggaaagauugcugauuauaauuauaaauuaccagaugauuuuacaggcugcguuauagcuuggaauucuaacaaucuugauucuaagguuggugguaauuauaauuaccuguauagauuguuuaggaagucuaaucucaaaccuuuugagagagauauuucaacugaaaucuaucaggccgguagcacaccuuguaaugguguugaagguuuuaauuguuacuuuccuuuacaaucauaugguuuccaacccacuaaugguguugguuaccaaccauacagaguaguaguacuuucuuuugaacuucuacaugcaccagcaacuguuuguggaccuaaaaagucuacuaauuugguuaaaaacaaaugugucaauuucaacuucaaugguuuaacaggcacagguguucuuacugagucuaacaaaaaguuucugccuuuccaacaauuuggcagagacauugcugacacuacugaugcuguccgugauccacagacacuugagauucuugacauuacaccauguucuuuugguggugucaguguuauaacaccaggaacaaauacuucuaaccagguugcuguucuuuaucaggauguuaacugcacagaagucccuguugcuauucaugcagaucaacuuacuccuacuuggcguguuuauucuacagguucuaauguuuuucaaacacgugcaggcuguuuaauaggggcugaacaugucaacaacucauaugagugugacauacccauuggugcagguauaugcgcuaguuaucagacucagacuaauucuccucggcgggcacguaguguagcuagucaauccaucauugccuacacuaugucacuuggugcagaaaauucaguugcuuacucuaauaacucuauugccauacccacaaauuuuacuauuaguguuaccacagaaauucuaccagugucuaugaccaagacaucaguagauuguacaauguacauuuguggugauucaacugaaugcagcaaucuuuuguugcaauauggcaguuuuuguacacaauuaaaccgugcuuuaacuggaauagcuguugaacaagacaaaaacacccaagaaguuuuugcacaagucaaacaaauuuacaaaacaccaccaauuaaagauuuuggugguuuuaauuuuucacaaauauuaccagauccaucaaaaccaagcaagaggucauuuauugaagaucuacuuuucaacaaagugacacuugcagaugcuggcuucaucaaacaauauggugauugccuuggugauauugcugcuagagaccucauuugugcacaaaaguuuaacggccuuacuguuuugccaccuuugcucacagaugaaaugauugcucaauacacuucugcacuguuagcggguacaaucacuucugguuggaccuuuggugcaggugcugcauuacaaauaccauuugcuaugcaaauggcuuauagguuuaaugguauuggaguuacacagaauguucucuaugagaaccaaaaauugauugccaaccaauuuaauagugcuauuggcaaaauucaagacucacuuucuuccacagcaagugcacuuggaaaacuucaagauguggucaaccaaaaugcacaagcuuuaaacacgcuuguuaaacaacuuagcuccaauuuuggugcaauuucaaguguuuuaaaugauauccuuucacgucuugacaaaguugaggcugaagugcaaauugauagguugaucacaggcagacuucaaaguuugcagacauaugugacucaacaauuaauuagagcugcagaaaucagagcuucugcuaaucuugcugcuacuaaaaugucagaguguguacuuggacaaucaaaaagaguugauuuuuguggaaagggcuaucaucuuauguccuucccucagucagcaccucaugguguagucuucuugcaugugacuuaugucccugcacaagaaaagaacuucacaacugcuccugccauuugucaugauggaaaagcacacuuuccucgugaaggugucuuuguuucaaauggcacacacugguuuguaacacaaaggaauuuuuaugaaccacaaaucauuacuacagacaacacauuuuugucugguaacugugauguuguaauaggaauugucaacaacacaguuuaugauccuuugcaaccugaauuagacucauucaaggaggaguuagauaaauauuuuaagaaucauacaucaccagauguugauuuaggugacaucucuggcauuaaugcuucaguuguaaacauucaaaaagaaauugaccgccucaaugagguugccaagaauuuaaaugaaucucucaucgaucuccaagaacuuggaaaguaugagcaguauauaaaauggccaugguacauuuggcuagguuuuauagcuggcuugauugccauaguaauggugacaauuaugcuuugcuguaugaccaguugcuguaguugucucaagggcuguuguucuuguggauccugcugcaaauuugaugaagacgacucugagccagugcucaaaggagucaaauuacauuacacauaa

SEQ ID NO: 11723 - RNA, 3822 nt, Artificial Sequence
  SARS-CoV-2/USA/UT-00034/2020__EPI_ISL_417977 spike protein CDS wt (1-1273)
auguuuguuuuucuuguuuuauugccacuagucucuagucaguguguuaaucuuacaaccagaacucaauuacccccugcauacacuaauucuuucacacgugguguuuauuacccugacaaaguuuucagauccucaguuuuacauucaacucaggacuuguucuuaccuuucuuuuccaauguuacuugguuccaugcuauacaugucucugggaccaaugguacuaagagguuugauaacccuguccuaccauuuaaugaugguguuuauuuugcuuccacugagaagucuaacauaauaagaggcuggauuuuugguacuacuuuagauucgaagacccagucccuacuuauuguuaauaacgcuacuaauguuguuauuaaagucugugaauuucaauuuuguaaugauccauuuuuggguguuuauuacuacaaaaacaacaaaaguuggauggaaagugaguucagaguuuauucuagugcgaauaauugcacuuuugaauaugucucucagccuuuucuuauggaccuugaaggaaaacaggguaauuucaaaaaucuuagggaauuuguguuuaagaauauugaugguuauuuuaaaauauauucuaagcacacgccuauuaauuuagugcgugaucucccucaggguuuuucggcuuuagaaccauugguagauuugccaauagguauuaacaucacuagguuucaaacuuuacuugcuuuacauagaaguuauuugacuccuggugauucuucuucagguuggacagcuggugcugcagcuuauuauguggguuaucuucaaccuaggacuuuucuauuaaaauauaaugaaaauggaaccauuacagaugcuguagacugugcacuugacccucucucagaaacaaaguguacguugaaauccuucacuguagaaaaaggaaucuaucaaacuucuaacuuuagaguccaaccaacagaaucuauuguuagauuuccuaauauuacaaacuugugcccuuuuggugaaguuuuuaacgccaccagauuugcaucuguuuaugcuuggaacaggaagagaaucagcaacuguguugcugauuauucuguccuauauaauuccgcaucauuuuccacuuuuaaguguuauggagugucuccuacuaaauuaaaugaucucugcuuuacuaaugucuaugcagauucauuuguaauuagaggugaugaagucagacaaaucgcuccagggcaaacuggaaagauugcugauuauaauuauaaauuaccagaugauuuuacaggcugcguuauagcuuggaauucuaacaaucuugauucuaagguuggugguaauuauaauuaccuguauagauuguuuaggaagucuaaucucaaaccuuuugagagagauauuucaacugaaaucuaucaggccgguagcacaccuuguaaugguguugaagguuuuaauuguuacuuuccuuuacaaucauaugguuuccaacccacuaaugguguugguuaccaaccauacagaguaguaguacuuucuuuugaacuucuacaugcaccagcaacuguuuguggaccuaaaaagucuacuaauuugguuaaaaacaaaugugucaauuucaacuucaaugguuuaacaggcacagguguucuuacugagucuaacaaaaaguuucugccuuuccaacaauuuggcagagacauugcugacacuacugaugcuguccgugauccacagacacuugagauucuugacauuacaccauguucuuuugguggugucaguguuauaacaccaggaacaaauacuucuaaccagguugcuguucuuuaucaggguguuaacugcacagaagucccuguugcuauucaugcagaucaacuuacuccuacuuggcguguuuauucuacagguucuaauguuuuucaaacacgugcaggcuguuuaauaggggcugaacaugucaacaacucauaugagugugacauacccauuggugcagguauaugcgcuaguuaucagacucagacuaauucuccucggcgggcacguaguguagcuagucaauccaucauugccuacacuaugucacuuggugcagaaaauucaguugcuuacucuaauaacucuauugccauacccacaaauuuuacuauuaguguuaccacagaaauucuaccagugucuaugaccaagacaucaguagauuguacaauguacauuuguggugauucaacugaaugcagcaaucuuuuguugcaauauggcaguuuuuguacacaauuaaaccgugcuuuaacuggaauagcuguugaacaagacaaaaacacccaagaaguuuuugcacaagucaaacaaauuuacaaaacaccaccaauuaaagauuuuggugguuuuaauuuuucacaaauauuaccagauccaucaaaaccaagcaagaggucauuuauugaagaucuacuuuucaacaaagugacacuugcagaugcuggcuucaucaaacaauauggugauugccuuggugauauugcugcuagagaccucauuugugcacaaaaguuuaacggccuuacuguuuugccaccuuugcucacagaugaaaugauugcucaauacacuucugcacuguuagcggguacaaucacuucugguuggaccuuuggugcaggugcugcauuacaaauaccauuugcuaugcaaauggcuuauagguuuaaugguauuggaguuacacagaauguucucuaugagaaccaaaaauugauugccaaccaauuuaauagugcuauuggcaaaauucaagacucacuuucuuccacagcaagugcacuuggaaaacuucaagauguggucaaccaaaaugcacaagcuuuaaacacgcuuguuaaacaacuuagcuccaauuuuggugcaauuucaaguguuuuaaaugauauccuuucacgucuugacaaaguugaggcugaagugcaaauugauagguugaucacaggcagacuucaaaguuugcagacauaugugacucaacaauuaauuagagcugcagaaaucagagcuucugcuaaucuugcugcuacuaaaaugucagaguguguacuuggacaaucaaaaagaguugauuuuuguggaaagggcuaucaucuuauguccuucccucagucagcaccucaugguguagucuucuugcaugugacuuaugucccugcacaagaaaagaacuucacaacugcuccugccauuugucaugauggaaaagcacacuuuccucgugaaggugucuuuguuucaaauggcacacacugguuuguaacacaaaggaauuuuuaugaaccacaaaucauuacuacagacaacacauuugugucugguaacugugauguuguaauaggaauugucaacaacacaguuuaugauccuuugcaaccugaauuagacucauucaaggaggaguuagauaaauauuuuaagaaucauacaucaccagauguugauuuaggugacaucucuggcauuaaugcuucaguuguaaacauucaaaaagaaauugaccgccucaaugagguugccaagaauuuaaaugaaucucucaucgaucuccaagaacuuggaaaguaugagcaguauauaaaauggccaugguacauuuggcuagguuuuauagcuggcuugauugccauaguaauggugacaauuaugcuuugcuguaugaccaguugcuguaguugucucaagggcuguuguucuuguggauccugcugcaaauuugaugaagacgacucugagccagugcucaaaggagucaaauuacauuacacauaa

SEQ ID NO: 11724 - RNA, 3822 nt, Artificial Sequence
  SARS-CoV-2/USA/UT-00033/2020__EPI_ISL_417976 spike protein CDS wt (1-1273)
auguuuguuuuucuuguuuuauugccacuagucucuagucaguguguuaaucuuacaaccagaacucaauuacccccugcauacacuaauucuuucacacgugguguuuauuacccugacaaaguuuucagauccucaguuuuacauucaacucaggacuuguucuuaccuuucuuuuccaauguuacuugguuccaugcuauacaugucucugggaccaaugguacuaagagguuugauaacccuguccuaccauuuaaugaugguguuuauuuugcuuccacugagaagucuaacauaauaagaggcuggauuuuugguacuacuuuagauucgaagacccagucccuacuuauuguuaauaacgcuacuaauguuguuauuaaagucugugaauuucaauuuuguaaugauccauuuuuggguguuuauuaccacaaaaacaacaaaaguuggauggaaagugaguucagaguuuauucuagugcgaauaauugcacuuuugaauaugucucucagccuuuucuuauggaccuugaaggaaaacaggguaauuucaaaaaucuuagggaauuuguguuuaagaauauugaugguuauuuuaaaauauauucuaagcacacgccuauuaauuuagugcgugaucucccucaggguuuuucggcuuuagaaccauugguagauuugccaauagguauuaacaucacuagguuucaaacuuuacuugcuuuacauagaaguuauuugacuccuggugauucuucuucagguuugacagcuggugcugcagcuuauuauguggguuaucuucaaccuaggacuuuucuauuaaaauauaaugaaaauggaaccauuacagaugcuguagacugugcacuugacccucucucagaaacaaaguguacguugaaauccuucacuguagaaaaaggaaucuaucaaacuucuaacuuuagaguccaaccaacagaaucuauuguuagauuuccuaauauuacaaacuugugcccuuuuggugaaguuuuuaacgccaccagauuugcaucuguuuaugcuuggaacaggaagagaaucagcaacuguguugcugauuauucuguccuauauaauuccgcaucauuuuccacuuuuaaguguuauggagugucuccuacuaaauuaaaugaucucugcuuuacuaaugucuaugcagauucauuuguaauuagaggugaugaagucagacaaaucgcuccagggcaaacuggaaagauugcugauuauaauuauaaauuaccagaugauuuuacaggcugcguuauagcuuggaauucuaacaaucuugauucuaagguuggugguaauuauaauuaccuguauagauuguuuaggaagucuaaucucaaaccuuuugagagagauauuucaacugaaaucuaucaggccgguagcacaccuuguaaugguguugaagguuuuaauuguuacuuuccuuuacaaucauaugguuuccaacccacuaaugguguugguuaccaaccauacagaguaguaguacuuucuuuugaacuucuacaugcaccagcaacuguuuguggaccuaaaaagucuacuaauuugguuaaaaacaaaugugucaauuucaacuucaaugguuuaacaggcacagguguucuuacugagucuaacaaaaaguuucugccuuuccaacaauuuggcagagacauugcugacacuacugaugcuguccgugauccacagacacuugagauucuugacauuacaccauguucuuuugguggugucaguguuauaacaccaggaacaaauacuucuaaccagguugcuguucuuuaucaggguguuaacugcacagaagucccuguugcuauucaugcagaucaacuuacuccuacuuggcguguuuauucuacagguucuaauguuuuucaaacacgugcaggcuguuuaauaggggcugaacaugucaacaacucauaugagugugacauacccauuggugcagguauaugcgcuaguuaucagacucagacuaauucuccucggcgggcacguaguguagcuagucaauccaucauugccuacacuaugucacuuggugcagaaaauucaguugcuuacucuaauaacucuauugccauacccacaaauuuuacuauuaguguuaccacagaaauucuaccagugucuaugaccaagacaucaguagauuguacaauguacauuuguggugauucaacugaaugcagcaaucuuuuguugcaauauggcaguuuuuguacacaauuaaaccgugcuuuaacuggaauagcuguugaacaagacaaaaacacccaagaaguuuuugcacaagucaaacaaauuuacaaaacaccaccaauuaaagauuuuggugguuuuaauuuuucacaaauauuaccagauccaucaaaaccaagcaagaggucauuuauugaagaucuacuuuucaacaaagugacacuugcagaugcuggcuucaucaaacaauauggugauugccuuggugauauugcugcuagagaccucauuugugcacaaaaguuuaacggccuuacuguuuugccaccuuugcucacagaugaaaugauugcucaauacacuucugcacuguuagcggguacaaucacuucugguuggaccuuuggugcaggugcugcauuacaaauaccauuugcuaugcaaauggcuuauagguuuaaugguauuggaguuacacagaauguucucuaugagaaccaaaaauugauugccaaccaauuuaauagugcuauuggcaaaauucaagacucacuuucuuccacagcaagugcacuuggaaaacuucaagauguggucaaccaaaaugcacaagcuuuaaacacgcuuguuaaacaacuuagcuccaauuuuggugcaauuucaaguguuuuaaaugauauccuuucacgucuugacaaaguugaggcugaagugcaaauugauagguugaucacaggcagacuucaaaguuugcagacauaugugacucaacaauuaauuagagcugcagaaaucagagcuucugcuaaucuugcugcuacuaaaaugucagaguguguacuuggacaaucaaaaagaguugauuuuuguggaaagggcuaucaucuuauguccuucccucagucagcaccucaugguguagucuucuugcaugugacuuaugucccugcacaagaaaagaacuucacaacugcuccugccauuugucaugauggaaaagcacacuuuccucgugaaggugucuuuguuucaaauggcacacacugguuuguaacacaaaggaauuuuuaugaaccacaaaucauuacuacagacaacacauuugugucugguaacugugauguuguaauaggaauugucaacaacacaguuuaugauccuuugcaaccugaauuagacucauucaaggaggaguuagauaaauauuuuaagaaucauacaucaccagauguugauuuaggugacaucucuggcauuaaugcuucaguuguaaacauucaaaaagaaauugaccgccucaaugagguugccaagaauuuaaaugaaucucucaucgaucuccaagaacuuggaaaguaugagcaguauauaaaauggccaugguacauuuggcuagguuuuauagcuggcuugauugccauaguaauggugacaauuaugcuuugcuguaugaccaguugcuguaguugucucaagggcuguuguucuuguggauccugcugcaaauuugaugaagacgacucugagccagugcucaaaggagucaaauuacauuacacauaa

SEQ ID NO: 11725 - RNA, 3822 nt, Artificial Sequence
  SARS-CoV-2/USA/WI-13/2020__EPI_ISL_417516 spike protein CDS wt (1-1273)
auguuuguuuuucuuguuuuauugccacuagucucuagucaguguguuaaucuuacaaccagaacucaauuacccccugcauacacuaauucuuucacacgugguguuuauuacccugacaaaguuuucagauccucaguuuuacauucaacucaggacuuguucuuaccuuucuuuuccaauguuacuugguuccaugcuauacaugucucugggaccaaugguacuaagagguuugauaacccuguccuaccauuuaaugaugguguuuauuuugcuuccacugagaagucuaacauaauaagaggcuggauuuuugguacuacuuuagauucgaagacccagucccuacuuauuguuaauaacgcuacuaauguuguuauuaaagucugugaauuucaauuuuguaaugauccauuuuuggguguuuauuaccacaaaaacaacaaaaguuggauggaaagugaguucagaguuuauucuagugcgaauaauugcacuuuugaauaugucucucagccuuuucuuauggaccuugaaggaaaacaggguaauuucaaaaaucuuagggaauuuguguuuaagaauauugaugguuauuuuaaaauauauucuaagcacacgccuauuaauuuagugcgugaucucccucaggguuuuucggcuuuagaaccauugguagauuugccaauagguauuaacaucacuagguuucaaacuuuacuugcuuuacauagaaguuauuugacuccuggugauucuucuucagguuggacagcuggugcugcagcuuauuauguggguuaucuucaaccuaggacuuuucuauuaaaauauaaugaaaauggaaccauuacagaugcuguagacugugcacuugacccucucucagaaacaaaguguacguugaaauccuucacuguagaaaaaggaaucuaucaaacuucuaacuuuagaguccuaccaacagaaucuauuguuagauuuccuaauauuacaaacuugugcccuuuuggugaaguuuuuaacgccaccagauuugcaucuguuuaugcuuggaacaggaagagaaucagcaacuguguugcugauuauucuguccuauauaauuccgcaucauuuuccacuuuuaaguguuauggagugucuccuacuaaauuaaaugaucucugcuuuacuaaugucuaugcagauucauuuguaauuagaggugaugaagucagacaaaucgcuccagggcaaacuggaaagauugcugauuauaauuauaaauuaccagaugauuuuacaggcugcguuauagcuuggaauucuaacaaucuugauucuaagguuggugguaauuauaauuaccuguauagauuguuuaggaagucuaaucucaaaccuuuugagagagauauuucaacugaaaucuaucaggccgguagcacaccuuguaaugguguugaagguuuuaauuguuacuuuccuuuacaaucauaugguuuccaacccacuaaugguguugguuaccaaccauacagaguaguaguacuuucuuuugaacuucuacaugcaccagcaacuguuuguggaccuaaaaagucuacuaauuugguuaaaaacaaaugugucaauuucaacuucaaugguuuaacaggcacagguguucuuacugagucuaacaaaaaguuucugccuuuccaacaauuuggcagagacauugcugacacuacugaugcuguccgugauccacagacacuugagauucuugacauuacaccauguucuuuugguggugucaguguuauaacaccaggaacaaauacuucuaaccagguugcuguucuuuaucaggguguuaacugcacagaagucccuguugcuauucaugcagaucaacuuacuccuacuuggcguguuuauucuacagguucuaauguuuuucaaacacgugcaggcuguuuaauaggggcugaacaugucaacaacucauaugagugugacauacccauuggugcagguauaugcgcuaguuaucagacucagacuaauucuccucggcgggcacguaguguagcuagucaauccaucauugccuacacuaugucacuuggugcagaaaauucaguugcuuacucuaauaacucuauugccauacccacaaauuuuacuauuaguguuaccacagaaauucuaccagugucuaugaccaagacaucaguagauuguacaauguacauuuguggugauucaacugaaugcagcaaucuuuuguugcaauauggcaguuuuuguacacaauuaaaccgugcuuuaacuggaauagcuguugaacaagacaaaaacacccaagaaguuuuugcacaagucaaacaaauuuacaaaacaccaccaauuaaagauuuuggugguuuuaauuuuucacaaauauuaccagauccaucaaaaccaagcaagaggucauuuauugaagaucuacuuuucaacaaagugacacuugcagaugcuggcuucaucaaacaauauggugauugccuuggugauauugcugcuagagaccucauuugugcacaaaaguuuaacggccuuacuguuuugccaccuuugcucacagaugaaaugauugcucaauacacuucugcacuguuagcggguacaaucacuucugguuggaccuuuggugcaggugcugcauuacaaauaccauuugcuaugcaaauggcuuauagguuuaaugguauuggaguuacacagaauguucucuaugagaaccaaaaauugauugccaaccaauuuaauagugcuauuggcaaaauucaagacucacuuucuuccacagcaagugcacuuggaaaacuucaagauguggucaaccaaaaugcacaagcuuuaaacacgcuuguuaaacaacuuagcuccaauuuuggugcaauuucaaguguuuuaaaugauauccuuucacgucuugacaaaguugaggcugaagugcaaauugauagguugaucacaggcagacuucaaaguuugcagacauaugugacucaacaauuaauuagagcugcagaaaucagagcuucugcuaaucuugcugcuacuaaaaugucagaguguguacuuggacaaucaaaaagaguugauuuuuguggaaagggcuaucaucuuauguccuucccucagucagcaccucaugguguagucuucuugcaugugacuuaugucccugcacaagaaaagaacuucacaacugcuccugccauuugucaugauggaaaagcacacuuuccucgugaaggugucuuuguuucaaauggcacacacugguuuguaacacaaaggaauuuuuaugaaccacaaaucauuacuacagacaacacauuugugucugguaacugugauguuguaauaggaauugucaacaacacaguuuaugauccuuugcaaccugaauuagacucauucaaggaggaguuagauaaauauuuuaagaaucauacaucaccagauguugauuuaggugacaucucuggcauuaaugcuucaguuguaaacauucaaaaagaaauugaccgccucaaugagguugccaagaauuuaaaugaaucucucaucgaucuccaagaacuuggaaaguaugagcaguauauaaaauggccaugguacauuuggcuagguuuuauagcuggcuugauugccauaguaauggugacaauuaugcuuugcuguaugaccaguugcuguaguugucucaagggcuguuguucuuguggauccugcugcaaauuugaugaagacgacucugagccagugcucaaaggagucaaauuacauuacacauaa

SEQ ID NO: 11726 - RNA, 3819 nt, Artificial Sequence
  SARS-CoV-2/India/1-27/2020__EPI_ISL_413522 spike protein CDS wt (1-1272)
auguuuguuuuucuuguuuuauugccacuagucucuagucaguguguuaaucuuacaaccagaacucaauuacccccugcauacacuaauucuuucacacgugguguuuauuacccugacaaaguuuucagauccucaguuuuacauucaacucaggacuuguucuuaccuuucuuuuccaauguuacuugguuccaugcuauacaugucucugggaccaaugguacuaagagguuugauaacccuguccuaccauuuaaugaugguguuuauuuugcuuccacugagaagucuaacauaauaagaggcuggauuuuugguacuacuuuagauucgaagacccagucccuacuuauuguuaauaacgcuacuaauguuguuauuaaagucugugaauuucaauuuuguaaugauccauuuuuggguguuuaccacaaaaacaacaaaaguuggauggaaagugaguucagaguuuauucuagugcgaauaauugcacuuuugaauaugucucucagccuuuucuuauggaccuugaaggaaaacaggguaauuucaaaaaucuuagggaauuuguguuuaagaauauugaugguuauuuuaaaauauauucuaagcacacgccuauuaauuuagugcgugaucucccucaggguuuuucggcuuuagaaccauugguagauuugccaauagguauuaacaucacuagguuucaaacuuuacuugcuuuacauagaaguuauuugacuccuggugauucuucuucagguuggacagcuggugcugcagcuuauuauguggguuaucuucaaccuaggacuuuucuauuaaaauauaaugaaaauggaaccauuacagaugcuguagacugugcacuugacccucucucagaaacaaaguguacguugaaauccuucacuguagaaaaaggaaucuaucaaacuucuaacuuuagaguccaaccaacagaaucuauuguuagauuuccuaauauuacaaacuugugcccuuuuggugaaguuuuuaacgccaccagauuugcaucuguuuaugcuuggaacaggaagagaaucagcaacuguguugcugauuauucuguccuauauaauuccgcaucauuuuccacuuuuaaguguuauggagugucuccuacuaaauuaaaugaucucugcuuuacuaaugucuaugcagauucauuuguaauuagaggugaugaagucauacaaaucgcuccagggcaaacuggaaagauugcugauuauaauuauaaauuaccagaugauuuuacaggcugcguuauagcuuggaauucuaacaaucuugauucuaagguuggugguaauuauaauuaccuguauagauuguuuaggaagucuaaucucaaaccuuuugagagagauauuucaacugaaaucuaucaggccgguagcacaccuuguaaugguguugaagguuuuaauuguuacuuuccuuuacaaucauaugguuuccaacccacuaaugguguugguuaccaaccauacagaguaguaguacuuucuuuugaacuucuacaugcaccagcaacuguuuguggaccuaaaaagucuacuaauuugguuaaaaacaaaugugucaauuucaacuucaaugguuuaacaggcacagguguucuuacugagucuaacaaaaaguuucugccuuuccaacaauuuggcagagacauugcugacacuacugaugcuguccgugauccacagacacuugagauucuugacauuacaccauguucuuuugguggugucaguguuauaacaccaggaacaaauacuucuaaccagguugcuguucuuuaucaggauguuaacugcacagaagucccuguugcuauucaugcagaucaacuuacuccuacuuggcguguuuauucuacagguucuaauguuuuucaaacacgugcaggcuguuuaauaggggcugaacaugucaacaacucauaugagugugacauacccauuggugcagguauaugcgcuaguuaucagacucagacuaauucuccucggcgggcacguaguguagcuagucaauccaucauugccuacacuaugucacuuggugcagaaaauucaguugcuuacucuaauaacucuauugccauacccacaaauuuuacuauuaguguuaccacagaaauucuaccagugucuaugaccaagacaucaguagauuguacaauguacauuuguggugauucaacugaaugcagcaaucuuuuguugcaauauggcaguuuuuguacacaauuaaaccgugcuuuaacuggaauagcuguugaacaagacaaaaacacccaagaaguuuuugcacaagucaaacaaauuuacaaaacaccaccaauuaaagauuuuggugguuuuaauuuuucacaaauauuaccagauccaucaaaaccaagcaagaggucauuuauugaagaucuacuuuucaacaaagugacacuugcagaugcuggcuucaucaaacaauauggugauugccuuggugauauugcugcuagagaccucauuugugcacaaaaguuuaacggccuuacuguuuugccaccuuugcucacagaugaaaugauugcucaauacacuucugcacuguuagcggguacaaucacuucugguuggaccuuuggugcaggugcugcauuacaaauaccauuugcuaugcaaauggcuuauagguuuaaugguauuggaguuacacagaauguucucuaugagaaccaaaaauugauugccaaccaauuuaauagugcuauuggcaaaauucaagacucacuuucuuccacagcaagugcacuuggaaaacuucaagauguggucaaccaaaaugcacaagcuuuaaacacgcuuguuaaacaacuuagcuccaauuuuggugcaauuucaaguguuuuaaaugauauccuuucacgucuugacaaaguugaggcugaagugcaaauugauagguugaucacaggcagacuucaaaguuugcagacauaugugacucaacaauuaauuagagcugcagaaaucagagcuucugcuaaucuugcugcuacuaaaaugucagaguguguacuuggacaaucaaaaagaguugauuuuuguggaaagggcuaucaucuuauguccuucccucagucagcaccucaugguguagucuucuugcaugugacuuaugucccugcacaagaaaagaacuucacaacugcuccugccauuugucaugauggaaaagcacacuuuccucgugaaggugucuuuguuucaaauggcacacacugguuuguaacacaaaggaauuuuuaugaaccacaaaucauuacuacagacaacacauuugugucugguaacugugauguuguaauaggaauugucaacaacacaguuuaugauccuuugcaaccugaauuagacucauucaaggaggaguuagauaaauauuuuaagaaucauacaucaccagauguugauuuaggugacaucucuggcauuaaugcuucaguuguaaacauucaaaaagaaauugaccgccucaaugagguugccaagaauuuaaaugaaucucucaucgaucuccaagaacuuggaaaguaugagcaguauauaaaauggccaugguacauuuggcuagguuuuauagcuggcuugauugccauaguaauggugacaauuaugcuuugcuguaugaccaguugcuguaguugucucaagggcuguuguucuuguggauccugcugcaaauuugaugaagacgacucugagccagugcucaaaggagucaaauuacauuacacauaa

SEQ ID NO: 11727 - RNA, 3804 nt, Artificial Sequence
  SARS-CoV-2/pangolin/Guangxi/P4L/2017__EPI_ISL_410538 spike protein CDS wt (1-1267)
auguuuguuuuucuuuuugucuugccuuugguuuccagucaaugugucaauuugaccacaagaacuggaauaccgccagguuauaccaauucaucuacuagaggugucuauuauccagacaaaguuuuuaggucuucaauuuuacaucuuacacaagaccuuuucuuaccuuucuuuucuaauguuacuugguuuaacaccauaaauuaucaaggaggcuuuaagaaguuugacaauccuguuuuaccauuuaaugaugguguuuacuuugccuccacggaaaaguccaauauuauacgcgguuggauuuuuggaacaacacuugaugccagaacucaaucucuucuaauaguuaacaacgcaaccaauguuguuaucaaaguaugugaguuucaguuuugcacugauccauuuuuagguguuuacuaucauaacaacaauaaaacauggguugaaaaugaguuuagaguuuauucaagugccaacaauugcacuuucgaauacauuucucaaccuuuucuuauggaccuugaaggaaagcaagguaauuuuaagaaccuuagagaguuuguguuuaaaaauguugaugguuauuucaagauuuacucuaaacacacaccuauugauuuagugcgcgaccuccccagagguuuugcugcauuggaaccacugguggaccucccuauagguauuaauauuaccagauuccaaacauugcuugcuuuacauagaaguuaucuuacaccugguaaucuagaaaguggcuggacaacuggagcugcugcuuacuauguagguuaccuacaacagaggacuuuucucuuaaguuacaaucaaaauggaaccauuacagaugcuguugauuguucacuagacccucuuucagagacaaagugcacauuaaaaucccuaacaguugaaaaaggaauuuaccagacuucuaacuucagaguucaaccaacaaucaguauaguuagauuuccuaauauuacaaacuuauguccauuuggagaaguguuuaacgcauccaaauuugcaucaguuuaugcuuggaacaggaagagaauuagcaauuguguugcugauuacucuguacuuuauaacucuacaucauuuuccacuuuuaaauguuauggaguuucaccuacaaaacucaaugaccuuugcuucaccaauguguaugcagacucauuuguuguuaaaggugacgagguuagacaaauagcacccggacaaacugguguuauugcugauuauaacuauaagcugccagaugauuuuacugguuguguuauugcuuggaacucaguuaagcaagaugcuuugacuggugguaauuaugguuauuuguauagauuauuuagaaagucuaagcuuaaaccauuugagagagauauuuccacugaaauauaccaagccggcagcacacccuguaacggucaaguuggucuaaauuguuauuauccucuugaaagguaugguuuucacccaacuacagguguuaacuaccaaccuuuuagagugguuguuuuaucauuugaguuacuuaauggaccagcuacuguuuguggacccaaauugucuacaacacuaguuaaagacaaaugugucaauuucaacuuuaacgguuuaacuggcacagguguucuuacaacaucuaagaaacaguuucugccuuuucaacaauuugguagagacaucucugacacuacugaugcuguccgugacccacagacacuugaaauacuugacauuaccccuugcucuuuuggaggaguuagugugauaacaccagguacaaacacuucuaaucaaguggcuguacuuuaccaagauguuaacuguacugaagugccuauggccauucaugcagaacaacuuacaccugccuggcguguuuacucugcaggagcaaauguguuucaaacaagagcaggcuguuuaguaggugcugagcaugucaacaauucuuaugaaugugacauuccagucggugcuggcauaugugcaaguuaccauuccaugucaucauugcguagugucaaccagcguucaaucauugcuuacacuaugucuuuaggugcagaaaauucaguugcuuauucuaauaauucaauugccauaccuacuaauuuuacaauaaguguuaccacagaaauucuaccagugucaaugacuaagacuucuguagauuguacuauguacaucuguggagauucaauugaguguaguaauuuauugcuacaauauggcaguuuuugcacacaauuaaaccgugcuuugacugggauugcuguugaacaagacaaaaacacacaagaaguuuuugcccagguuaaacaaaucuacaaaacaccaccuauuaaagauuuugguggcuuuaacuuuucacaaauauugccagauccaucaaaaccaagcaagaggucauuuauugaggauuuacucuucaacaaagugacacuugcugaugcuggcuucaucaaacaauauggugauugccuuggugauauugcugcuagagaucucaucugugcacaaaaguucaauggacucacgguucuaccgccuuugcucacagaugaaaugauugcucaauacacuucugcacuacuugcuggaacaaucaccucagguuggaccuuuggugcaggagcugcuuuacaaauacccuuugcaaugcaaauggcuuacagguuuaauggcauuggagucacucagaauguucuauaugagaaucagaaauuaauugccaaucaguucaacagugcuauuggcaaaauacaggauucacuuucaucuacggcuagugcacuugguaaacuucaagacgucguaaaucaaaaugcacaggcuuuaaacacacuugucaaacaacuuaguuccaauuuuggagcuauuucgagugugcuuaaugauauucuuucacgucuugacaaaguugaggcugaagugcaaauugauagguuaaucacaggaagacuacagagucuucaaacuuaugugacacaacaauuaaucagagcagcagaaaucagagcuucugcuaaucuugcugcaacaaaaaugucugagugcguacucggacaaucuaaaagaguugauuuuuguggaaaaggcuaccauuuaaugucuuucccucaaucagcaccgcaugguguuguuuucuugcauguuacuuauguaccugcacaagaaaagaacuuuacuacugcuccugcuauuugucaugaaggaaaagcacacuucccucgugaaggugucuucguuucaaauggcacucauugguuuauuacacaaaggaauuuuuaugaaccucaaauuauuaccacugacaacacauucgucucugguagcugugauguuguaauuggaauagucaacaacacaguuuaugauccuuugcaacccgagcuugacucauuuaaggaggaguuagacaaauacuucaaaaaucacacaucaccagauguugaucuuggcgacauaucuggcauaaaugcuucggucgucaacauacaaaaagaaauugaccgccucaaugagguugccaaaaauuugaaugaaucacccauugaccuacaagagcuuggaaaauaugagcaauacaucaaauggccuugguacauuuggcuugguuuuauagcugggcuaauugcuaucauuauggucacaaucaugcuauguuguaugacuaguugcuguaguugccucaaggguuguugcucuugcgguuccugcugcaaauuugaugaagacgauucagaaccuguucugaaaggagucaaauuacauuacacauaa

SEQ ID NO: 11728 - RNA, 3804 nt, Artificial Sequence
  SARS-CoV-2/pangolin/Guangxi/P5L/2017__EPI_ISL_410540 spike protein CDS wt (1-1267)
auguuuguuuuucuuuuugucuugccuuugguuuccagucaaugugucaauuugaccacaagaacuggaauaccgccagguuauaccaauucaucuacuagaggugucuauuauccagacaaaguuuuuaggucuucaauuuuacaucuuacacaagaccuuuucuuaccuuucuuuucuaauguuacuugguuuaacaccauaaauuaucaaggaggcuuuaagaaguuugacaauccuguuuuaccauuuaaugaugguguuuacuuugccuccacggaaaaguccaauauuauacgcgguuggauuuuuggaacaacacuugaugccagaacucaaucucuucuaauaguuaacaacgcaaccaauguuguuaucaaaguaugugaguuucaguuuugcacugauccauuuuuagguguuuacuaucauaacaacaauaaaacauggguugaaaaugaguuuagaguuuauucaagugccaacaauugcacuuucgaauacauuucucaaccuuuucuuauggaccuugaaggaaagcaagguaauuuuaagaaccuuagagaguuuguguuuaaaaauguugaugguuauuucaagauuuacucuaaacacacaccuauugauuuagugcgcgaccuccccagagguuuugcugcauuggaaccacugguggaccucccuauagguauuaauauuaccagauuccaaacauugcuugcuuuacauagaaguuaucuuacaccugguaagcuagaaaguggcuggacaacuggagcugcugcuuacuauguagguuaccuacaacagaggacuuuucucuuaaguuacaaucaaaauggaaccauuacagaugcuguugauuguucacuagacccucuuucagagacaaagugcacauuaaaaucccuaacaguugaaaaaggaauuuaccagacuucuaacuucagaguucaaccaacaaucaguauaguuagauuuccuaauauuacaaacuuauguccauuuggagaaguguuuaacgcauccaaauuugcaucaguuuaugcuuggaacaggaagagaauuagcaauuguguugcugauuacucuguacuuuauaacucuacaucauuuuccacuuuuaaauguuauggaguuucaccuacaaaacucaaugaccuuugcuucaccaauguguaugcagacucauuuguuguuaaaggugacgagguuagacaaauagcacccggacaaacugguguuauugcugauuauaacuauaagcugccagaugauuuuacugguuguguuauugcuuggaacucaguuaagcaagaugcuuugacuggugguaauuaugguuauuuguauagauuauuuagaaagucuaagcuuaaaccauuugagagagauauuuccacugaaauauaccaagccggcagcacacccuguaacggucaaguuggucuaaauuguuauuauccucuugaaagguaugguuuucacccaacuacagguguuaacuaccaaccuuuuagagugguuguuuuaucauuugaguuacuuaauggaccagcuacuguuuguggacccaaauugucuacaacacuaguuaaagacaaaugugucaauuucaacuuuaacgguuuaacuggcacagguguucuuacaacaucuaagaaacaguuucugccuuuucaacaauuugguagagacaucucugacacuacugaugcuguccgugacccacagacacuugaaauacuugacauuaccccuugcucuuuuggaggaguuagugugauaacaccagguacaaacacuucuaaucaaguggcuguacuuuaccaagauguuaacuguacugaagugccuauggccauucaugcagaacaacuuacaccugccuggcguguuuacucugcaggagcaaauguguuucaaacaagagcaggcuguuuaguaggugcugagcaugucaacaauucuuaugaaugugacauuccagucggugcuggcauaugugcaaguuaccauuccaugucaucauuucguagugucaaccagcguucaaucauugcuuacacuaugucuuuaggugcagaaaauucaguugcuuauucuaauaauucaauugccauaccuacuaauuuuacaauaaguguuaccacagaaauucuaccagugucaaugacuaagacuucuguagauuguacuauguacaucuguggagauucaauugaguguaguaauuuauugcuacaauauggcaguuuuugcacacaauuaaaccgugcuuugacugggauugcuguugaacaagacaaaaacacacaagaaguuuuugcccagguuaaacaaaucuacaaaacaccaccuauuaaagauuuugguggcuuuaacuuuucacaaauauugccagauccaucaaaaccaagcaagaggucauuuauugaggauuuacucuucaacaaagugacacuugcugaugcuggcuucaucaaacaauauggugauugccuuggugauauugcugcuagagaucucaucugugcacaaaaguucaauggacucacgguucuaccgccuuugcucacagaugaaaugauugcucaauacacuucugcacuacuugcuggaacaaucaccucagguuggaccuuuggugcaggagcugcuuuacaaauacccuuugcaaugcaaauggcuuacagguuuaauggcauuggagucacucagaauguucuauaugagaaucagaaauuaauugccaaucaguucaacagugcuauuggcaaaauacaggauucacuuucaucuacggcuagugcacuugguaaacuucaagacgucguaaaucaaaaugcacaggcuuuaaacacacuugucaaacaacuuaguuccaauuuuggagcuauuucgagugugcuuaaugauauucuuucacgucuugacaaaguugaggcugaagugcaaauugauagguuaaucacaggaagacuacagagucuucaaacuuaugugacacaacaauuaaucagagcagcagaaaucagagcuucugcuaaucuugcugcaacaaaaaugucugagugcguacucggacaaucuaaaagaguugauuuuuguggaaaaggcuaccauuuaaugucuuucccucaaucagcaccgcaugguguuguuuucuugcauguuacuuauguaccugcacaagaaaagaacuuuacuacugcuccugcuauuugucaugaaggaaaagcacacuucccucgugaaggugucuucguuucaaauggcacucauugguuuauuacacaaaggaauuuuuaugaaccucaaauuauuaccacugacaacacauucgucucugguagcugugauguuguaauuggaauagucaacaacacaguuuaugauccuuugcaacccgagcuugacucauuuaaggaggaguuagacaaauacuucaaaaaucacacaucaccagauguugaucuuggcgacauaucuggcauaaaugcuucggucgucaacauacaaaaagaaauugaccgccucaaugagguugccaaaaauuugaaugaaucacucauugaccuacaagagcuuggaaaauaugagcaauacaucaaauggccuugguacauuuggcuugguuuuauagcugggcuaauugcuaucauuauggucacaaucaugcuauguuguaugacuaguugcuguaguugccucaaggguuguugcucuugcgguuccugcugcaaauuugaugaagacgauucagaaccuguucugaaaggagucaaauuacauuacacauaa

SEQ ID NO: 11729 - RNA, 3804 nt, Artificial Sequence
  SARS-CoV-2/pangolin/Guangxi/P5E/2017__EPI_ISL_410541 spike protein CDS wt (1-1267)
auguuuguuuuucuuuuugucuugccuuugguuuccagucaaugugucaauuugaccacaagaacuggaauaccgccagguuauaccaauucaucuacuagaggugucuauuauccagacaaaguuuuuaggucuucaauuuuacaucuuacacaagaccuuuucuuaccuuucuuuucuaauguuacuugguuuaacaccauaacuuaucaaggaggcucuaagaaguuugacaauccuguuuuaccauuuaaugaugguguuuacuuugccuccacggaaaaguccaauauuauacgcgguuggauuuuuggaacaacacuugaugccagaacucaaucucuucuaauaguuaacaacgcaaccaauguuguuaucaaaguaugugaguuucaguuuugcacugauccauuuuuagguguuuacuaucauaacaacaauaaaacauggguugaaaaugaguuuagaguuuauucaagugccaacaauugcacuuucgaauacauuucucaaccuuuucuuauggaccuugaaggaaagcaagguaauuuuaagaaccuuagagaguuuguguuuaaaaauguugaugguuauuucaagauuuacucuaaacacacaccuauugauuuagugcgcgaccuccccagagguuuugcugcauuggaaccacugguggaccucccuauagguauuaauauuaccagauuccaaacauugcuugcuuuacauagaaguuaucuuacaccugguaagcuagaaaguggcuggacaacuggagcugcugcuuacuauguagguuaccuacaacagaggacuuuucucuuaaguuacaaucaaaauggaaccauuacagaugcuguugauuguucacuagacccucuuucagagacaaagugcacauuaaaaucccuaacaguugaaaaaggaauuuaccagacuucuaacuucagaguucaaccaacaaucaguauaguuagauuuccuaauauuacaaacuuauguccauuuggagaaguguuuaacgcauccaaauuugcaucaguuuaugcuuggaacaggaagagaauuagcaauuguguugcugauuacucuguacuuuauaacucuacaucauuuuccacuuuuaaauguuauggaguuucaccuacaaaacucaaugaccuuugcuucaccaauguguaugcagacucauuuguuguuaaaggugacgagguuagacaaauagcacccggacaaacugguguuauugcugauuauaacuauaagcugccagaugauuuuacugguuguguuauugcuuggaacucaguuaagcaagaugcuuugacuggugauaauuaugguuauuuguauagauuauuuagaaagucuaagcuuaaaccauuugagagagauauuuccacugaaauauaccaagccggcagcacacccuguaacggucaaguuggucuaaauuguuauuauccucuugaaagguaugguuuucacccaacuacagguguuaacuaccaaccuuuuagagugguuguuuuaucauuugaguuacuuaauggaccagcuacuguuuguggacccaaauugucuacaacacuaguuaaagacaaaugugucaauuucaacuuuaacgguuuaacuggcacagguguucuuacaacaucuaagaaacaguuucugccuuuucaacaauuugguagagacaucucugacacuacugaugcuguccgugacccacagacacuugaaauacuugacauuaccccuugcucuuuuggaggaguuagugugauaacaccagguacaaacacuucuaaucaaguggcuguacuuuaccaagauguuaacuguacugaagugccuauggccauucaugcagaacaacuuacaccugccuggcguguuuacucugcaggagcaaauguguuucaaacaagagcaggcuguuuaguaggugcugagcaugucaacaauucuuaugaaugugacauuccagucggugcuggcauaugugcaaguuaccauuccaugucaucauuucguagugucaaccagcguucaaucauugcuuacacuaugucuuuaggugcagaaaauucaguugcuuauucuaauaauucaauugccauaccuacuaauuuuacaauaaguguuaccacagaaauucuaccagugucaaugacuaagacuucuguagauuguacuauguacaucuguggagauucaauugaguguaguaauuuauugcuacaauauggcaguuuuugcacacaauuaaaccgugcuuugacugggauugcuguugaacaagacaaaaacacacaagaaguuuuugcccagguuaaacaaaucuacaaaacaccaccuauuaaagauuuugguggcuuuaacuuuucacaaauauugccagauccaucaaaaccaagcaagaggucauuuauugaggauuuacucuucaacaaagugacacuugcugaugcuggcuucaucaaacaauauggugauugccuuggugauauugcugcuagagaucucaucugugcacaaaaguucaauggacucacgguucuaccgccuuugcucacagaugaaaugauugcucaauacacuucugcacuacuugcuggaacaaucaccucagguuggaccuuuggugcaggagcugcuuuacaaauacccuuugcaaugcaaauggcuuacagguuuaauggcauuggagucacucagaauguucuauaugagaaucagaaauuaauugccaaucaguucaacagugcuauuggcaaaauacaggauucacuuucaucuacggcuagugcacuugguaaacuucaagacgucguaaaucaaaaugcacaggcuuuaaacacacuugucaaacaacuuaguuccaauuuuggagcuauuucgagugugcuuaaugauauucuuucacgucuugacaaaguugaggcugaagugcaaauugauagguuaaucacaggaagacuacagagucuucaaacuuaugugacacaacaauuaaucagagcagcagaaaucagagcuucugcuaaucuugcugcaacaaaaaugucugagugcguacucggacaaucuaaaagaguugauuuuuguggaaaaggcuaccauuuaaugucuuucccucaaucagcaccgcaugguguuguuuucuugcauguuacuuauguaccugcacaagaaaagaacuuuacuacugcuccugcuauuugucaugaaggaaaagcacacuucccucgugaaggugucuucguuucaaauggcacucauugguuuauuacacaaaggaauuuuuaugaaccucaaauuauuaccacugacaacacauucgucucugguagcugugauguuguaauuggaauagucaacaacacaguuuaugauccuuugcaacccgagcuugacucauuuaaggaggaguuagacaaauacuucaaaaaucacacaucaccagauguugaucuuggcgacauaucuggcauaaaugcuucggucgucaacauacaaaaagaaauugaccgccucaaugagguugccaaaaauuugaaugaaucacucauugaccuacaagagcuuggaaaauaugagcaauacaucaaauggccuugguacauuuggcuugguuuuauagcugggcuaauugcuaucauuauggucacaaucaugcuauguuguaugacuaguugcuguaguugccucaaggguuguugcucuugcgguuccugcugcaaauuugaugaagacgauucagaaccuguucugaaaggagucaaauuacauuacacauaa

SEQ ID NO: 11730 - RNA, 3798 nt, Artificial Sequence
  SARS-CoV-2/pangolin/Guangxi/P1E/2017__EPI_ISL_410539 spike protein CDS wt (1-1265)
auguuuguuuuucuuuuugucuugccuuugguuuccagucaaugugucaauuugaccacaagaacuggaauacagccagguuauaccaauucaucuacuagaggugucuauuauccagacaaaguuuuuaggucuucaauuuuacaucuuacacaagaccuuuucuuaccuuucuuuucuaauguuacuugguuuaacaccauaaauuaucaaggaggcuuuaagaaguuugacaauccuguuuuaccauuuaaugaugguguuuacuuugccuccacggaaaaguccaauauuauacgcgguuggauuuuuggaacaacacuugaugccagaacucaaucucuucuaauaguuaacaacgcaaccaauguuguuaucaaaguaugugaguuucaguuuugcacugauccauuuuuagguguuuacuaucauaacaacaauaaaacauggguugaaaaugaguuuagaguuuauucaagugccaacaauugcacuuucgaauacauuucucaaccuuuucuuauggaccuugaaggaaagcaagguaauuuuaagaaccuuagagaguuuguguuuaaaaauguugaugguuauuucaagauuuacucuaaacacacaccuauugauuuagugcgcgaccuccccagagguuuugcugcauuggaaccacugguggaccucccuauagguauuaauauuaccagauuccaaacauugcuugcuuuacauagaaguuaucuuacaccugguaagcuagaaaguggcuggacaacuggagcugcugcuuacuauguagguuaccuacaacagaggacuuuucucuuaaguuacaaucaaaauggaaccauuacagaugcuguugauuguucacuagacccucuuucagagacaaagugcacauuaaaaucccuaacaguugaaaaaggaauuuaccagacuucuaacuucagaguucaaccaacaaucaguauaguuagauuuccuaauauuacaaacuuauguccauuuggagaaguguuuaacgcauccaaauuugcaucaguuuaugcuuggaacaggaagagaauuagcaauuguguugcugauuacucuguacuuuauaacucuacaucauuuuccacuuuuaaauguuauggaguuucaccuacaaaacucaaugaccuuugcuucaccaauguguaugcagacucauuuguuguuaaaggugacgagguuagacaaauagcacccggacaaacugguguuauugcugauuauaacuauaagcugccagaugauuuuacugguuguguuauugcuuggaacucaguuaagcaagaugcuuugacuggugguaauuauuuguauagauuauuuagaaagucuaagcuuaaaccauuugagagagauauuuccacugaaauauaccaagccggcagcacacccuguaacggucaaguuggucuaaauuguuauuauccucuugaaagguaugguuuucacccaacuacagguguuaacuaccaaccuuuuagagugguuguuuuaucauuugaguuacuuaauggaccagcuacuguuuguggacccaaauugucuacaacacuaguuaaagacaaaugugucaauuucaacuuuaacgguuuaacuggcacagguguucuuacaacaucuaagaaacaguuucugccuuuucaacaauuugguagagacaucucugacacuacugaugcuguccgugacccacagacacuugaaauacuugacauuaccccuugcucuuuuggaggaguuagugugauaacaccagguacaaacacuucuaaucaaguggcuguacuuuaccaagauguuaacuguacugaagugccuauggccauucaugcagaacaacuuacaccugccuggcguguuuacucugcaggagcaaauguguuucaaacaagagcaggcuguuuaguaggugcugagcaugucaacaauucuuaugaaugugacauuccagucggugcuggcauaugugcaaguuaccauuccaugucaucauugcguagugucaaccagcguucaaucauugcuuacacuaugucuuuaggugcagaaaauucaguugcuuauucuaauaauucaauugccauaccuacuaauuuuacaauaaguguuaccacagaaauucuaccagugucaaugacuaagacuucuguagauuguacuauguacaucuguggagauucaauugaguguaguaauuuauugcuacaauauggcaguuuuugcacacaauuaaaccgugcuuugacugggauugcuguugaacaagacaaaaacacacaagaaguuuuugcccagguuaaacaaaucuacaaaacaccaccuauuaaagauuuugguggcuuuaacuuuucacaaauauugccagauccaucaaaaccaagcaagaggucauuuauugaggauuuacucuucaacaaagugacacuugcugaugcuggcuucaucaaacaauauggugauugccuuggugauauugcugcuagagaucucaucugugcacaaaaguucaauggacucacgguucuaccgccuuugcucacagaugaaaugauugcucaauacacuucugcacuacuugcuggaacaaucaccucagguuggaccuuuggugcaggagcugcuuuacaaauacccuuugcaaugcaaauggcuuacagguuuaauggcauuggagucacucagaauguucuauaugagaaucagaaauuaauugccaaucaguucaacagugcuauuggcaaaauacaggauucacuuucaucuacggcuagugcacuugguaaacuucaagacgucguaaaucaaaaugcacaggcuuuaaacacacuugucaaacaacuuaguuccaauuuuggagcuauuucgagugugcuuaaugauauucuuucacgucuugacaaaguugaggcugaagugcaaauugauagguuaaucacaggaagacuacagagucuucaaacuuaugugacacaacaauuaaucagagcagcagaaaucagagcuucugcuaaucuugcugcaacaaaaaugucugagugcguacucggacaaucuaaaagaguugauuuuuguggaaaaggcuaccauuuaaugucuuucccucaaucagcaccgcaugguguuguuuucuugcauguuacuuauguaccugcacaagaaaagaacuuuacuacugcuccugcuauuugucaugaaggaaaagcacacuucccucgugaaggugucuucguuucaaauggcacucauugguuuauuacacaaaggaauuuuuaugaaccucaaauuauuaccacugacaacacauucgucucugguagcugugauguuguaauuggaauagucaacaacacaguuuaugauccuuugcaacccgagcuugacucauuuaaggaggaguuagacaaauacuucaaaaaucacacaucaccagauguugaucuuggcgacauaucuggcauaaaugcuucggucgucaacauacaaaaagaaauugaccgccucaaugagguugccaaaaauuugaaugaaucacucauugaccuacaagagcuuggaaaauaugagcaauacaucaaauggccuugguacauuuggcuugguuuuauagcugggcuaauugcuaucauuauggucacaaucaugcuauguuguaugacuaguugcuguaguugccucaaggguuguugcucuugcgguuccugcugcaaauuugaugaagacgauucagaaccuguucugaaaggagucaaauuacauuacacauaa

SEQ ID NO: 11731 - RNA, 3822 nt, Artificial Sequence; identical to SEQ ID NO: 136
  SARS-CoV-2/Wuhan/WIV05/2019__EPI_ISL_402128 spike protein CDS gc (1-1273)

SEQ ID NO: 11732 - RNA, 3810 nt, Artificial Sequence
  SARS-CoV-2/bat/Yunnan/RaTG13/2013__EPI_ISL_402131 spike protein CDS gc (1-1269)
auguucguguuccugguccuccugccccuggugagcucccagugcgugaaccucaccacccgcacgcagcugccgcccgccuacaccaacagcuccacccggggcgucuacuaccccgacaagguguuccgcagcuccgugcugcaccucacccaggaccuguuccugcccuucuucagcaacgucacgugguuccacgccauccacguguccgggaccaacggcaucaagcgguucgacaacccggugcuccccuucaacgacggggucuacuucgcgagcaccgagaaguccaacaucauccgcggcuggaucuucgggaccacgcuggacagcaagacccagucccugcucaucgugaacaacgccaccaacguggucaucaaggugugcgaguuccaguucugcaacgaccccuuccugggcguguacuaccacaagaacaacaagagcuggauggaguccgaguuccgggucuacagcuccgccaacaacugcaccuucgaguacgugagccagcccuuccugauggaccucgagggcaagcaggggaacuucaagaaccugcgcgaguucguguucaagaacaucgacggcuacuucaagaucuacuccaagcacacgccgaucaaccugguccgggaccucccgcccggguucagcgcccuggagccccugguggaccuccccaucggcaucaacaucacccgcuuccagacccugcuggcccuccaccgguccuaccugacccccggggacagcagcuccggcuggacggcgggcgccgccgccuacuacgugggguaccugcagccccgcaccuuccuccugaaguacaacgagaacggcaccaucaccgacgcggucgacugcgcccuggacccccucagcgagacgaagugcacccugaaguccuucaccguggagaaggggaucuaccagaccagcaacuuccgggugcagccgacggacuccaucguccgcuuccccaacaucaccaaccugugccccuucggcgagguguucaacgccaccaccuucgccagcgucuacgccuggaaccggaagcgcaucuccaacugcguggcggacuacagcgugcucuacaacuccacgagcuucuccaccuucaagugcuacggcgucagccccaccaagcugaacgaccugugcuucaccaacguguacgccgacuccuucgugaucacgggggacgagguccggcagaucgccccgggccagaccgggaagaucgccgacuacaacuacaagcuccccgacgacuucaccggcugcgugaucgccuggaacagcaagcacaucgacgcgaaggagggcgggaacuucaacuaccuguaccgccuguuccggaaggccaaccucaagcccuucgagcgcgacaucuccaccgagaucuaccaggccggcagcaagcccugcaacgggcagacgggccugaacugcuacuacccgcuguaccgguacggguucuaccccaccgacggcguggggcaccagcccuaccgcgucguggugcucuccuucgagcugcugaacgcccccgccaccgucugcggcccgaagaaguccaccaaccucgugaagaacaagugcgugaacuucaacuucaacggccugaccgggacgggcguccugaccgagagcaacaagaaguuccugcccuuccagcaguucgggcgggacaucgcggacaccaccgacgccgugcgcgacccccagacgcucgagauccuggacaucaccccgugcagcuucggcggggugagcgucaucacccccggcaccaacgccuccaaccagguggccgugcuguaccaggacgucaacugcacggaggugcccguggccauccacgcggaccagcucacccccaccuggcgcgucuacagcaccggcuccaacguguuccagacgcgggccgggugccugaucggcgccgagcacgugaacaacagcuacgagugcgacaucccgaucggggccggcaucugcgcguccuaccagacccagaccaacagccgcuccgucgccagccaguccaucaucgccuacaccaugagccugggcgccgagaacuccguggccuacagcaacaacuccaucgcgauccccacgaacuucaccaucagcgugaccaccgagauccuccccgucuccaugacgaagaccagcguggacugcaccauguacaucugcggggacuccaccgagugcagcaaccugcugcuccaguacggcagcuucugcacgcagcugaaccgggcccugaccgggaucgccguggagcaggacaagaacacccaggaggucuucgcccaggugaagcagaucuacaagacgcccccgaucaaggacuucggcggguucaacuucucccagauccuccccgaccccagcaagcccuccaagcgcagcuucaucgaggaccugcuguucaacaaggugacccucgccgacgcgggcuucaucaagcaguacggcgacugccugggggacaucgccgcccgggaccugaucugcgcccagaaguucaacggccucaccguccugccgccccugcucaccgacgagaugaucgcccaguacaccuccgcgcugcuggccgggacgaucaccagcggcuggaccuucggggccggcgccgcgcuccagauccccuucgccaugcagauggccuaccgcuucaacggcaucggggugacccagaacgugcuguacgagaaccagaagcugaucgccaaccaguucaacuccgccaucggcaagauccaggacagccucuccagcacggcguccgcccuggggaagcugcaggacgucgugaaccagaacgcccaggcccucaacacccuggugaagcagcugagcuccaacuucggcgccaucagcuccguccucaacgacauccugagccggcuggacaagguggaggcggaggugcagaucgaccgccucaucaccgggcggcugcagucccugcagaccuacgucacccagcagcucauccgcgccgccgagauccgggccagcgccaaccuggcggccacgaagauguccgagugcgugcugggccagagcaagcgcguggacuucugcggcaagggguaccaccucaugagcuucccccaguccgccccgcacggcgucguguuccugcacgugaccuacguccccgcccaggagaagaacuucaccaccgcgcccgccaucugccacgacgggaaggcccacuucccccgggagggcguguucgucagcaacgggacgcacugguucgugacccagcgcaacuucuacgagccgcagaucaucaccaccgacaacacguucguguccggcagcugcgacgucgugaucggcaucgugaacaacaccgucuacgacccccugcagcccgagcucgacuccuucaaggaggagcuggacaaguacuucaagaaccacaccagccccgacguggaccugggggacaucuccggcaucaacgccagcguggucaacauccagaaggagaucgaccggcucaacgagguggccaagaaccugaacgagucccugaucgaccuccaggagcuggggaaguacgagcaguacaucaaguggccgugguacaucuggcugggcuucaucgcgggccucaucgccaucaucauggugaccaucaugcugugcugcaugacgagcugcugcuccugccugaaggggugcugcagcugcggcuccugcugcaaguucgacgaggacgacagcgagcccguccucaagggggugaagcugcacuacaccuga

SEQ ID NO: 11733 - RNA, 3822 nt, Artificial Sequence
  SARS-CoV-2/Wuhan/HBCDC-HB-01/2019__EPI_ISL_402132 spike protein CDS gc (1-1273)
auguucguguuccugguccuccugccccuggugagcucccagugcgugaaccucaccacccgcacgcagcugccgcccgccuacaccaacagcaucacccggggcgucuacuaccccgacaagguguuccgcuccagcgugcugcacuccacccaggaccucuuccugcccuucuucagcaacgucacgugguuccacgccauccacguguccgggaccaacggcaccaagcgguucgacaacccggugcugcccuucaacgacggggucuacuucgcgagcaccgagaaguccaacaucauccgcggcuggaucuucgggacgacccucgacagcaagacccagucccugcugaucgugaacaacgccaccaacguggucaucaaggugugcgaguuccaguucugcaacgaccccuuccucggcguguacuaccacaagaacaacaagagcuggauggaguccgaguuccgggucuacagcuccgccaacaacugcacguucgaguacgugagccagcccuuccugauggaccuggagggcaagcaggggaacuucaagaaccuccgcgaguucguguucaagaacaucgacggcuacuucaagaucuacuccaagcacaccccgaucaaccugguccgggaccugccccagggguucagcgcccucgagccccugguggaccugcccaucggcaucaacaucacccgcuuccagacccuccuggcccugcaccgguccuaccucacgccgggggacagcagcuccggcuggaccgcgggcgccgccgccuacuacgugggguaccugcagccccgcaccuuccugcucaaguacaacgagaacggcaccaucacggacgcggucgacugcgcccuggacccccugagcgagaccaagugcacccucaaguccuucaccguggagaaggggaucuaccagacgagcaacuuccgggugcagcccaccgaguccaucguccgcuucccgaacaucaccaaccugugccccuucggcgagguguucaacgccacccgguucgccagcgucuacgccuggaaccgcaagcggaucuccaacugcguggcggacuacagcgugcuguacaacuccgccagcuucuccacguucaagugcuacggcgucagccccaccaagcucaacgaccugugcuucaccaacguguacgccgacuccuucgugauccgcggggacgagguccggcagaucgcccccggccagaccgggaagaucgccgacuacaacuacaagcugccggacgacuucacgggcugcgugaucgcguggaacagcaacaaccucgacuccaaggucgggggcaacuacaacuaccuguaccgccuguuccgcaagagcaaccucaagcccuucgagcgggacaucuccaccgagaucuaccaggccggcagcacccccugcaacgggguggagggcuucaacugcuacuucccccugcaguccuacggguuccagccgaccaacggcgugggguaccagcccuaccggguggucgugcugagcuucgagcuccugcacgcccccgccacggugugcggccccaagaaguccaccaaccuggucaagaacaagugcgugaacuucaacuucaacggccucaccgggaccggcgugcugaccgagagcaacaagaaguuccugccguuccagcaguucgggcgcgacaucgccgacacgaccgacgcgguccgcgacccccagacccuggagauccucgacaucacccccugcagcuucggcgggguguccgugaucacgccgggcaccaacaccagcaaccaggucgccgugcuguaccaggacgugaacugcaccgagguccccguggccauccacgccgaccagcugacgcccaccuggcggguguacuccaccggcagcaacgucuuccagacccgcgccgggugccucaucggcgcggagcacgugaacaacuccuacgagugcgacauccccaucggggccggcaucugcgccagcuaccagacgcagaccaacuccccgcggcgcgcccggagcguggcgucccagagcaucaucgccuacaccaugucccugggcgccgagaacagcgucgccuacuccaacaacagcaucgccauccccaccaacuucacgaucuccgugaccaccgagauccugcccgugagcaugaccaagacgagcgucgacugcaccauguacaucugcggggacuccaccgagugcagcaaccuccugcugcaguacggcuccuucugcacccagcucaaccgcgcgcugacggggaucgccguggagcaggacaagaacacccaggagguguucgcccaggucaagcagaucuacaagacgcccccgaucaaggacuucggcggguucaacuucagccagauccugcccgaccccuccaagcccagcaagcgguccuucaucgaggaccuccuguucaacaaggugacccuggccgacgccggcuucaucaagcaguacggcgacugccucggggacaucgcggcccgcgaccugaucugcgcccagaaguucaacggccugaccgugcucccgccccugcugaccgacgagaugaucgcccaguacaccagcgcccuccuggcggggaccaucacguccggcuggaccuucggggccggcgccgcccugcagauccccuucgcgaugcagauggccuaccgguucaacggcaucggggucacccagaacgugcucuacgagaaccagaagcugaucgccaaccaguucaacagcgccaucggcaagauccaggacucccugagcuccaccgccagcgcgcucgggaagcugcaggacguggucaaccagaacgcccaggcccugaacacgcucgugaagcagcuguccagcaacuucggcgccaucuccagcgugcugaacgacauccucucccgccuggacaaggucgaggccgaggugcagaucgaccggcugaucaccgggcgccuccagagccugcagaccuacgugacccagcagcugauccgggcggccgagauccgcgccagcgccaaccucgccgcgaccaagauguccgagugcguccugggccagagcaagcggguggacuucugcggcaagggguaccaccugauguccuucccccagagcgccccgcacggcguggucuuccuccacgugacguacguccccgcccaggagaagaacuucaccaccgcccccgcgaucugccacgacgggaaggcccacuucccccgcgagggcguguucguguccaacgggacccacugguucgucacgcagcggaacuucuacgagccgcagaucaucaccaccgacaacaccuucgugagcggcaacugcgacguggucaucggcaucgugaacaacacgguguacgacccccugcagcccgagcuggacuccuucaaggaggagcucgacaaguacuucaagaaccacaccagccccgacgucgaccugggggacaucuccggcaucaacgccagcguggugaacauccagaaggagaucgaccgccugaacgaggucgccaagaaccucaacgagucccugaucgaccugcaggagcucgggaaguacgagcaguacaucaaguggccgugguacaucuggcugggcuucaucgccggccugaucgcgaucgugauggugaccaucaugcucugcugcaugaccagcugcugcuccugccugaaggggugcugcagcugcggcuccugcugcaaguucgacgaggacgacagcgagcccguccugaagggggugaagcuccacuacacguga

SEQ ID NO: 11734 - RNA, 3822 nt, Artificial Sequence
  SARS-CoV-2/Guangdong/20SF028/2020__EPI_ISL_403936 spike protein CDS gc (1-1273)
auguucguguuccugguccuccugccccuggugagcucccagugcgugaaccucaccacccgcacgcagcugccgcccgccuacaccaacagcuucacccggggcgucuacuaccccgacaagguguuccgcuccagcgugcuguacuccacccaggaccucuuccugcccuucuucagcaacgucacgugguuccacgccauccacguguccgggaccaacggcaccaagcgguucgacaacccggugcugcccuucaacgacggggucuacuucgcgagcaccgagaaguccaacaucauccgcggcuggaucuucgggacgacccucgacagcaagacccagucccugcugaucgugaacaacgccaccaacguggucaucaaggugugcgaguuccaguucugcaacgaccccuuccucggcguguacuaccacaagaacaacaagagcuggauggaguccgaguuccgggucuacagcuccgccaacaacugcacguucgaguacgugagccagcccuuccugauggaccuggagggcaagcaggggaacuucaagaaccuccgcgaguucguguucaagaacaucgacggcuacuucaagaucuacuccaagcacaccccgaucaaccugguccgggaccugccccagggguucagcgcccucgagccccugguggaccugcccaucggcaucaacaucacccgcuuccagacccuccuggcccugcaccgguccuaccucacgccgggggacagcagcuccggcuggaccgcgggcgccgccgccuacuacgugggguaccugcagccccgcaccuuccugcucaaguacaacgagaacggcaccaucacggacgcggucgacugcgcccuggacccccugagcgagaccaagugcacccucaaguccuucaccguggagaaggggaucuaccagacgagcaacuuccgggugcagcccaccgaguccaucguccgcuucccgaacaucaccaaccugugccccuucggcgagguguucaacgccacccgguucgccagcgucuacgccuggaaccgcaagcggaucuccaacugcguggcggacuacagcgugcuguacaacuccgccagcuucuccacguucaagugcuacggcgucagccccaccaagcucaacgaccugugcuucaccaacguguacgccgacuccuucgugauccgcggggacgagguccggcagaucgcccccggccagaccgggaagaucgccgacuacaacuacaagcugccggacgacuucacgggcugcgugaucgcguggaacagcaacaaccucgacuccaaggucgggggcaacuacaacuaccuguaccgccuguuccgcaagagcaaccucaagcccuucgagcgggacaucuccaccgagaucuaccaggccggcagcacccccugcaacgggguggagggcuucaacugcuacuucccccugcaguccuacggguuccagccgaccaacggcgugggguaccagcccuaccggguggucgugcugagcuucgagcuccugcacgcccccgccacggugugcggccccaagaaguccaccaaccuggucaagaacaagugcgugaacuucaacuucaacggccucaccgggaccggcgugcugaccgagagcaacaagaaguuccugccguuccagcaguucgggcgcgacaucgccgacacgaccgacgcgguccgcgacccccagacccuggagauccucgacaucacccccugcagcuucggcgggguguccgugaucacgccgggcaccaacaccagcaaccaggucgccgugcuguaccaggacgugaacugcaccgagguccccguggccauccacgccgaccagcugacgcccaccuggcggguguacuccaccggcagcaacgucuuccagacccgcgccgggugccucaucggcgcggagcacgugaacaacuccuacgagugcgacauccccaucggggccggcaucugcgccagcuaccagacgcagaccaacuccccgcggcgcgcccggagcguggcgucccagagcaucaucgccuacaccaugucccugggcgccgagaacagcgucgccuacuccaacaacagcaucgccauccccaccaacuucacgaucuccgugaccaccgagauccugcccgugagcaugaccaagacgagcgucgacugcaccauguacaucugcggggacuccaccgagugcagcaaccuccugcugcaguacggcuccuucugcacccagcucaaccgcgcgcugacggggaucgccguggagcaggacaagaacacccaggagguguucgcccaggucaagcagaucuacaagacgcccccgaucaaggacuucggcggguucaacuucagccagauccugcccgaccccuccaagcccagcaagcgguccuucaucgaggaccuccuguucaacaaggugacccuggccgacgccggcuucaucaagcaguacggcgacugccucggggacaucgcggcccgcgaccugaucugcgcccagaaguucaacggccugaccgugcucccgccccugcugaccgacgagaugaucgcccaguacaccagcgcccuccuggcggggaccaucacguccggcuggaccuucggggccggcgccgcccugcagauccccuucgcgaugcagauggccuaccgguucaacggcaucggggucacccagaacgugcucuacgagaaccagaagcugaucgccaaccaguucaacagcgccaucggcaagauccaggacucccugagcuccaccgccagcgcgcucgggaagcugcaggacguggucaaccagaacgcccaggcccugaacacgcucgugaagcagcuguccagcaacuucggcgccaucuccagcgugcugaacgacauccucucccgccuggacaaggucgaggccgaggugcagaucgaccggcugaucaccgggcgccuccagagccugcagaccuacgugacccagcagcugauccgggcggccgagauccgcgccagcgccaaccucgccgcgaccaagauguccgagugcguccugggccagagcaagcggguggacuucugcggcaagggguaccaccugauguccuucccccagagcgccccgcacggcguggucuuccuccacgugacguacguccccgcccaggagaagaacuucaccaccgcccccgcgaucugccacgacgggaaggcccacuucccccgcgagggcguguucguguccaacgggacccacugguucgucacgcagcggaacuucuacgagccgcagaucaucaccaccgacaacaccuucgugagcggcaacugcgacguggucaucggcaucgugaacaacacgguguacgacccccugcagcccgagcuggacuccuucaaggaggagcucgacaaguacuucaagaaccacaccagccccgacgucgaccugggggacaucuccggcaucaacgccagcguggugaacauccagaaggagaucgaccgccugaacgaggucgccaagaaccucaacgagucccugaucgaccugcaggagcucgggaaguacgagcaguacaucaaguggccgugguacaucuggcugggcuucaucgccggccugaucgcgaucgugauggugaccaucaugcucugcugcaugaccagcugcugcuccugccugaaggggugcugcagcugcggcuccugcugcaaguucgacgaggacgacagcgagcccguccugaagggggugaagcuccacuacacguga

SEQ ID NO: 11735 - RNA, 3822 nt, Artificial Sequence
  SARS-CoV-2/Shenzhen/SZTH-001/2020__EPI_ISL_406592 spike protein CDS gc (1-1273)
auguucguguuccugguccuccugccccuggugagcucccagugcgugaaccucaccacccgcacgcagcugccgcccgccuacaccaacagcuucacccggggcgucuacuaccccgacaagguguuccgcuccagcgugcugcacuccacccaggaccucuuccugcccuucuucagcaacgucacgugguuccacgccauccacguguccgggaccaacggcaccaagcgguucgacaacccggugcugcccuucaacgacggggucuacuucgcgagcaccgagaaguccaacaucauccgcggcuggaucuucgggacgacccucgacagcaagacccagucccugcugaucgugaacaacgccaccaacguggucaucaaggugugcgaguuccaguucugcaacgaccccuuccucggcguguacuaccacaagaacaacaagagcuggauggaguccgaguuccgggucuacagcuccgccaacaacugcacguucgaguacgugagccagcccuuccugauggaccuggagggcaagcaggggaacuucaagaaccuccgcgaguucguguucaagaacaucgacggcuacuucaagaucuacuccaagcacaccccgaucaaccugguccgggaccugccccagggguucagcgcccucgagccccugguggaccugcccaucggcaucaacaucacccgcuuccagacccuccuggcccugcaccgguccuaccucacgccgggggacagcagcuccggcuggaccgcgggcgccgccgccuacuacgugggguaccugcagccccgcaccuuccugcucaaguacaacgagaacggcaccaucacggacgcggucgacugcgcccuggacccccugagcgagaccaagugcacccucaaguccuucaccguggagaaggggaucuaccagacgagcaacuuccgggugcagcccaccgaguccaucguccgcuucccgaacaucaccaaccugugccccuucggcgagguguucaacgccacccgguucgccagcgucuacgccuggaaccgcaagcggaucuccaacugcguggcggacuacagcgugcuguacaacuccgccagcuucuccacguucaagugcuacggcgucagccccaccaagcucaacgaccugugcuucaccaacguguacgccgacuccuucgugauccgcggggacgagguccggcagaucgcccccggccagaccgggaagaucgccgacuacaacuacaagcugccggacgacuucacgggcugcgugaucgcguggaacagcaacaaccucgacuccaaggucgggggcaacuacaacuaccuguaccgccuguuccgcaagagcaaccucaagcccuucgagcgggacaucuccaccgagaucuaccaggccggcagcacccccugcaacgggguggagggcuucaacugcuacuucccccugcaguccuacggguuccagccgaccaacggcgugggguaccagcccuaccggguggucgugcugagcuucgagcuccugcacgcccccgccacggugugcggccccaagaaguccaccaaccuggucaagaacaagugcgugaacuucaacuucaacggccucaccgggaccggcgugcugaccgagagcaacaagaaguuccugccguuccagcaguucgggcgcgacaucgccgacacgaccgacgcgguccgcgacccccagacccuggagauccucgacaucacccccugcagcuucggcgggguguccgugaucacgccgggcaccaacaccagcaaccaggucgccgugcuguaccaggacgugaacugcaccgagguccccguggccauccacgccgaccagcugacgcccaccuggcggguguacuccaccggcagcaacgucuuccagacccgcgccgggugccucaucggcgcggagcacgugaacaacuccuacgagugcgacauccccaucggggccggcaucugcgccagcuaccagacgcagaccaacuccccgcggcgcgcccggagcguggcgucccagagcaucaucgccuacaccaugucccugggcgccgagaacagcgucgccuacuccaacaacagcaucgccauccccaccaacuucacgaucuccgugaccaccgagauccugcccgugagcaugaccaagacgagcgucgacugcaccauguacaucugcggggacuccaccgagugcagcaaccuccugcugcaguacggcuccuucugcacccagcucaaccgcgcgcugacggggaucgccguggagcaggacaagaacacccaggagguguucgcccaggucaagcagaucuacaagacgcccccgaucaaggacuucggcggguucaacuucagccagauccugcccgaccccuccaagcccagcaagcgguccuucaucgaggaccuccuguucaacaaggugacccuggccgacgccggcuucaucaagcaguacggcgacugccucggggacaucgcggcccgcgaccugaucugcgcccagaaguucaacggccugaccgugcucccgccccugcugaccgacgagaugaucgcccaguacaccagcgcccuccuggcggggaccaucacguccggcuggaccuucggggccggcgccgcccugcagauccccuucgcgaugcagauggccuaccgguucaacggcaucggggucacccagaacgugcucuacgagaaccagaagcugaucgccaaccaguucaacagcgccaucggcaagauccaggacucccugagcuccaccgccagcgcgcucgggaagcugcaggacguggucaaccagaacgcccaggcccugaacacgcucgugaagcagcuguccagcaacuucggcgccaucuccagcgugcugaacgacauccucucccgccuggacaaggucgaggccgaggugcagaucgaccggcugaucaccgggcgccuccagagccugcagaccuacgugacccagcagcugauccgggcggccgagauccgcgccagcgccaaccucgccgcgaccaagauguccgagugcguccugggccagagcaagcggguggacuucugcggcaagggguaccaccugauguccuucccccagagcgccccgcacggcguggucuuccuccacgugacguacguccccgcccaggagaagaacuucaccaccgcccccgcgaucugccacgacgggaaggcccacuucccccgcgagggcguguucguguccaacgggacccacugguucgucacgcagcggaacuucuacgagccgcagaucaucaccaccgacaacaccuucgugagcggcaacugcgacgugcugaucggcaucgucaacaacacgguguacgacccccugcagcccgagcucgacuccuucaaggaggagcuggacaaguacuucaagaaccacaccagccccgacguggaccugggggacaucuccggcaucaacgccagcgucgugaacauccagaaggagaucgaccgccucaacgagguggccaagaaccugaacgagucccugaucgaccuccaggagcuggggaaguacgagcaguacaucaaguggccgugguacaucuggcugggcuucaucgccggccucaucgcgaucgucauggugaccaucaugcugugcugcaugaccagcugcugcuccugccugaaggggugcugcagcugcggcuccugcugcaaguucgacgaggacgacagcgggcccgugcucaagggcgucaagcugcacuacacguga

SEQ ID NO: 11736 - RNA, 3822 nt, Artificial Sequence
  SARS-CoV-2/Shenzhen/SZTH-004/2020__EPI_ISL_406595 spike protein CDS gc (1-1273)
auguucguguuccugguccuccugccccuggugagcucccagugcgugaaccucaccacccgcacgcagcugccgcccgccuacaccaacagcuucacccggggcgucuacuaccccgacaagguguuccgcuccagcgugcugcacuccacccaggaccucuuccugcccuucuucagcaacgucacgugguuccacgccauccacguguccgggaccaacggcaccaagcgguucgacaacccggugcugcccuucaacgacggggucuacuucgcgagcaccgagaaguccaacaucauccgcggcuggaucuucgggacgacccucgacagcaagacccagucccugcugaucgugaacaacgccaccaacguggucaucaaggugugcgaguuccaguucugcaacgaccccuuccucggcguguacuaccacaagaacaacaagagcuggauggaguccgaguuccgggucuacagcuccgccaacaacugcacguucgaguacgugagccagcccuuccugauggaccuggagggcaagcaggggaacuucaagaaccuccgcgaguucguguucaagaacaucgacggcuacuucaagaucuacuccaagcacaccccgaucaaccugguccgggaccugccccagggguucagcgcccucgagccccugguggaccugcccaucggcaucaacaucacccgcuuccagacccuccuggcccugcaccgguccuaccucacgccgggggacagcagcuccggcuggaccgcgggcgccgccgccuacuacgugggguaccugcagccccgcaccuuccugcucaaguacaacgagaacggcaccaucacggacgcggucgacugcgcccuggacccccugagcgagaccaagugcacccucaaguccuucaccguggagaaggggaucuaccagacgagcaacuuccgggugcagcccaccgaguccaucguccgcuucccgaacaucaccaaccugugccccuucggcgagguguucaacgccacccgguucgccagcgucuacgccugggaccgcaagcggaucuccaacugcguggcguacuacagcgugcuguacaacuccgccagcuucuccacguucaagugcuacggcgucagccccaccaagcucaacgaccugugcuucaccaacguguacgccgacuccuucgugauccgcggggacgagguccggcagaucgcccccggccagaccgggaagaucgccgacuacaacuacaagcugccggacgacuucacgggcugcgugaucgcguggaacagcaacaaccucgacuccaaggucgggggcaacuacaacuaccuguaccgccuguuccgcaagagcaaccucaagcccuucgagcgggacaucuccaccgagaucuaccaggccggcagcacccccugcaacgggguggagggcuucaacugcuacuucccccugcaguccuacggguuccagccgaccaacggcgugggguaccagcccuaccggguggucgugcugagcuucgagcuccugcacgcccccgccacggugugcggccccaagaaguccaccaaccuggucaagaacaagugcgugaacuucaacuucaacggccucaccgggaccggcgugcugaccgagagcaacaagaaguuccugccguuccagcaguucgggcgcgacaucgccgacacgaccgacgcgguccgcgacccccagacccuggagauccucgacaucacccccugcagcuucggcgggguguccgugaucacgccgggcaccaacaccagcaaccaggucgccgugcuguaccaggacgugaacugcaccgagguccccguggccauccacgccgaccagcugacgcccaccuggcggguguacuccaccggcagcaacgucuuccagacccgcgccgggugccucaucggcgcggagcacgugaacaacuccuacgagugcgacauccccaucggggccggcaucugcgccagcuaccagacgcagaccaacuccccgcggcgcgcccggagcguggcgucccagagcaucaucgccuacaccaugucccugggcgccgagaacagcgucgccuacuccaacaacagcaucgccauccccaccaacuucacgaucuccgugaccaccgagauccugcccgugagcaugaccaagacgagcgucgacugcaccauguacaucugcggggacuccaccgagugcagcaaccuccugcugcaguacggcuccuucugcacccagcucaaccgcgcgcugacggggaucgccguggagcaggacaagaacacccaggagguguucgcccaggucaagcagaucuacaagacgcccccgaucaaggacuucggcggguucaacuucagccagauccugcccgaccccuccaagcccagcaagcgguccuucaucgaggaccuccuguucaacaaggugacccuggccgacgccggcuucaucaagcaguacggcgacugccucggggacaucgcggcccgcgaccugaucugcgcccagaaguucaacggccugaccgugcucccgccccugcugaccgacgagaugaucgcccaguacaccagcgcccuccuggcggggaccaucacguccggcuggaccuucggggccggcgccgcccugcagauccccuucgcgaugcagauggccuaccgguucaacggcaucggggucacccagaacgugcucuacgagaaccagaagcugaucgccaaccaguucaacagcgccaucggcaagauccaggacucccugagcuccaccgccagcgcgcucgggaagcugcaggacguggucaaccagaacgcccaggcccugaacacgcucgugaagcagcuguccagcaacuucggcgccaucuccagcgugcugaacgacauccucucccgccuggacaaggucgaggccgaggugcagaucgaccggcugaucaccgggcgccuccagagccugcagaccuacgugacccagcagcugauccgggcggccgagauccgcgccagcgccaaccucgccgcgaccaagauguccgagugcguccugggccagagcaagcggguggacuucugcggcaagggguaccaccugauguccuucccccagagcgccccgcacggcguggucuuccuccacgugacguacguccccgcccaggagaagaacuucaccaccgcccccgcgaucugccacgacgggaaggcccacuucccccgcgagggcguguucguguccaacgggacccacugguucgucacgcagcggaacuucuacgagccgcagaucaucaccaccgacaacaccuucgugagcggcaacugcgacguggucaucggcaucgugaacaacacgguguacgacccccugcagcccgagcuggacuccuucaaggaggagcucgacaaguacuucaagaaccacaccagccccgacgucgaccugggggacaucuccggcaucaacgccagcguggugaacauccagaaggagaucgaccgccugaacgaggucgccaagaaccucaacgagucccugaucgaccugcaggagcucgggaaguacgagcaguacaucaaguggccgugguacaucuggcugggcuucaucgccggccugaucgcgaucgugauggugaccaucaugcucugcugcaugaccagcugcugcuccugccugaaggggugcugcagcugcggcuccugcugcaaguucgacgaggacgacagcgagcccguccugaagggggugaagcuccacuacacguga

SEQ ID NO: 11737 - RNA, 3822 nt, Artificial Sequence
  SARS-CoV-2/France/IDF0372/2020__EPI_ISL_406596 spike protein CDS gc (1-1273)
auguucguguuccugguccuccugccccuggugagcucccagugcgugaaccucaccacccgcacgcagcugccgcccgccuacaccaacagcuucacccggggcgucuacuaccccgacaagguguuccgcuccagcgugcugcacuccacccaggaccucuuccugcccuucuucagcaacgucacgugguuccacgccauccacguguccgggaccaacggcaccaagcgguucgacaacccggugcugcccuucaacgacggggucuacuucgcgagcaccgagaaguccaacaucauccgcggcuggaucuucgggacgacccucgacagcaagacccagucccugcugaucgugaacaacgccaccaacguggucaucaaggugugcgaguuccaguucugcaacgaccccuuccucggcguguacuaccacaagaacaacaagagcuggauggaguccgaguuccgggucuacagcuccgccaacaacugcacguucgaguacgugagccagcccuuccugauggaccuggagggcaagcaggggaacuucaagaaccuccgcgaguucguguucaagaacaucgacggcuacuucaagaucuacuccaagcacaccccgaucaaccugguccgggaccugccccagggguucagcgcccucgagccccugguggaccugcccaucggcaucaacaucacccgcuuccagacccuccuggcccugcaccgguccuaccucacgccgggggacagcagcuccggcuggaccgcgggcgccgccgccuacuacgugggguaccugcagccccgcaccuuccugcucaaguacaacgagaacggcaccaucacggacgcggucgacugcgcccuggacccccugagcgagaccaagugcacccucaaguccuucaccguggagaaggggaucuaccagacgagcaacuuccgggugcagcccaccgaguccaucguccgcuucccgaacaucaccaaccugugccccuucggcgagguguucaacgccacccgguucgccagcgucuacgccuggaaccgcaagcggaucuccaacugcguggcggacuacagcuuccuguacaacuccgccagcuucuccacguucaagugcuacggcgugagccccaccaagcucaacgaccugugcuucaccaacgucuacgccgacuccuucgugauccgcggggacgaggugcggcagaucgcccccggccagaccgggaagaucgccgacuacaacuacaagcugccggacgacuucacgggcugcgucaucgcguggaacagcaacaaccucgacuccaaggucgggggcaacuacaacuaccuguaccgccuguuccgcaagagcaaccucaagcccuucgagcgggacaucuccaccgagaucuaccaggccggcagcacccccugcaacgggguggagggcuucaacugcuacuucccccugcaguccuacggguuccagccgaccaacggcgugggguaccagcccuaccggguggugguccugagcuucgagcuccugcacgcccccgccacggugugcggccccaagaaguccaccaaccuggugaagaacaagugcgucaacuucaacuucaacggccucaccgggaccggcgugcugaccgagagcaacaagaaguuccugccguuccagcaguucgggcgcgacaucgccgacacgaccgacgcggugcgcgacccccagacccuggagauccucgacaucacccccugcagcuucggcggggucuccgugaucacgccgggcaccaacaccagcaaccagguggccguccuguaccaggacgugaacugcaccgaggugcccgucgccauccacgccgaccagcugacgcccaccuggcggguguacuccaccggcagcaacguguuccagacccgcgccgggugccucaucggcgcggagcacgucaacaacuccuacgagugcgacauccccaucggggccggcaucugcgccagcuaccagacgcagaccaacuccccgcggcgcgcccggagcguggcgucccagagcaucaucgccuacaccaugucccugggcgccgagaacagcguggccuacuccaacaacagcaucgccauccccaccaacuucacgaucuccgucaccaccgagauccugcccgugagcaugaccaagacgagcguggacugcaccauguacaucugcggggacuccaccgagugcagcaaccuccugcugcaguacggcuccuucugcacccagcucaaccgcgcgcugacggggaucgccgucgagcaggacaagaacacccaggagguguucgcccaggugaagcagaucuacaagacgcccccgaucaaggacuucggcggguucaacuucagccagauccugcccgaccccuccaagcccagcaagcgguccuucaucgaggaccuccuguucaacaaggucacccuggccgacgccggcuucaucaagcaguacggcgacugccucggggacaucgcggcccgcgaccugaucugcgcccagaaguucaacggccugaccgugcucccgccccugcugaccgacgagaugaucgcccaguacaccagcgcccuccuggcggggaccaucacguccggcuggaccuucggggccggcgccgcccugcagauccccuucgcgaugcagauggccuaccgguucaacggcaucggggugacccagaacguccucuacgagaaccagaagcugaucgccaaccaguucaacagcgccaucggcaagauccaggacucccugagcuccaccgccagcgcgcucgggaagcugcaggacguggugaaccagaacgcccaggcccugaacacgcucgucaagcagcuguccagcaacuucggcgccaucuccagcgugcugaacgacauccucucccgccuggacaagguggaggccgagguccagaucgaccggcugaucaccgggcgccuccagagccugcagaccuacgugacccagcagcugauccgggcggccgagauccgcgccagcgccaaccucgccgcgaccaagauguccgagugcgugcugggccagagcaagcgggucgacuucugcggcaagggguaccaccugauguccuucccccagagcgccccgcacggcgugguguuccuccacgucacguacgugcccgcccaggagaagaacuucaccaccgcccccgcgaucugccacgacgggaaggcccacuucccccgcgagggcgucuucguguccaacgggacccacugguucgugacgcagcggaacuucuacgagccgcagaucaucaccaccgacaacaccuucgucagcggcaacugcgacguggugaucggcaucgucaacaacacgguguacgacccccugcagcccgagcuggacuccuucaaggaggagcucgacaaguacuucaagaaccacaccagccccgacguggaccugggggacaucuccggcaucaacgccagcgucgugaacauccagaaggagaucgaccgccugaacgagguggccaagaaccucaacgagucccugaucgaccugcaggagcucgggaaguacgagcaguacaucaaguggccgugguacaucuggcugggcuucaucgccggccugaucgcgaucgucauggugaccaucaugcucugcugcaugaccagcugcugcuccugccugaaggggugcugcagcugcggcuccugcugcaaguucgacgaggacgacagcgagcccgugcugaagggggucaagcuccacuacacguga

SEQ ID NO: 11738 - RNA, 3822 nt, Artificial Sequence
  SARS-CoV-2/Australia/VIC01/2020__EPI_ISL_406844 spike protein CDS gc (1-1273)
auguucguguuccugguccuccugccccuggugagcucccagugcgugaaccucaccacccgcacgcagcugccgcccgccuacaccaacagcuucacccggggcgucuacuaccccgacaagguguuccgcuccagcgugcugcacuccacccaggaccucuuccugcccuucuucagcaacgucacgugguuccacgccauccacguguccgggaccaacggcaccaagcgguucgacaacccggugcugcccuucaacgacggggucuacuucgcgagcaccgagaaguccaacaucauccgcggcuggaucuucgggacgacccucgacagcaagacccagucccugcugaucgugaacaacgccaccaacguggucaucaaggugugcgaguuccaguucugcaacgaccccuuccucggcguguacuaccacaagaacaacaagagcuggauggaguccgaguuccgggucuacagcuccgccaacaacugcacguucgaguacgugagccagcccuuccugauggaccuggagggcaagcaggggaacuucaagaaccuccgcgaguucguguucaagaacaucgacggcuacuucaagaucuacuccaagcacaccccgaucaaccugguccgggaccugccccagggguucagcgcccucgagccccugguggaccugcccaucggcaucaacaucacccgcuuccagacccuccuggcccugcaccggcgcuaccucacgccgggggacuccagcagcggcuggaccgcgggcgccgccgccuacuacgugggguaccugcagccccggaccuuccugcucaaguacaacgagaacggcaccaucacggacgcggucgacugcgcccuggacccccuguccgagaccaagugcacccucaagagcuucaccguggagaaggggaucuaccagacguccaacuuccgcgugcagcccaccgagagcaucguccgguucccgaacaucaccaaccugugccccuucggcgagguguucaacgccacccgcuucgccuccgucuacgccuggaaccggaagcgcaucagcaacugcguggcggacuacuccgugcuguacaacagcgccuccuucagcacguucaagugcuacggcgucucccccaccaagcucaacgaccugugcuucaccaacguguacgccgacagcuucgugauccgcggggacgagguccggcagaucgcccccggccagaccgggaagaucgccgacuacaacuacaagcugccggacgacuucacgggcugcgugaucgcguggaacuccaacaaccucgacagcaaggucgggggcaacuacaacuaccuguaccggcuguuccgcaaguccaaccucaagcccuucgagcgggacaucagcaccgagaucuaccaggccggcuccacccccugcaacgggguggagggcuucaacugcuacuucccccugcagagcuacggguuccagccgaccaacggcgugggguaccagcccuaccgcguggucgugcuguccuucgagcuccugcacgcccccgccacggugugcggccccaagaaguccaccaaccuggucaagaacaagugcgugaacuucaacuucaacggccucaccgggaccggcgugcugaccgagagcaacaagaaguuccugccguuccagcaguucgggcgcgacaucgccgacacgaccgacgcgguccgggacccccagacccuggagauccucgacaucacccccugcagcuucggcggggugagcgugaucacgccgggcaccaacaccuccaaccaggucgccgugcuguaccaggacgugaacugcaccgagguccccguggccauccacgccgaccagcugacgcccaccuggcgcguguacagcaccggcuccaacgucuuccagacccgggccgggugccucaucggcgcggagcacgugaacaacagcuacgagugcgacauccccaucggggccggcaucugcgccuccuaccagacgcagaccaacagcccgcgccgggcccgcuccguggcgagccaguccaucaucgccuacaccaugagccugggcgccgagaacuccgucgccuacagcaacaacuccaucgccauccccaccaacuucacgaucagcgugaccaccgagauccugcccguguccaugaccaagacgagcgucgacugcaccauguacaucugcggggacagcaccgagugcuccaaccuccugcugcaguacggcagcuucugcacccagcucaaccgggcgcugacggggaucgccguggagcaggacaagaacacccaggagguguucgcccaggucaagcagaucuacaagacgcccccgaucaaggacuucggcggguucaacuucucccagauccugcccgaccccagcaagcccuccaagcgcagcuucaucgaggaccuccuguucaacaaggugacccuggccgacgccggcuucaucaagcaguacggcgacugccucggggacaucgcggcccgggaccugaucugcgcccagaaguucaacggccugaccgugcucccgccccugcugaccgacgagaugaucgcccaguacaccuccgcccuccuggcggggaccaucacgagcggcuggaccuucggggccggcgccgcccugcagauccccuucgcgaugcagauggccuaccgcuucaacggcaucggggucacccagaacgugcucuacgagaaccagaagcugaucgccaaccaguucaacuccgccaucggcaagauccaggacagccuguccagcaccgccuccgcgcucgggaagcugcaggacguggucaaccagaacgcccaggcccugaacacgcucgugaagcagcugagcuccaacuucggcgccaucagcuccgugcugaacgacauccucagccggcuggacaaggucgaggccgaggugcagaucgaccgccugaucaccgggcggcuccagucccugcagaccuacgugacccagcagcugauccgcgcggccgagauccgggccagcgccaaccucgccgcgaccaagaugagcgagugcguccugggccaguccaagcgcguggacuucugcggcaagggguaccaccugaugagcuucccccaguccgccccgcacggcguggucuuccuccacgugacguacguccccgcccaggagaagaacuucaccaccgcccccgcgaucugccacgacgggaaggcccacuucccccgggagggcguguucgugagcaacgggacccacugguucgucacgcagcgcaacuucuacgagccgcagaucaucaccaccgacaacaccuucguguccggcaacugcgacguggucaucggcaucgugaacaacacgguguacgacccccugcagcccgagcuggacagcuucaaggaggagcucgacaaguacuucaagaaccacaccucccccgacgucgaccugggggacaucagcggcaucaacgccuccguggugaacauccagaaggagaucgaccggcugaacgaggucgccaagaaccucaacgagagccugaucgaccugcaggagcucgggaaguacgagcaguacaucaaguggccgugguacaucuggcugggcuucaucgccggccugaucgcgaucgugauggugaccaucaugcucugcugcaugaccuccugcugcagcugccugaaggggugcugcuccugcggcagcugcugcaaguucgacgaggacgacuccgagcccguccugaagggggugaagcuccacuacacguga

SEQ ID NO: 11739 - RNA, 3822 nt, Artificial Sequence
  SARS-CoV-2/Germany/BavPat1/2020__EPI_ISL_406862 spike protein CDS gc (1-1273)
auguucguguuccugguccuccugccccuggugagcucccagugcgugaaccucaccacccgcacgcagcugccgcccgccuacaccaacagcuucacccggggcgucuacuaccccgacaagguguuccgcuccagcgugcugcacuccacccaggaccucuuccugcccuucuucagcaacgucacgugguuccacgccauccacguguccgggaccaacggcaccaagcgguucgacaacccggugcugcccuucaacgacggggucuacuucgcgagcaccgagaaguccaacaucauccgcggcuggaucuucgggacgacccucgacagcaagacccagucccugcugaucgugaacaacgccaccaacguggucaucaaggugugcgaguuccaguucugcaacgaccccuuccucggcguguacuaccacaagaacaacaagagcuggauggaguccgaguuccgggucuacagcuccgccaacaacugcacguucgaguacgugagccagcccuuccugauggaccuggagggcaagcaggggaacuucaagaaccuccgcgaguucguguucaagaacaucgacggcuacuucaagaucuacuccaagcacaccccgaucaaccugguccgggaccugccccagggguucagcgcccucgagccccugguggaccugcccaucggcaucaacaucacccgcuuccagacccuccuggcccugcaccgguccuaccucacgccgggggacagcagcuccggcuggaccgcgggcgccgccgccuacuacgugggguaccugcagccccgcaccuuccugcucaaguacaacgagaacggcaccaucacggacgcggucgacugcgcccuggacccccugagcgagaccaagugcacccucaaguccuucaccguggagaaggggaucuaccagacgagcaacuuccgggugcagcccaccgaguccaucguccgcuucccgaacaucaccaaccugugccccuucggcgagguguucaacgccacccgguucgccagcgucuacgccuggaaccgcaagcggaucuccaacugcguggcggacuacagcgugcuguacaacuccgccagcuucuccacguucaagugcuacggcgucagccccaccaagcucaacgaccugugcuucaccaacguguacgccgacuccuucgugauccgcggggacgagguccggcagaucgcccccggccagaccgggaagaucgccgacuacaacuacaagcugccggacgacuucacgggcugcgugaucgcguggaacagcaacaaccucgacuccaaggucgggggcaacuacaacuaccuguaccgccuguuccgcaagagcaaccucaagcccuucgagcgggacaucuccaccgagaucuaccaggccggcagcacccccugcaacgggguggagggcuucaacugcuacuucccccugcaguccuacggguuccagccgaccaacggcgugggguaccagcccuaccggguggucgugcugagcuucgagcuccugcacgcccccgccacggugugcggccccaagaaguccaccaaccuggucaagaacaagugcgugaacuucaacuucaacggccucaccgggaccggcgugcugaccgagagcaacaagaaguuccugccguuccagcaguucgggcgcgacaucgccgacacgaccgacgcgguccgcgacccccagacccuggagauccucgacaucacccccugcagcuucggcgggguguccgugaucacgccgggcaccaacaccagcaaccaggucgccgugcuguaccagggcgugaacugcaccgagguccccguggccauccacgccgaccagcugacgcccaccuggcggguguacuccaccgggagcaacgucuuccagacccgcgccggcugccucaucggggcggagcacgugaacaacuccuacgagugcgacauccccaucggcgccggcaucugcgccagcuaccagacgcagaccaacuccccgcggcgcgcccggagcguggcgucccagagcaucaucgccuacaccaugucccugggggccgagaacagcgucgccuacuccaacaacagcaucgccauccccaccaacuucacgaucuccgugaccaccgagauccugcccgugagcaugaccaagacgagcgucgacugcaccauguacaucugcggcgacuccaccgagugcagcaaccuccugcugcaguacggguccuucugcacccagcucaaccgcgcgcugacgggcaucgccguggagcaggacaagaacacccaggagguguucgcccaggucaagcagaucuacaagacgcccccgaucaaggacuucgggggcuucaacuucagccagauccugcccgaccccuccaagcccagcaagcgguccuucaucgaggaccuccuguucaacaaggugacccuggccgacgccggcuucaucaagcaguacggggacugccucggcgacaucgcggcccgcgaccugaucugcgcccagaaguucaacgggcugaccgugcucccgccccugcugaccgacgagaugaucgcccaguacaccagcgcccuccuggcgggcaccaucacguccggguggaccuucggcgccggcgccgcccugcagauccccuucgcgaugcagauggccuaccgguucaacgggaucggcgucacccagaacgugcucuacgagaaccagaagcugaucgccaaccaguucaacagcgccaucgggaagauccaggacucccugagcuccaccgccagcgcgcucggcaagcugcaggacguggucaaccagaacgcccaggcccugaacacgcucgugaagcagcuguccagcaacuucggggccaucuccagcgugcugaacgacauccucucccgccuggacaaggucgaggccgaggugcagaucgaccggcugaucaccggccgccuccagagccugcagaccuacgugacccagcagcugauccgggcggccgagauccgcgccagcgccaaccucgccgcgaccaagauguccgagugcguccugggccagagcaagcggguggacuucugcgggaagggcuaccaccugauguccuucccccagagcgccccgcacgggguggucuuccuccacgugacguacguccccgcccaggagaagaacuucaccaccgcccccgcgaucugccacgacggcaaggcccacuucccccgcgaggggguguucguguccaacggcacccacugguucgucacgcagcggaacuucuacgagccgcagaucaucaccaccgacaacaccuucgugagcggcaacugcgacguggucaucgggaucgugaacaacacgguguacgacccccugcagcccgagcuggacuccuucaaggaggagcucgacaaguacuucaagaaccacaccagccccgacgucgaccugggcgacaucuccgggaucaacgccagcguggugaacauccagaaggagaucgaccgccugaacgaggucgccaagaaccucaacgagucccugaucgaccugcaggagcucggcaaguacgagcaguacaucaaguggccgugguacaucuggcugggcuucaucgccgggcugaucgcgaucgugauggugaccaucaugcucugcugcaugaccagcugcugcuccugccugaagggcugcugcagcugcggguccugcugcaaguucgacgaggacgacagcgagcccguccugaagggcgugaagcuccacuacacguga

SEQ ID NO: 11740 - RNA, 3822 nt, Artificial Sequence
  SARS-CoV-2/Wuhan/HBCDC-HB-02/2020__EPI_ISL_412978 spike protein CDS gc (1-1273)
auguucguguuccugguccuccugccccuggugagcucccagugcgugaaccucaccacccgcacgcagcugccgcccgccuacaccaacagcuucacccggggcgucuacuaccccgacaagguguuccgcuccagcgugcugcacuccacccaggaccucuuccugcccuucuucagcaacgucacgugguuccacgccauccacguguccgggaccaacggcaccaagcgguucgacaacccggugcugcccuucaacgacggggucuacuucgcgagcaccgagaaguccaacaucauccgcggcuggaucuucgggacgacccucgacagcaagacccagucccugcugaucgugaacaacgccaccaacguggucaucaaggugugcgaguuccaguucugcaacgaccccuuccucggcguguacuaccacaagaacaacaagagcuggauggaguccgaguuccgggucuacagcuccgccaacaacugcacguucgaguacgugagccagcccuuccugauggaccuggagggcaagcaggggaacuucaagaaccuccgcgaguucguguucaagaacaucgacggcuacuucaagaucuacuccaagcacaccccgaucaaccugguccgggaccugccccagggguucagcgcccucgagccccugguggaccugcccaucggcaucaacaucacccgcuuccagacccuccuggcccugcaccgguccuaccucacgccgggggacagcagcuccggcuggaccgcgggcgccgccgccuacuacgugggguaccugcagccccgcaccuuccugcucaaguacaacgagaacggcaccaucacggacgcggucgacugcgcccuggacccccugagcgagaccaagugcacccucaaguccuucaccguggagaaggggaucuaccagacgagcaacuuccgggugcagcccaccgaguccaucguccgcuucccgaacaucaccaaccugugccccuucggcgagguguucaacgccacccgguucgccagcgucuacgccuggaaccgcaagcggaucuccaacugcguggcggacuacagcgugcuguacaacuccgccagcuucuccacguucaagugcuacggcgucagccccaccaagcucaacgaccugugcuucaccaacguguacgccgacuccuucgugauccgcggggacgagguccggcagaucgcccccggccagaccgggaagaucgccgacuacaacuacaagcugccggacgacuucacgggcugcgugaucgcguggaacagcaacaaccucgacuccaaggucgggggcaacuacaacuaccuguaccgccuguuccgcaagagcaaccucaagcccuucgagcgggacaucuccaccgagaucuaccaggccggcagcacccccugcaacgggguggagggcuucaacugcuacuucccccugcaguccuacggguuccagccgaccaacggcgugggguaccagcccuaccggguggucgugcugagcuucgagcuccugcacgcccccgccacggugugcggccccaagaaguccaccaaccuggucaagaacaagugcgugaacuucaacuucaacggccucaccgggaccggcgugcugaccgagagcaacaagaaguuccugccguuccagcaguucgggcgcgacaucgccgacacgaccgacgcgguccgcgacccccagacccuggagauccucgacaucacccccugcagcuucggcgggguguccgugaucacgccgggcaccaacaccagcaaccaggucgccgugcuguaccaggacgugaacugcaccgagguccccguggccauccacgccgaccagcugacgcccaccuggcggguguacuccaccggcagcaacgucuuccagacccgcgccgggugccucaucggcgcggagcacgugaacaacuccuacgagugcgacauccccaucggggccggcaucugcgccagcuaccagacgcagaccaacuccccgcggcgcgcccggagcguggcgucccagagcaucaucgccuacaccaugucccugggcgccgagaacagcgucgccuacuccaacaacagcaucgccauccccaccaacuucacgaucuccgugaccaccgagauccugcccgugagcaugaccaagacgagcgucgacugcaccauguacaucugcggggacuccaccgagugcagcaacuuccuccugcaguacggcuccuucugcacccagcugaaccgcgcgcucacggggaucgccguggagcaggacaagaacacccaggagguguucgcccaggucaagcagaucuacaagacgcccccgaucaaggacuucggcggguucaacuucagccagauccugcccgaccccuccaagcccagcaagcgguccuucaucgaggaccuccuguucaacaaggugacccuggccgacgccggcuucaucaagcaguacggcgacugccugggggacaucgcggcccgcgaccucaucugcgcccagaaguucaacggccugaccgugcugccgccccuccugaccgacgagaugaucgcccaguacaccagcgcccugcucgcggggaccaucacguccggcuggaccuucggggccggcgccgcccugcagauccccuucgcgaugcagauggccuaccgguucaacggcaucggggucacccagaacgugcuguacgagaaccagaagcucaucgccaaccaguucaacagcgccaucggcaagauccaggacucccugagcuccaccgccagcgcgcuggggaagcuccaggacguggucaaccagaacgcccaggcccugaacacgcuggugaagcagcucuccagcaacuucggcgccaucuccagcgugcugaacgacauccugucccgccucgacaaggucgaggccgaggugcagaucgaccggcugaucaccgggcgccugcagagccuccagaccuacgugacccagcagcugauccgggcggccgagauccgcgccagcgccaaccuggccgcgaccaagauguccgagugcguccucggccagagcaagcggguggacuucugcggcaagggguaccaccugauguccuucccccagagcgccccgcacggcguggucuuccugcacgugacguacguccccgcccaggagaagaacuucaccaccgcccccgcgaucugccacgacgggaaggcccacuucccccgcgagggcguguucguguccaacgggacccacugguucgucacgcagcggaacuucuacgagccgcagaucaucaccaccgacaacaccuucgugagcggcaacugcgacguggucaucggcaucgugaacaacacgguguacgacccccuccagcccgagcuggacuccuucaaggaggagcuggacaaguacuucaagaaccacaccagccccgacgucgaccucggggacaucuccggcaucaacgccagcguggugaacauccagaaggagaucgaccgccugaacgaggucgccaagaaccugaacgagucccucaucgaccugcaggagcuggggaaguacgagcaguacaucaaguggccgugguacaucuggcucggcuucaucgccggccugaucgcgaucgugauggugaccaucaugcugugcugcaugaccagcugcugcuccugccucaaggggugcugcagcugcggcuccugcugcaaguucgacgaggacgacagcgagcccguccugaagggggugaagcugcacuacacguga

SEQ ID NO: 11741 - RNA, 3822 nt, Artificial Sequence
  SARS-CoV-2/Australia/QLD02/2020__EPI_ISL_407896 spike protein CDS gc (1-1273)
auguucguguuccugguccuccugccccuggugagcucccagugcgugaaccucaccacccgcacgcagcugccgcccgccuacaccaacagcuucacccggggcgucuacuaccccgacaagguguuccgcuccagcgugcugcacuccacccaggaccucuuccugcccuucuucagcaacgucacgugguuccacgccauccacguguccgggaccaacggcaccaagcgguucgacaacccggugcugcccuucaacgacggggucuacuucgcgagcaccgagaaguccaacaucauccgcggcuggaucuucgggacgacccucgacagcaagacccagucccugcugaucgugaacaacgccaccaacguggucaucaaggugugcgaguuccaguucugcaacgaccccuuccucggcguguacuaccacaagaacaacaagagcuggauggaguccgaguuccgggucuacagcuccgccaacaacugcacguucgaguacgugagccagcccuuccugauggaccuggagggcaagcaggggaacuucaagaaccuccgcgaguucguguucaagaacaucgacggcuacuucaagaucuacuccaagcacaccccgaucaaccugguccgggaccugccccagggguucagcgcccucgagccccugguggaccugcccaucggcaucaacaucacccgcuuccagacccuccuggcccugcaccgguccuaccucacgccgggggacagcagcuccggcuggaccgcgggcgccgccgccuacuacgugggguaccugcagccccgcaccuuccugcucaaguacaacgagaacggcaccaucacggacgcggucgacugcgcccuggacccccugagcgagaccaagugcacccucaaguccuucaccguggagaaggggaucuaccagacgagcaacuuccgggugcagcccaccgaguccaucguccgcuucccgaacaucaccaaccugugccccuucggcgagguguucaacgccacccgguucgccagcgucuacgccuggaaccgcaagcggaucuccaacugcguggcggacuacagcgugcuguacaacuccgccagcuucuccacguucaagugcuacggcgucagccccaccaagcucaacgaccugugcuucaccaacguguacgccgacuccuucgugauccgcggggacgagguccggcagaucgcccccggccagaccgggaagaucgccgacuacaacuacaagcugccggacgacuucacgggcugcgugaucgcguggaacagcaacaaccucgacuccaaggucgggggcaacuacaacuaccuguaccgccuguuccgcaagagcaaccucaagcccuucgagcgggacaucuccaccgagaucuaccaggccggcagcacccccugcaacgggguggagggcuucaacugcuacuucccccugcaguccuacggguuccagccgaccaacggcgugggguaccagcccuaccggguggucgugcugagcuucgagcuccugcacgcccccgccacggugugcggccccaagaaguccaccaaccuggucaagaacaagugcgugaacuucaacuucaacggccucaccgggaccggcgugcugaccgagagcaacaagaaguuccugccguuccagcaguucgggcgcgacaucgccgacacgaccgacgcgguccgcgacccccagacccuggagauccucgacaucacccccugcagcuucggcgggguguccgugaucacgccgggcaccaacaccagcaaccaggucgccgugcuguaccaggacgugaacugcaccgagguccccguggccauccacgccgaccagcugacgcccaccuggcggguguacuccaccggcagcaacgucuuccagacccgcgccgggugccucaucggcgcggagcacgugaacaacuccuacgagugcgacauccccaucggggccggcaucugcgccagcuaccagacgcagaccaacuccccgcggcgcgcccggagcguggcgucccagagcaucaucgccuacaccaugucccugggcgccgagaacagcgucgccuacuccaacaacagcaucgccauccccaccaacuucacgaucuccgugaccaccgagauccugcccgugagcaugaccaagacgagcgucgacugcaccauguacaucugcggggacuccaccgagugcagcaaccuccugcugcaguacggcuccuucugcacccagcucaaccgcgcgcugacggggaucgccguggagcaggacaagaacacccaggagguguucgcccaggucaagcagaucuacaagacgcccccgaucaaggacuucggcggguucaacuucagccagauccugcccgaccccuccaagcccagcaagcgguccuucaucgaggaccuccuguucaacaaggugacccuggccgacgccggcuucaucaagcaguacggcgacugccucggggacaucgcggcccgcgaccugaucugcgcccagaaguucaacggccugaccgugcucccgccccugcugaccgacgagaugaucgcccaguacaccagcgcccuccuggcggggaccaucacguccggcuggaccuucggggccggcgccgcccugcagauccccuucgcgaugcagauggccuaccgguucaacggcaucggggucacccagaacgugcucuacgagaaccagaagcugaucgccaaccaguucaacagcgccaucggcaagauccaggacucccugagcuccaccgccagcgcgcucgggaagcugcaggacguggucaaccagaacgcccaggcccugaacacgcucgugaagcagcuguccagcaacuucggcgccaucuccagcgugcugaacgacauccucucccgccuggacaaggucgaggccgaggugcagaucgaccggcugaucaccgggcgccuccagagccugcagaccuacgugacccagcagcugauccgggcggccgagauccgcgccagcgccaaccucgccgcgaccaagauguccgagugcguccugggccagagcaagcggguggacuucugcggcaagggguaccaccugauguccuucccccagagcgccccgcacggcguggucuuccuccacgugacguacguccccgcccaggagaagaacuucaccaccgcccccgcgaucugccacgacgggaaggcccacuucccccgcgagggcguguucguguccaacgggacccacugguucgucacgcagcggaacuucuacgagccgcagaucaucaccaccgacaacaccuucgugagcggcaacugcgacguggucaucggcaucgugaacaacacgguguacgacccccugcagcuggagcucgacuccuucaaggaggagcuggacaaguacuucaagaaccacaccagccccgacgucgaccugggggacaucuccggcaucaacgccagcguggugaacauccagaaggagaucgaccgccucaacgaggucgccaagaaccugaacgagucccugaucgaccuccaggagcuggggaaguacgagcaguacaucaaguggcccugguacaucuggcugggcuucaucgccggccucaucgcgaucgugauggugaccaucaugcugugcugcaugaccagcugcugcuccugccugaaggggugcugcagcugcggcuccugcugcaaguucgacgaggacgacagcgagccgguccucaagggggugaagcugcacuacacguga

SEQ ID NO: 11742 - RNA, 3822 nt, Artificial Sequence
  SARS-CoV-2/India/1-31/2020__EPI_ISL_413523 spike protein CDS gc (1-1273)
auguucguguuccugguccuccugccccuggugagcucccagugcgugaaccucaccacccgcacgcagcugccgcccgccuacaccaacagcuucacccggggcgucuacuaccccgacaagguguuccgcuccagcgugcugcacuccacccaggaccucuuccugcccuucuucagcaacgucacgugguuccacgccauccacguguccgggaccaacggcaccaagcgguucgacaacccggugcugcccuucaacgacggggucuacuucgcgagcaccgagaaguccaacaucauccgcggcuggaucuucgggacgacccucgacagcaagacccagucccugcugaucgugaacaacgccaccaacguggucaucaaggugugcgaguuccaguucugcaacgaccccuuccucggcguguacuaccacaagaacaacaagagcuggauggaguccgaguuccgggucuacagcuccgccaacaacugcacguucgaguacgugagccagcccuuccugauggaccuggagggcaagcaggggaacuucaagaaccuccgcgaguucguguucaagaacaucgacggcuacuucaagaucuacuccaagcacaccccgaucaaccugguccgggaccugccccagggguucagcgcccucgagccccugguggaccugcccaucggcaucaacaucacccgcuuccagacccuccuggcccugcaccgguccuaccucacgccgggggacagcagcuccggcuggaccgcgggcgccgccgccuacuacgugggguaccugcagccccgcaccuuccugcucaaguacaacgagaacggcaccaucacggacgcggucgacugcgcccuggacccccugagcgagaccaagugcacccucaaguccuucaccguggagaaggggaucuaccagacgagcaacuuccgggugcagcccaccgaguccaucguccgcuucccgaacaucaccaaccugugccccuucggcgagguguucaacgccacccgguucgccagcgucuacgccuggaaccgcaagcggaucuccaacugcguggcggacuacagcgugcuguacaacuccgccagcuucuccacguucaagugcuacggcgucagccccaccaagcucaacgaccugugcuucaccaacguguacgccgacuccuucgugauccgcggggacgagguccggcagaucgcccccggccagaccgggaagaucgccgacuacaacuacaagcugccggacgacuucacgggcugcgugaucgcguggaacagcaacaaccucgacuccaaggucgggggcaacuacaacuaccuguaccgccuguuccgcaagagcaaccucaagcccuucgagcgggacaucuccaccgagaucuaccaggccggcagcacccccugcaacgggguggagggcuucaacugcuacuucccccugcaguccuacggguuccagccgaccaacggcgugggguaccagcccuaccggguggucgugcugagcuucgagcuccugcacgcccccgccacggugugcggccccaagaaguccaccaaccuggucaagaacaagugcgugaacuucaacuucaacggccucaccgggaccggcgugcugaccgagagcaacaagaaguuccugccguuccagcaguucgggcgcgacaucgccgacacgaccgacgcgguccgcgacccccagacccuggagauccucgacaucacccccugcagcuucggcgggguguccgugaucacgccgggcaccaacaccagcaaccaggucgccgugcuguaccaggacgugaacugcaccgagguccccguggccauccacgccgaccagcugacgcccaccuggcggguguacuccaccggcagcaacgucuuccagacccgcgccgggugccucaucggcgcggagcacgugaacaacuccuacgagugcgacauccccaucggggccggcaucugcgccagcuaccagacgcagaccaacuccccgcggcgcgcccggagcguggcgucccagagcaucaucgccuacaccaugucccugggcgccgagaacagcgucgccuacuccaacaacagcaucgccauccccaccaacuucacgaucuccgugaccaccgagauccugcccgugagcaugaccaagacgagcgucgacugcaccauguacaucugcggggacuccaccgagugcagcaaccuccugcugcaguacggcuccuucugcacccagcucaaccgcgcgcugacggggaucgccguggagcaggacaagaacacccaggagguguucgcccaggucaagcagaucuacaagacgcccccgaucaaggacuucggcggguucaacuucagccagauccugcccgaccccuccaagcccagcaagcgguccuucaucgaggaccuccuguucaacaaggugacccuggccgacgccggcuucaucaagcaguacggcgacugccucggggacaucgcggcccgcgaccugaucugcgcccagaaguucaacggccugaccgugcucccgccccugcugaccgacgagaugaucgcccaguacaccagcgcccuccuggcggggaccaucacguccggcuggaccuucggggccggcgccgcccugcagauccccuucgcgaugcagauggccuaccgguucaacggcaucggggucacccagaacgugcucuacgagaaccagaagcugaucgccaaccaguucaacagcgugaucggcaagauccaggacucccugagcuccaccgccagcgcccucgggaagcugcaggacgucgugaaccagaacgcgcaggcccugaacacgcucgugaagcagcuguccagcaacuucggcgccaucuccagcguccugaacgacauccucucccgccuggacaagguggaggccgaggugcagaucgaccggcugaucaccgggcgccuccagagccugcagaccuacgucacccagcagcugauccgggccgcggagauccgcgccagcgccaaccucgccgccaccaagauguccgagugcgugcugggccagagcaagcggguggacuucugcggcaagggguaccaccugauguccuucccccagagcgcgccgcacggcgucguguuccuccacgucacguacgugcccgcccaggagaagaacuucaccaccgcccccgccaucugccacgacgggaaggcgcacuucccccgcgagggcguguucgucuccaacgggacccacugguucgugacgcagcggaacuucuacgagccgcagaucaucaccaccgacaacaccuucgugagcggcaacugcgacgucgugaucggcaucgugaacaacacggucuacgacccccugcagcccgagcuggacuccuucaaggaggagcucgacaaguacuucaagaaccacaccagccccgacguggaccugggggacaucuccggcaucaacgccagcguggucaacauccagaaggagaucgaccgccugaacgagguggccaagaaccucaacgagucccugaucgaccugcaggagcucgggaaguacgagcaguacaucaaguggccgugguacaucuggcugggcuucaucgccggccugaucgccaucgugauggucaccaucaugcucugcugcaugaccagcugcugcuccugccugaaggggugcugcagcugcggcuccugcugcaaguucgacgaggacgacagcgagcccgugcugaagggggugaagcuccacuacacguga

SEQ ID NO: 11743 - RNA, 3822 nt, Artificial Sequence
  SARS-CoV-2/Guangdong/GD2020087-P0008/2020__EPI_ISL_413863 spike protein CDS gc (1-1273)
auguucguguuccugguccuccugccccuggugagcucccagugcgugaaccucaccacccgcacgcagcugccgcccgccuacaccaacagcuucacccggggcgucuacuaccccgacaagguguuccgcuccagcgugcugcacuccacccaggaccucuuccugcccuucuucagcaacgucacgugguuccacgccauccacguguccgggaccaacggcaccaagcgguucgacaacccggugcugcccuucaacgacggggucuacuucgcgagcaccgagaaguccaacaucauccgcggcuggaucuucgggacgacccucgacagcaagacccagucccugcugaucgugaacaacgccaccaacguggucaucaaggugugcgaguuccaguucugcaacgaccccuuccucggcguguacuaccacaagaacaacaagagcuggauggaguccgaguuccgggucuacagcuccgccaacaacugcacguucgaguacgugagccagcccuuccugauggaccuggagggcaagcaggggaacuucaagaaccuccgcgaguucguguucaagaacaucgacggcuacuucaagaucuacuccaagcacaccccgaucaaccugguccgggaccugccccagggguucagcgcccucgagccccugguggaccugcccaucggcaucaacaucacccgcuuccagacccuccuggcccugcaccgguccuaccucacgccgggggacagcagcuccggcuggaccgcgggcgccgccgccuacuacgugggguaccugcagccccgcaccuuccugcucaaguacaacgagaacggcaccaucacggacgcggucgacugcgcccuggacccccugagcgagaccaagugcacccucaaguccuucaccguggagaaggggaucuaccagacgagcaacuuccgggugcagcccaccgaguccaucguccgcuucccgaacaucaccaaccugugccccuucggcgagguguucaacgccacccgguucgccagcgucuacgccuggaaccgcaagcggaucuccaacugcguggcggacuacagcgugcuguacaacuccgccagcuucuccacguucaagugcuacggcgucagccccaccaagcucaacgaccugugcuucaccaacguguacgccgacuccuucgugauccgcggggacgagguccgggagaucgcccccggccagaccgggaagaucgccgacuacaacuacaagcugccggacgacuucacgggcugcgugaucgcguggaacagcaacaaccucgacuccaaggucgggggcaacuacaacuaccuguaccgccuguuccgcaagagcaaccucaagcccuucgagcgggacaucuccaccgagaucuaccaggccggcagcacccccugcaacgggguggagggcuucaacugcuacuucccccugcaguccuacggguuccagccgaccaacggcgugggguaccagcccuaccggguggucgugcugagcuucgagcuccugcacgcccccgccacggugugcggccccaagaaguccaccaaccuggucaagaacaagugcgugaacuucaacuucaacggccucaccgggaccggcgugcugaccgagagcaacaagaaguuccugccguuccagcaguucgggcgcgacaucgccgacacgaccgacgcgguccgcgacccccagacccuggagauccucgacaucacccccugcagcuucggcgggguguccgugaucacgccgggcaccaacaccagcaaccaggucgccgugcuguaccaggacgugaacugcaccgagguccccguggccauccacgccgaccagcugacgcccaccuggcggguguacuccaccggcagcaacgucuuccagacccgcgccgggugccucaucggcgcggagcacgugaacaacuccuacgagugcgacauccccaucggggccggcaucugcgccagcuaccagacgcagaccaacuccccgcggcgcgcccggagcguggcgucccagagcaucaucgccuacaccaugucccugggcgccgagaacagcgucgccuacuccaacaacagcaucgccauccccaccaacuucacgaucuccgugaccaccgagauccugcccgugagcaugaccaagacgagcgucgacugcaccauguacaucugcggggacuccaccgagugcagcaaccuccugcugcaguacggcuccuucugcacccagcucaaccgcgcgcugacggggaucgccguggagcaggacaagaacacccaggagguguucgcccaggucaagcagaucuacaagacgcccccgaucaaggacuucggcggguucaacuucagccagauccugcccgaccccuccaagcccagcaagcgguccuucaucgaggaccuccuguucaacaaggugacccuggccgacgccggcuucaucaagcaguacggcgacugccucggggacaucgcggcccgcgaccugaucugcgcccagaaguucaacggccugaccgugcucccgccccugcugaccgacgagaugaucgcccaguacaccagcgcccuccuggcggggaccaucacguccggcuggaccuucggggccggcgccgcccugcagauccccuucgcgaugcagauggccuaccgguucaacggcaucggggucacccagaacgugcucuacgagaaccagaagcugaucgccaaccaguucaacagcgccaucggcaagauccaggacucccugagcuccaccgccagcgcgcucgggaagcugcaggacguggucaaccagaacgcccaggcccugaacacgcucgugaagcagcuguccagcaacuucggcgccaucuccagcgugcugaacgacauccucucccgccuggacaaggucgaggccgaggugcagaucgaccggcugaucaccgggcgccuccagagccugcagaccuacgugacccagcagcugauccgggcggccgagauccgcgccagcgccaaccucgccgcgaccaagauguccgagugcguccugggccagagcaagcggguggacuucugcggcaagggguaccaccugauguccuucccccagagcgccccgcacggcguggucuuccuccacgugacguacguccccgcccaggagaagaacuucaccaccgcccccgcgaucugccacgacgggaaggcccacuucccccgcgagggcguguucguguccaacgggacccacugguucgucacgcagcggaacuucuacgagccgcagaucaucaccaccgacaacaccuucgugagcggcaacugcgacguggucaucggcaucgugaacaacacgguguacgacccccugcagcccgagcuggacuccuucaaggaggagcucgacaaguacuucaagaaccacaccagccccgacgucgaccugggggacaucuccggcaucaacgccagcguggugaacauccagaaggagaucgaccgccugaacgaggucgccaagaaccucaacgagucccugaucgaccugcaggagcucgggaaguacgagcaguacaucaaguggccgugguacaucuggcugggcuucaucgccggccugaucgcgaucgugauggugaccaucaugcucugcugcaugaccagcugcugcuccugccugaaggggugcugcagcugcggcuccugcugcaaguucgacgaggacgacagcgagcccguccugaagggggugaagcuccacuacacguga

SEQ ID NO: 11744 - RNA, 3822 nt, Artificial Sequence
  SARS-CoV-2/Sweden/01/2020__EPI_ISL_411951 spike protein CDS gc (1-1273)
auguucguguuccugguccuccugccccuggugagcucccagugcgugaaccucaccacccgcacgcagcugccgcccgccuacaccaacagcuucacccggggcgucuacuaccccgacaagguguuccgcuccagcgugcugcacuccacccaggaccucuuccugcccuucuucagcaacgucacgugguuccacgccauccacguguccgggaccaacggcaccaagcgguucgacaacccggugcugcccuucaacgacggggucuacuucgcgagcaccgagaaguccaacaucauccgcggcuggaucuucgggacgacccucgacagcaagacccagucccugcugaucgugaacaacgccaccaacguggucaucaaggugugcgaguuccaguucugcaacgaccccuuccucggcguguacuaccacaagaacaacaagagcuggauggaguccgaguuccgggucuacagcuccgccaacaacugcacguucgaguacgugagccagcccuuccugauggaccuggagggcaagcaggggaacuucaagaaccuccgcgaguucguguucaagaacaucgacggcuacuucaagaucuacuccaagcacaccccgaucaaccugguccgggaccugccccagggguucagcgcccucgagccccugguggaccugcccaucggcaucaacaucacccgcuuccagacccuccuggcccugcaccgguccuaccucacgccgggggacagcagcuccggcuggaccgcgggcgccgccgccuacuacgugggguaccugcagccccgcaccuuccugcucaaguacaacgagaacggcaccaucacggacgcggucgacugcgcccuggacccccugagcgagaccaagugcacccucaaguccuucaccguggagaaggggaucuaccagacgagcaacuuccgggugcagcccaccgaguccaucguccgcuucccgaacaucaccaaccugugccccuucggcgagguguucaacgccacccgguucgccagcgucuacgccuggaaccgcaagcggaucuccaacugcguggcggacuacagcgugcuguacaacuccgccagcuucuccacguucaagugcuacggcgucagccccaccaagcucaacgaccugugcuucaccaacguguacgccgacuccuucgugauccgcggggacgagguccggcagaucgcccccggccagaccgggaagaucgccgacuacaacuacaagcugccggacgacuucacgggcugcgugaucgcguggaacagcaacaaccucgacuccaaggucgggggcaacuacaacuaccuguaccgccuguuccgcaagagcaaccucaagcccuucgagcgggacaucuccaccgagaucuaccaggccggcagcacccccugcaacgggguggagggcuucaacugcuacuucccccugcaguccuacggguuccagccgaccaacggcgugggguaccagcccuaccggguggucgugcugagcuucgagcuccugcacgcccccgccacggugugcggccccaagaaguccaccaaccuggucaagaacaagugcgugaacuucaacuucaacggccucaccgggaccggcgugcugaccgagagcaacaagaaguuccugccguuccagcaguucgggcgcgacaucgccgacacgaccgacgcgguccgcgacccccagacccuggagauccucgacaucacccccugcagcuucggcgggguguccgugaucacgccgggcaccaacaccagcaaccaggucgccgugcuguaccaggacgugaacugcaccgagguccccguggccauccacgccgaccagcugacgcccaccuggcggguguacuccaccggcagcaacgucuuccagacccgcgccgggugccucaucggcgcggagcacgugaacaacuccuacgagugcgacauccccaucggggccggcaucugcgccagcuaccagacgcagaccaacuccccgcggcgcgcccggagcguggcgucccagagcaucaucgccuacaccaugucccugggcgccgagaacagcgucgccuacuccaacaacagcaucgccauccccaccaacuucacgaucuccgugaccaccgagauccugcccgugagcaugaccaagacgagcgucgacugcaccauguacaucugcggggacuccaccgagugcagcaaccuccugcugcaguacggcuccuucugcacccagcucaaccgcgcgcugacggggaucgccguggagcaggacaagaacacccaggagguguucgcccaggucaagcagaucuacaagacgcccccgaucaaggacugcggcggguucaacuucagccagauccugcccgaccccuccaagcccagcaagcgguccuucaucgaggaccuccuguucaacaaggugacccuggccgacgccggcuucaucaagcaguacggcgacugccucggggacaucgcggcccgcgaccugaucugcgcccagaaguucaacggccugaccgugcucccgccccugcugaccgacgagaugaucgcccaguacaccagcgcccuccuggcggggaccaucacguccggcuggaccuucggggccggcgccgcccugcagauccccuucgcgaugcagauggccuaccgguucaacggcaucggggucacccagaacgugcucuacgagaaccagaagcugaucgccaaccaguucaacagcgccaucggcaagauccaggacucccugagcuccaccgccagcgcgcucgggaagcugcaggacguggucaaccagaacgcccaggcccugaacacgcucgugaagcagcuguccagcaacuucggcgccaucuccagcgugcugaacgacauccucucccgccuggacaaggucgaggccgaggugcagaucgaccggcugaucaccgggcgccuccagagccugcagaccuacgugacccagcagcugauccgggcggccgagauccgcgccagcgccaaccucgccgcgaccaagauguccgagugcguccugggccagagcaagcggguggacuucugcggcaagggguaccaccugauguccuucccccagagcgccccgcacggcguggucuuccuccacgugacguacguccccgcccaggagaagaacuucaccaccgcccccgcgaucugccacgacgggaaggcccacuucccccgcgagggcguguucguguccaacgggacccacugguucgucacgcagcggaacuucuacgagccgcagaucaucaccaccgacaacaccuucgugagcggcaacugcgacguggucaucggcaucgugaacaacacgguguacgacccccugcagcccgagcuggacuccuucaaggaggagcucgacaaguacuucaagaaccacaccagccccgacgucgaccugggggacaucuccggcaucaacgccagcguggugaacauccagaaggagaucgaccgccugaacgaggucgccaagaaccucaacgagucccugaucgaccugcaggagcucgggaaguacgagcaguacaucaaguggccgugguacaucuggcugggcuucaucgccggccugaucgcgaucgugauggugaccaucaugcucugcugcaugaccagcugcugcuccugccugaaggggugcugcagcugcggcuccugcugcaaguucgacgaggacgacagcgagcccguccugaagggggugaagcuccacuacacguga

SEQ ID NO: 11745 - RNA, 3822 nt, Artificial Sequence
  SARS-CoV-2/Tianmen/HBCDC-HB-07/2020__EPI_ISL_412983 spike protein CDS gc (1-1273)
auguucguguuccugguccuccugccccuggugagcucccagugcgugaaccucaccacccgcacgcagcugccgcccgccuacaccaacagcuucacccggggcgucuacuaccccgacaagguguuccgcuccagcgugcugcacuccacccaggaccucuuccugcccuucuucagcaacgucacgugguuccacgccauccacguguccgggaccaacggcaccaagcgguucgacaacccggugcugcccuucaacgacggggucuacuucgcgagcaccgagaaguccaacaucauccgcggcuggaucuucgggacgacccucgacagcaagacccagucccugcugaucgugaacaacgccaccaacguggucaucaaggugugcgaguuccaguucugcaacgaccccuuccucggcguguacuaccacaagaacaacaagagcuggauggaguccgaguuccgggucuacagcuccgccaacaacugcacguucgaguacgugagccagcccuuccugauggaccuggagggcaagcaggggaacuucaagaaccuccgcgaguucguguucaagaacaucgacggcuacuucaagaucuacuccaagcacaccccgaucaaccugguccgggaccugccccagggguucagcgcccucgagccccugguggaccugcccaucggcaucaacaucacccgcuuccagacccuccuggcccugcaccgguccuaccucacgccgggggacagcagcuccggcuggaccgcgggcgccgccgccuacuacgugggguaccugcagccccgcaccuuccugcucaaguacaacgagaacggcaccaucacggacgcggucgacugcgcccuggacccccugagcgagaccaagugcacccucaaguccuucaccguggagaaggggaucuaccagacgagcaacuuccgggugcagcccaccgaguccaucguccgcuucccgaacaucaccaaccugugccccuucggcgagguguucaacgccacccgguucgccagcgucuacgccuggaaccgcaagcggaucuccaacugcguggcggacuacagcgugcuguacaacuccgccagcuucuccacguucaagugcuacggcgucagccccaccaagcucaacgaccugugcuucaccaacguguacgccgacuccuucgugauccgcggggacgagguccggcagaucgcccccggccagaccgggaagaucgccgacuacaacuacaagcugccggacgacuucacgggcugcgugaucgcguggaacagcaacaaccucgacuccaaggucgggggcaacuacaacuaccuguaccgccuguuccgcaagagcaaccucaagcccuucgagcgggacaucuccaccgagaucuaccaggccggcagcacccccugcaacgggguggagggcuucaacugcuacuucccccugcaguccuacggguuccagccgaccaacggcgugggguaccagcccuaccggguggucgugcugagcuucgagcuccugcacgcccccgccacggugugcggccccaagaaguccaccaaccuggucaagaacaagugcgugaacuucaacuucaacggccucaccgggaccggcgugcugaccgagagcaacaagaaguuccugccguuccagcaguucgggcgcgacaucgccgacacgaccgacgcgguccgcgacccccagacccuggagauccucgacaucacccccugcagcuucggcgggguguccgugaucacgccgggcaccaacaccagcaaccaggucgccgugcuguaccaggaccugaacugcaccgaggugcccgucgccauccacgccgaccagcucacgcccaccuggcggguguacuccaccggcagcaacguguuccagacccgcgccgggugccugaucggcgcggagcacgucaacaacuccuacgagugcgacauccccaucggggccggcaucugcgccagcuaccagacgcagaccaacuccccgcggcgcgcccggagcguggcgucccagagcaucaucgccuacaccaugucccugggcgccgagaacagcguggccuacuccaacaacagcaucgccauccccaccaacuucacgaucuccgucaccaccgagauccuccccgugagcaugaccaagacgagcguggacugcaccauguacaucugcggggacuccaccgagugcagcaaccugcugcuccaguacggcuccuucugcacccagcugaaccgcgcgcugacggggaucgccgucgagcaggacaagaacacccaggagguguucgcccaggugaagcagaucuacaagacgcccccgaucaaggacuucggcggguucaacuucagccagauccuccccgaccccuccaagcccagcaagcgguccuucaucgaggaccugcuguucaacaaggucacccucgccgacgccggcuucaucaagcaguacggcgacugccugggggacaucgcggcccgcgaccugaucugcgcccagaaguucaacggccucaccgugcugccgccccugcucaccgacgagaugaucgcccaguacaccagcgcccugcuggcggggaccaucacguccggcuggaccuucggggccggcgccgcccuccagauccccuucgcgaugcagauggccuaccgguucaacggcaucggggugacccagaacguccuguacgagaaccagaagcugaucgccaaccaguucaacagcgccaucggcaagauccaggacucccucagcuccaccgccagcgcgcuggggaagcugcaggacguggugaaccagaacgcccaggcccucaacacgcuggucaagcagcuguccagcaacuucggcgccaucuccagcgugcucaacgacauccugucccgccuggacaagguggaggccgagguccagaucgaccggcucaucaccgggcgccugcagagccugcagaccuacgugacccagcagcucauccgggcggccgagauccgcgccagcgccaaccuggccgcgaccaagauguccgagugcgugcugggccagagcaagcgggucgacuucugcggcaagggguaccaccucauguccuucccccagagcgccccgcacggcgugguguuccugcacgucacguacgugcccgcccaggagaagaacuucaccaccgcccccgcgaucugccacgacgggaaggcccacuucccccgcgagggcgucuucguguccaacgggacccacugguucgugacgcagcggaacuucuacgagccgcagaucaucaccaccgacaacaccuucgucagcggcaacugcgacguggugaucggcaucgucaacaacacgguguacgacccccugcagcccgagcucgacuccuucaaggaggagcuggacaaguacuucaagaaccacaccagccccgacguggaccugggggacaucuccggcaucaacgccagcgucgugaacauccagaaggagaucgaccgccucaacgagguggccaagaaccugaacgagucccugaucgaccuccaggagcuggggaaguacgagcaguacaucaaguggccgugguacaucuggcugggcuucaucgccggccucaucgcgaucgucauggugaccaucaugcugugcugcaugaccagcugcugcuccugccugaaggggugcugcagcugcggcuccugcugcaaguucgacgaggacgacagcgagcccgugcucaagggggucaagcugcacuacacguga

SEQ ID NO: 11746 - RNA, 3822 nt, Artificial Sequence
  SARS-CoV-2/Hong Kong/case42_VM20002493/2020__EPI_ISL_414527 spike protein CDS gc (1-1273)
auguucguguuccugguccuccugccccuggugagcucccagugcgugaaccucaccacccgcacgcagcugccgcccgccuacaccaacagcuucacccggggcgucuacuaccccgacaagguguuccgcuccagcgugcugcacuccacccaggaccucuuccugcccuucuucagcaacgucacgugguuccacgccauccacguguccgggaccaacggcaccaagcgguucgacaacccggugcugcccuucaacgacggggucuacuucgcgagcaccgagaaguccaacaucauccgcggcuggaucuucgggacgacccucgacagcaagacccagucccugcugaucgugaacaacgccaccaacguggucaucaaggugugcgaguuccaguucugcaacgaccccuuccucggcguguacuaccacaagaacaacaagagcuggauggaguccgaguuccgggucuacagcuccgccaacaacugcacguucgaguacgugagccagcccuuccugauggaccuggagggcaagcaggggaacuucaagaaccuccgcgaguucguguucaagaacaucgacggcuacuucaagaucuacuccaagcacaccccgaucaaccugguccgggaccugccccagggguucagcgcccucgagccccugguggaccugcccaucggcaucaacaucacccgcuuccagacccuccuggcccugcaccgguccuaccucacgccgggggacagcagcuccggcuggaccgcgggcgccgccgccuacuacgugggguaccugcagccccgcaccuuccugcucaaguacaacgagaacggcaccaucacggacgcggucgacugcgcccuggacccccugagcgagaccaagugcacccucaaguccuucaccguggagaaggggaucuaccagacgagcaacuuccgggugcagcccaccgaguccaucguccgcuucccgaacaucaccaaccugugccccuucggcgagguguucaacgccacccgguucgccagcgucuacgccuggaaccgcaagcggaucuccaacugcguggcggacuacagcgugcuguacaacuccgccagcuucuccacguucaagugcuacggcgucagccccaccaagcucaacgaccugugcuucaccaacguguacgccgacuccuucgugauccgcggggacgagguccggcagaucgcccccggccagaccgggaagaucgccgacuacaacuacaagcugccggacgacuucacgggcugcgugaucgcguggaacagcaacaaccucgacuccaaggucgggggcaacuacaacuaccuguaccgccuguuccgcaagagcaaccucaagcccuucgagcgggacaucuccaccgagaucuaccaggccggcagcacccccugcaacgggguggagggcuucaacugcuacuucccccugcaguccuacggguuccagccgaccaacggcgugggguaccagcccuaccggguggucgugcugagcuucgagcuccugcacgcccccgccacggugugcggccccaagaaguccaccaaccuggucaagaacaagugcgugaacuucaacuucaacggccucaccgggaccggcgugcugaccgagagcaacaagaaguuccugccguuccagcaguucgggcgcgacaucgccgacacgaccgacgcgguccgcgacccccagacccuggagauccucgacaucacccccugcagcuucggcgggguguccgugaucacgccgggcaccaacaccagcaaccaggucgccgugcuguaccaggacgugaacugcaccgagguccccguggccauccacgccgaccagcugacgcccaccuggcggguguacuccaccggcagcaacgucuuccagacccgcgccgggugccucaucggcgcggagcacgugaacaacuccuacgagugcgacauccccaucggggccggcaucugcgccagcuaccagacgcagaccaacuccccgcggcgcgcccggagcguggcgucccagagcaucaucgccuacaccaugucccugggcgccgagaacagcgucgccuacuccaacaacagcaucgccauccccaccaacuucgcgaucuccgugacgaccgagauccugcccgugagcaugaccaagaccagcgucgacugcacgauguacaucugcggggacuccaccgagugcagcaaccuccugcugcaguacggcuccuucugcacccagcucaaccgcgcccugaccgggaucgccguggagcaggacaagaacacgcaggagguguucgcccaggucaagcagaucuacaagacgcccccgaucaaggacuucggcggguucaacuucagccagauccugcccgaccccuccaagcccagcaagcgguccuucaucgaggaccuccuguucaacaaggugacccuggccgacgcgggcuucaucaagcaguacggcgacugccucggggacaucgccgcccgcgaccugaucugcgcccagaaguucaacggccugaccgugcucccgccccugcugaccgacgagaugaucgcccaguacaccagcgcgcuccuggccgggaccaucaccuccggcuggacguucggggccggcgccgcgcugcagauccccuucgccaugcagauggccuaccgguucaacggcaucggggucacccagaacgugcucuacgagaaccagaagcugaucgccaaccaguucaacagcgccaucggcaagauccaggacucccugagcuccaccgcgagcgcccucgggaagcugcaggacguggucaaccagaacgcccaggcccugaacacccucgugaagcagcuguccagcaacuucggcgccaucuccagcgugcugaacgacauccucucccgccuggacaaggucgaggcggaggugcagaucgaccggcugaucacggggcgccuccagagccugcagaccuacgugacccagcagcugauccgggccgccgagauccgcgccagcgccaaccucgcggccaccaagauguccgagugcguccugggccagagcaagcggguggacuucugcggcaagggguaccaccugauguccuucccccagagcgccccgcacggcguggucuuccuccacgugaccuacguccccgcccaggagaagaacuucacgaccgcgcccgccaucugccacgacgggaaggcccacuucccccgcgagggcguguucguguccaacgggacccacugguucgucacccagcggaacuucuacgagccgcagaucaucacgaccgacaacaccuucgugagcggcaacugcgacguggucaucggcaucgugaacaacaccguguacgacccccugcagcccgagcuggacuccuucaaggaggagcucgacaaguacuucaagaaccacacgagccccgacgucgaccugggggacaucuccggcaucaacgccagcguggugaacauccagaaggagaucgaccgccugaacgaggucgccaagaaccucaacgagucccugaucgaccugcaggagcucgggaaguacgagcaguacaucaaguggccgugguacaucuggcugggcuucaucgcgggccugaucgccaucgugauggugaccaucaugcucugcugcaugaccagcugcugcuccugccugaaggggugcugcagcugcggcuccugcugcaaguucgacgaggacgacagcgagcccguccugaagggggugaagcuccacuacaccuga

SEQ ID NO: 11747 - RNA, 3822 nt, Artificial Sequence
  SARS-CoV-2/USA/CruiseA-23/2020__EPI_ISL_414482 spike protein CDS gc (1-1273)
auguucguguuccugguccuccugccccuggugagcucccagugcgugaaccucaccacccgcacgcagcugccgcccgccuacaccaacagcuucacccggggcgucuacuaccccgacaagguguuccgcuccagcgugcugcacuccacccaggaccucuuccugcccuucuucagcaacgucacgugguuccacgccauccacguguccgggaccaacggcaccaagcgguucgacaacccggugcugcccuucaacgacggggucuacuucgcgagcaccgagaaguccaacaucauccgcggcuggaucuucgggacgacccucgacagcaagacccagucccugcugaucgugaacaacgccaccaacguggucaucaaggugugcgaguuccaguucugcaacgaccccuuccucggcguguacuaccacaagaacaacaagagcuggauggaguccgaguuccgggucuacagcuccgccaacaacugcacguucgaguacgugagccagcccuuccugauggaccuggaggugaagcagggcaacuucaagaaccuccgcgaguucgucuucaagaacaucgacggguacuucaagaucuacuccaagcacaccccgaucaaccuggugcgggaccugccccagggcuucagcgcccucgagccccugguggaccugcccaucgggaucaacaucacccgcuuccagacccuccuggcccugcaccgguccuaccucacgccgggcgacagcagcuccggguggaccgcgggcgccgccgccuacuacgucggcuaccugcagccccgcaccuuccugcucaaguacaacgagaacgggaccaucacggacgcgguggacugcgcccuggacccccugagcgagaccaagugcacccucaaguccuucaccguggagaagggcaucuaccagacgagcaacuuccggguccagcccaccgaguccaucgugcgcuucccgaacaucaccaaccugugccccuucggggaggucuucaacgccacccgguucgccagcguguacgccuggaaccgcaagcggaucuccaacugcguggcggacuacagcguccuguacaacuccgccagcuucuccacguucaagugcuacggcgugagccccaccaagcucaacgaccugugcuucaccaacguguacgccgacuccuucgucauccgcggcgacgaggugcggcagaucgcccccgggcagaccggcaagaucgccgacuacaacuacaagcugccggacgacuucacggggugcgugaucgcguggaacagcaacaaccucgacuccaaggucggcgggaacuacaacuaccuguaccgccuguuccgcaagagcaaccucaagcccuucgagcgggacaucuccaccgagaucuaccaggccggcagcacccccugcaacggcguggagggguucaacugcuacuucccccugcaguccuacggcuuccagccgaccaacggggugggcuaccagcccuaccgggucguggugcugagcuucgagcuccugcacgcccccgccacggucugcgggcccaagaaguccaccaaccuggugaagaacaagugcgugaacuucaacuucaacggccucaccggcaccgggguccugaccgagagcaacaagaaguuccugccguuccagcaguucggccgcgacaucgccgacacgaccgacgcggugcgcgacccccagacccuggagauccucgacaucacccccugcagcuucgggggcguguccgucaucacgccggggaccaacaccagcaaccagguggccgugcuguaccaggacgucaacugcaccgaggugcccguggccauccacgccgaccagcugacgcccaccuggcgggucuacuccaccggcagcaacguguuccagacccgcgccggcugccucaucggggcggagcacgugaacaacuccuacgagugcgacauccccaucggcgccgggaucugcgccagcuaccagacgcagaccaacuccccgcggcgcgcccggagcgucgcgucccagagcaucaucgccuacaccaugucccugggcgccgagaacagcguggccuacuccaacaacagcaucgccauccccaccaacuucacgaucuccgugaccaccgagauccugcccgucagcaugaccaagacgagcguggacugcaccauguacaucugcggcgacuccaccgagugcagcaaccuccugcugcaguacggguccuucugcacccagcucaaccgcgcgcugacgggcaucgccguggagcaggacaagaacacccaggaggucuucgcccaggugaagcagaucuacaagacgcccccgaucaaggacuucgggggcuucaacuucagccagauccugcccgaccccuccaagcccagcaagcgguccuucaucgaggaccuccuguucaacaaggugacccuggccgacgccggguucaucaagcaguacggcgacugccucggcgacaucgcggcccgcgaccugaucugcgcccagaaguucaacgggcugaccguccucccgccccugcugaccgacgagaugaucgcccaguacaccagcgcccuccuggcgggcaccaucacguccggguggaccuucggcgccggggccgcccugcagauccccuucgcgaugcagauggccuaccgguucaacggcaucggcgugacccagaacgugcucuacgagaaccagaagcugaucgccaaccaguucaacagcgccaucgggaagauccaggacucccugagcuccaccgccagcgcgcucggcaagcugcaggacgucgugaaccagaacgcccaggcccugaacacgcucgugaagcagcuguccagcaacuucggggccaucuccagcguccugaacgacauccucucccgccuggacaagguggaggccgaggugcagaucgaccggcugaucaccggccgccuccagagccugcagaccuacgucacccagcagcugauccgggcggccgagauccgcgccagcgccaaccucgccgcgaccaagauguccgagugcgugcuggggcagagcaagcggguggacuucugcggcaagggcuaccaccugauguccuucccccagagcgccccgcacggggucguguuccuccacgucacguacgugcccgcccaggagaagaacuucaccaccgcccccgcgaucugccacgacggcaaggcccacuucccccgcgaggggguguucgucuccaacggcacccacugguucgugacgcagcggaacuucuacgagccgcagaucaucaccaccgacaacaccuucgugagcgggaacugcgacgucgugaucggcaucgugaacaacacggucuacgacccccugcagcccgagcuggacuccuucaaggaggagcucgacaaguacuucaagaaccacaccagccccgacguggaccugggcgacaucuccgggaucaacgccagcguggucaacauccagaaggagaucgaccgccugaacgagguggccaagaaccucaacgagucccugaucgaccugcaggagcucggcaaguacgagcaguacaucaaguggccgugguacaucuggcugggguucaucgccggccugaucgcgaucgugauggucaccaucaugcucugcugcaugaccagcugcugcuccugccugaagggcugcugcagcugcggguccugcugcaaguucgacgaggacgacagcgagcccgugcugaagggcgugaagcuccacuacacguga

SEQ ID NO: 11748 - RNA, 3822 nt, Artificial Sequence
  SARS-CoV-2/Hong Kong/case85_VM20002868/2020__EPI_ISL_414519 spike protein CDS gc (1-1273)
auguucguguuccugguccucgugccccuggugagcucccagugcgucaaccugaccacccgcacgcagcucccgcccgccuacaccaacagcuucacccggggcguguacuaccccgacaagguguuccgcuccagcguccugcacuccacccaggaccuguuccuccccuucuucagcaacgugacgugguuccacgccauccacguguccgggaccaacggcaccaagcgguucgacaacccgguccugcccuucaacgacgggguguacuucgcgagcaccgagaaguccaacaucauccgcggcuggaucuucgggacgacccuggacagcaagacccagucccuccugaucgugaacaacgccaccaacgucgugaucaaggugugcgaguuccaguucugcaacgaccccuuccugggcgucuacuaccacaagaacaacaagagcuggauggaguccgaguuccggguguacagcuccgccaacaacugcacguucgaguacgugagccagcccuuccucauggaccuggagggcaagcaggggaacuucaagaaccugcgcgaguucgucuucaagaacaucgacggcuacuucaagaucuacuccaagcacaccccgaucaaccucgugcgggaccugccccagggguucagcgcccuggagccccucguggaccugcccaucggcaucaacaucacccgcuuccagacccugcucgcccugcaccgguccuaccugacgccgggggacagcagcuccggcuggaccgcgggcgccgccgccuacuacgucggguaccuccagccccgcaccuuccugcugaaguacaacgagaacggcaccaucacggacgcgguggacugcgcccucgacccccugagcgagaccaagugcacccugaaguccuucaccguggagaaggggaucuaccagacgagcaacuuccggguccagcccaccgaguccaucgugcgcuucccgaacaucaccaaccucugccccuucggcgaggucuucaacgccacccgguucgccagcguguacgccuggaaccgcaagcggaucuccaacugcguggcggacuacagcguccuguacaacuccgccagcuucuccacguucaagugcuacggcgugagccccaccaagcugaacgaccucugcuucaccaacguguacgccgacuccuucgucauccgcggggacgaggugcggcagaucgcccccggccagaccgggaagaucgccgacuacaacuacaagcugccggacgacuucacgggcugcgugaucgcguggaacagcaacaaccuggacuccaaggucgggggcaacuacaacuaccucuaccgccuguuccgcaagagcaaccugaagcccuucgagcgggacaucuccaccgagaucuaccaggccggcagcacccccugcaacgggguggagggcuucaacugcuacuucccccuccaguccuacggguuccagccgaccaacggcgugggguaccagcccuaccgggucguggugcugagcuucgagcugcuccacgcccccgccacggucugcggccccaagaaguccaccaaccuggugaagaacaagugcgugaacuucaacuucaacggccugaccgggaccggcguccucaccgagagcaacaagaaguuccugccguuccagcaguucgggcgcgacaucgccgacacgaccgacgcggugcgcgacccccagacccuggagauccuggacaucacccccugcagcuucggcgggguguccgucaucacgccgggcaccaacaccagcaaccagguggccgugcucuaccaggacgucaacugcaccgaggugcccguggccauccacgccgaccagcugacgcccaccuggcgggucuacuccaccggcagcaacguguuccagacccgcgccgggugccugaucggcgcggagcacgugaacaacuccuacgagugcgacauccccaucggggccggcaucugcgccagcuaccagacgcagaccaacuccccgcggcgcgcccggagcgucgcgucccagagcaucaucgccuacaccaugucccucggcgccgagaacagcguggccuacuccaacaacagcaucgccauccccaccaacuucacgaucuccgugaccaccgagauccugcccgucagcaugaccaagacgagcguggacugcaccauguacaucugcggggacuccaccgagugcagcaaccugcuccugcaguacggcuccuucugcacccagcugaaccgcgcgcucacggggaucgccguggagcaggacaagaacacccaggaggucuucgcccaggugaagcagaucuacaagacgcccccgaucaaggacuucggcggguucaacuucagccagauccugcccgaccccuccaagcccagcaagcgguccuucaucgaggaccuccuguucaacaaggugacccuggccgacgccggcuucaucaagcaguacggcgacugccugggggacaucgcggcccgcgaccucaucugcgcccagaaguucaacggccugaccguccugccgccccuccugaccgacgagaugaucgcccaguacaccagcgcccugcucgcggggaccaucacguccggcuggaccuucggggccggcgccgcccugcagauccccuucgcgaugcagauggccuaccgguucaacggcaucggggugacccagaacgugcuguacgagaaccagaagcucaucgccaaccaguucaacagcgccaucggcaagauccaggacucccugagcuccaccgccagcgcgcuggggaagcuccaggacgucgugaaccagaacgcccaggcccugaacacgcuggugaagcagcucuccagcaacuucggcgccaucuccagcguccugaacgacauccugucccgccucgacaagguggaggccgaggugcagaucgaccggcugaucaccgggcgccugcagagccuccagaccuacgucacccagcagcugauccgggcggccgagauccgcgccagcgccaaccuggccgcgaccaagauguccgagugcgugcucggccagagcaagcggguggacuucugcggcaagggguaccaccugauguccuucccccagagcgccccgcacggcgucguguuccugcacgucacguacgugcccgcccaggagaagaacuucaccaccgcccccgcgaucugccacgacgggaaggcccacuucccccgcgagggcguguucgucuccaacgggacccacugguucgugacgcagcggaacuucuacgagccgcagaucaucaccaccgacaacaccuucgugagcggcaacugcgacgucgugaucggcaucgugaacaacacggucuacgacccccuccagcccgagcuggacuccuucaaggaggagcuggacaaguacuucaagaaccacaccagccccgacguggaccucggggacaucuccggcaucaacgccagcguggucaacauccagaaggagaucgaccgccugaacgagguggccaagaaccugaacgagucccucaucgaccugcaggagcuggggaaguacgagcaguacaucaaguggccgugguacaucuggcucggcuucaucgccggccugaucgcgaucgugauggucaccaucaugcugugcugcaugaccagcugcugcuccugccucaaggggugcugcagcugcggcuccugcugcaaguucgacgaggacgacagcgagcccgugcugaagggggugaagcugcacuacacguga

SEQ ID NO: 11749 - RNA, 3822 nt, Artificial Sequence
  SARS-CoV-2/England/200990660/2020__EPI_ISL_414523 spike protein CDS gc (1-1273)
auguucguguuccugguccuccugccccuggugagcucccagugcgugaaccucaccacccgcacgcagcugccgcccgccuacaccaacagcuucacccggggcgucuacuaccccgacaagguguuccgcuccagcgugcugcacuccacccaggaccucuuccugcccuucuucagcaacgucacgugguuccacgccauccacguguccgggaccaacggcaccaagcgguucgacaacccggugcugcccuucaacgacggggucuacuucgcgagcaccgagaaguccaacaucauccgcggcuggaucuucgggacgacccucgacagcaagacccagucccugcugaucgugaacaacgccaccaacguggucaucaaggugugcgaguuccaguucugcaacgaccccuuccucggcguguacuaccacaagaacaacaagagcuggauggaguccgaguuccgggucuacagcuccgccaacaacugcacguucgaguacgugagccagcccuuccugauggaccuggagggcaagcaggggaacuucaagaaccuccgcgaguucguguucaagaacaucgacggcuacuucaagaucuacuccaagcacaccccgaucaaccugguccgggaccugccccagggguucagcgcccucgagccccugguggaccugcccaucggcaucaacaucacccgcuuccagacccuccuggcccugcaccgguccuaccucacgccgggggacagcagcuccggcuggaccgcgggcgccgccgccuacuacgugggguaccugcagccccgcaccuuccugcucaaguacaacgagaacggcaccaucacggacgcggucgacugcgcccuggacccccugagcgagaccaagugcacccucaaguccuucaccguggagaaggggaucuaccagacgagcaacuuccgggugcagcccaccgaguccaucguccgcuucccgaacaucaccaaccugugccccuucggcgagguguucaacgccacccgguucgccagcgucuacgccuggaaccgcaagcggaucuccaacugcguggcggacuacagcgugcuguacaacuccgccagcuucuccacguucaagugcuacggcgucagccccaccaagcucaacgaccugugcuucaccaacguguacgccgacuccuucgugauccgcggggacgagguccggcagaucgcccccggccagaccgggaagaucgccgacuacaacuacaagcugccggacgacuucacgggcugcgugaucgcguggaacagcaacaaccucgacuccaaggucgggggcaacuacaacuaccuguaccgccuguuccgcaagagcaaccucaagcccuucgagcgggacaucuccaccgagaucuaccaggccggcagcacccccugcaacgggguggagggcuucaacugcuacuucccccugcaguccuacggguuccagccgaccaacggcgugggguaccagcccuaccggguggucgugcugagcuucgagcuccugcacgcccccgccacggugugcggccccaagaaguccaccaaccuggucaagaacaagugcgugaacuucaacuucaacggccucaccgggaccggcgugcugaccgagagcaacaagaaguuccugccguuccagcaguucgggcgcgacaucgccgacacgaccgacgcgguccgcgacccccagacccuggagauccucgacaucacccccugcagcuucggcgggguguccgugaucacgccgggcaccaacaccagcaaccaggucgccgugcuguaccagggcgugaacugcaccgagguccccguggccauccacgccgaccagcugacgcccaccuggcggguguacuccaccgggagcaacgucuuccagacccgcgccggcugccucaucggggcggagcacgugaacaacuccuacgagugcgacauccccaucggcgccggcaucugcgccagcuaccagacgcagaccaacuccccgcggcgcgcccggagcguggcgucccagagcaucaucgccuacaccaugucccugggggccgagaacagcgucgccuacuccaacaacagcaucgccauccccaccaacuucacgaucuccgugaccaccgagauccugcccgugagcaugaccaagacgagcgucgacugcaccauguacaucugcggcgacuccaccgagugcagcaaccuccugcugcaguacggguccuucugcacccagcucaaccgcgcgcugacgggcaucgccguggagcaggacaagaacacccaggagguguucgcccaggucaagcagaucuacaagacgcccccgaucaaggacuucgggggcuucaacuucagccagauccugcccgaccccuccaagcccagcaagcgguccuucaucgaggaccuccuguucaacaaggugacccuggccgacgccggcuucaucaagcaguacggggacugccucggcgacaucgcggcccgcgaccugaucugcgcccagaaguucaacgggcugaccgugcucccgccccugcugaccgacgagaugaucgcccaguacaccagcgcccuccuggcgggcaccaucacguccggguggaccuucggcgccggcgccgcccugcagauccccuucgcgaugcagauggccuaccgguucaacgggaucggcgucacccagaacgugcucuacgagaaccagaagcugaucgccaaccaguucaacagcgccaucgggaagauccaggacucccugagcuccaccgccagcgcgcucggcaagcugcaggacguggucaaccagaacgcccaggcccugaacacgcucgugaagcagcuguccagcaacuucggggccaucuccagcgugcugaacgacauccucucccgccuggacaaggucgaggccgaggugcagaucgaccggcugaucaccggccgccuccagagccugcagaccuacgugacccagcagcugauccgggcggccgagauccgcgccagcgccaaccucgccgcgaccaagauguccgagugcguccugggccagagcaagcggguggacuucugcgggaagggcuaccaccugauguccuucccccagagcgccccgcacgggguggucuuccuccacgugacguacguccccgcccaggagaagaacuucaccaccgcccccgcgaucugccacgacggcaaggcccacuucccccgcgaggggguguucguguccaacggcacccacugguucgucacgcagcggaacuucuacgagccgcagaucaucaccaccgacaacaccuucgugagcggcaacugcgacguggucaucgggaucgugaacaacacgguguacgacccccugcagcccgagcuggacuccuucaaggaggagcucgacaaguacuucaagaaccacaccagccccgacgucgaccugggcgacaucuccgggaucaacgccagcguggugaacauccagaaggagaucgaccgccugaacgaggucgccaagaaccucaacgagucccugaucgaccugcaggagcucggcaaguacgagcaguacaucaaguggccgugguacaucuggcugggcuucaucgccgggcugaucgcgaucgugauggugaccaucaugcucugcugcaugaccagcugcugcuccugccugaagggcugcugcagcugcggguccugcugcaaguucgacgaggacgacagcgagcugguccucaagggcgugaagcugcacuacacguga

SEQ ID NO: 11750 - RNA, 3822 nt, Artificial Sequence
  SARS-CoV-2/Australia/NSW09/2020__EPI_ISL_413595 spike protein CDS gc (1-1273)
auguucguguuccugguccuccugccccuggugagcucccagugcgugaaccucaccacccgcacgcagcugccgcccgccuacaccaacagcuucacccggggcgucuacuaccccgacaagguguuccgcuccagcgugcugcacuccacccaggaccucuuccugcccuucuucagcaacgucacgugguuccacgccauccacguguccgggaccaacggcaccaagcgguucgacaacccggugcugcccuucaacgacggggucuacuucgcgagcaccgagaaguccaacaucauccgcggcuggaucuucgggacgacccucgacagcaagacccagucccugcugaucgugaacaacgccaccaacguggucaucaaggugugcgaguuccaguucugcaacgaccccuuccucggcguguacuaccacaagaacaacaagagcuggauggaguccgaguuccgggucuacagcuccgccaacaacugcacguucgaguacgugagccagcccuuccugauggaccuggagggcaagcaggggaacuucaagaaccuccgcgaguucguguucaagaacaucgacggcuacuucaagaucuacuccaagcacaccccgaucaaccugguccgggaccugccccagggguucagcgcccucgagccccugguggaccugcccaucggcaucaacaucacccgcuuccagacccuccuggcccugcaccgguccuaccucacgccgggggacagcagcuccggcuggaccgcgggcgccgccgccuacuacgugggguaccugcagccccgcaccuuccugcucaaguacaacgagaacggcaccaucacggacgcggucgacugcgcccuggacccccugagcgagaccaagugcacccucaaguccuucaccguggagaaggggaucuaccagacgagcaacuuccgggugcagcccaccgaguccaucguccgcuucccgaacaucaccaaccugugccccuucggcgagguguucaacgccacccgguucgccagcgucuacgccuggaaccgcaagcggaucuccaacugcguggcggacuacagcgugcuguacaacuccgccagcuucuccacguucaagugcuacggcgucagccccaccaagcucaacgaccugugcuucaccaacguguacgccgacuccuucgugauccgcggggacgagguccggcagaucgcccccggccagaccgggaagaucgccgacuacaacuacaagcugccggacgacuucacgggcugcgugaucgcguggaacagcaacaaccucgacuccaaggucgggggcaacuacaacuaccuguaccgccuguuccgcaagagcaaccucaagcccuucgagcgggacaucuccaccgagaucuaccaggccggcagcacccccugcaacgggguggagggcuucaacugcuacuucccccugcaguccuacggguuccagccgaccaacggcgugggguaccagcccuaccggguggucgugcugagcuucgagcuccugcacgcccccgccacggugugcggccccaagaaguccaccaaccuggucaagaacaagugcgugaacuucaacuucaacggccucaccgggaccggcgugcugaccgagagcaacaagaaguuccugccguuccagcaguucgggcgcgacaucgccgacacgaccgacgcgguccgcgacccccagacccuggagauccucgacaucacccccugcagcuucggcgggguguccgugaucacgccgggcaccaacaccagcaaccaggucgccgugcuguaccaggacgugaacugcaccgagguccccguggccauccacgccgaccagcugacgcccaccuggcggguguacuccaccggcagcaacgucuuccagacccgcgccgggugccucaucggcgcggagcacgugaacaacuccuacgagugcgacauccccaucggggccggcaucugcgccagcuaccagacgcagaccaacuccccgcggcgcgcccggagcguggcgucccagagcaucaucgccuacaccaugucccugggcgccgagaacagcgucgccuacuccaacaacagcaucgccauccccaccaacuucacgaucuccgugaccaccgagauccugcccgugagcaugaccaagacgagcgucgacugcaccauguacaucugcggggacuccaccgagugcagcaaccuccugcugcaguacggcuccuucugcacccagcucaaccgcgcgcugacggggaucgccguggagcaggacaagaacacccaggagguguucgcccaggucaagcagaucuacaagacgcccccgaucaaggacuucggcggguucaacuucagccagauccugcccgaccccuccaagcccagcaagcgguccuucaucgaggaccuccuguucaacaaggugacccuggccgacgccggcuucaucaagcaguacggcgacugccucggggacaucgcggcccgcgaccugaucugcgcccagaaguucaacggccugaccgugcucccgccccugcugaccgacgagaugaucgcccaguacaccagcgcccuccuggcggggaccaucacguccggcuggaccuucggggccggcgccgcccugcagauccccuucgcgaugcagauggccuaccgguucaacggcaucggggucacccagaacgugcucuacgagaaccagaagcugaucgccaaccaguucaacagcgccaucggcaagauccaggacucccugagcuucaccgccuccgcgcucgggaagcugcaggacguggucaaccagaacgcccaggcccugaacacgcucgugaagcagcugagcuccaacuucggcgccaucagcuccgugcugaacgacauccucagccgccuggacaaggucgaggccgaggugcagaucgaccggcugaucaccgggcgccuccagucccugcagaccuacgugacccagcagcugauccgggcggccgagauccgcgccagcgccaaccucgccgcgaccaagaugagcgagugcguccugggccaguccaagcggguggacuucugcggcaagggguaccaccugaugagcuucccccaguccgccccgcacggcguggucuuccuccacgugacguacguccccgcccaggagaagaacuucaccaccgcccccgcgaucugccacgacgggaaggcccacuucccccgcgagggcguguucgugagcaacgggacccacugguucgucacgcagcggaacuucuacgagccgcagaucaucaccaccgacaacaccuucguguccggcaacugcgacguggucaucggcaucgugaacaacacgguguacgacccccugcagcccgagcuggacagcuucaaggaggagcucgacaaguacuucaagaaccacaccucccccgacgucgaccugggggacaucagcggcaucaacgccuccguggugaacauccagaaggagaucgaccgccugaacgaggucgccaagaaccucaacgagagccugaucgaccugcaggagcucgggaaguacgagcaguacaucaaguggccgugguacaucuggcugggcuucaucgccggccugaucgcgaucgugauggugaccaucaugcucugcugcaugaccuccugcugcagcugccugaaggggugcugcuccugcggcagcugcugcaaguucgacgaggacgacuccgagcccguccugaagggggugaagcuccacuacacguga

SEQ ID NO: 11751 - RNA, 3822 nt, Artificial Sequence
  SARS-CoV-2/Australia/NSW10/2020__EPI_ISL_413596 spike protein CDS gc (1-1273)
auguucguguuccugguccuccugccccuggugagcucccagugcgugaaccucaccacccgcacgcagcugccgcccgccuacaccaacagcuucacccggggcgucuacuaccccgacaagguguuccgcuccagcgugcugcacuccacccaggaccucuuccugcccuucuucagcaacgucacgugguuccacgccauccacguguccgggaccaacggcaccaagcgguucgacaacccggugcugcccuucaacgacggggucuacuucgcgagcaccgagaaguccaacaucauccgcggcuggaucuucgggacgacccucgacagcaagacccagucccugcugaucgugaacaacgccaccaacguggucaucaaggugugcgaguuccaguucugcaacgaccccuuccucggcguguacuaccacaagaacaacaagagcuggauggaguccgaguuccgggucuacagcuccgccaacaacugcacguucgaguacgugagccagcccuuccugauggaccuggagggcaagcaggggaacuucaagaaccuccgcgaguucguguucaagaacaucgacggcuacuucaagaucuacuccaagcacaccccgaucaaccugguccgggaccugccccagggguucagcgcccucgagccccugguggaccugcccaucggcaucaacaucacccgcuuccagacccuccuggcccugcaccgguccuaccucacgccgggggacagcagcuccggcuggaccgcgggcgccgccgccuacuacgugggguaccugcagccccgcaccuuccugcucaaguacaacgagaacggcaccaucacggacgcggucgacugcgcccuggacccccugagcgagaccaagugcacccucaaguccuucaccguggagaaggggaucuaccagacgagcaacuuccgggugcagcccaccgaguccaucguccgcuucccgaacaucaccaaccugugccccuucggcgagguguucaacgccacccgguucgccagcgucuacgccuggaaccgcaagcggaucuccaacugcguggcggacuacagcgugcuguacaacuccgccagcuucuccacguucaagugcuacggcgucagccccaccaagcucaacgaccugugcuucaccaacguguacgccgacuccuucgugauccgcggggacgagguccggcagaucgcccccggccagaccgggaagaucgccgacuacaacuacaagcugccggacgacuucacgggcugcgugaucgcguggaacagcaacaaccucgacuccaaggucgggggcaacuacaacuaccuguaccgccuguuccgcaagagcaaccucaagcccuucgagcgggacaucuccaccgagaucuaccaggccggcagcacccccugcaacgggguggagggcuucaacugcuacuucccccugcaguccuacggguuccagccgaccaacggcgugggguaccagcccuaccggguggucgugcugagcuucgagcuccugcacgcccccgccacggugugcggccccaagaaguccaccaaccuggucaagaacaagugcgugaacuucaacuucaacggccucaccgggaccggcgugcugaccgagagcaacaagaaguuccugccguuccagcaguucgggcgcgacaucgccgacacgaccgacgcgguccgcgacccccagacccuggagauccucgacaucacccccugcagcuucggcgggguguccgugaucacgccgggcaccaacaccagcaaccaggucgccgugcuguaccaggacgugaacugcaccgagguccccguggccauccacgccgaccagcugacgcccaccuggcggguguacuccaccggcagcaacgucuuccagacccgcgccgggugccucaucggcgcggagcacgugaacaacuccuacgagugcgacauccccaucggggccggcaucugcgccagcuaccagacgcagaccaacuccccgcggcgcgcccggagcguggcgucccagagcaucaucgccuacaccaugucccugggcgccgagaacagcgucgccuacuccaacaacagcaucgccauccccaccaacuucacgaucuccgugaccaccgagauccugcccgugagcaugaccaagacgagcgucgacugcaccauguacaucugcggggacuccaccgagugcagcaaccuccugcugcaguacggcuccuucugcacccagcucaaccgcgcgcugacggggaucgccguggagcaggacaagaacacccaggagguguucgcccaggucaagcagaucuacaagacgcccccgaucaaggacuucggcggguucaacuucagccagauccugcccgaccccuccaagcccagcaagcgguccuucaucgaggaccuccuguucaacaaggugacccuggccgacgccggcuucaucaagcaguacggcgacugccucggggacaucgcggcccgcgaccugaucugcgcccagaaguucaacggccugaccgugcucccgccccugcugaccgacgagaugaucgcccaguacaccagcgcccuccuggcggggaccaucacguccggcuggaccuucggggccggcgccgcccugcagauccccuucgcgaugcagauggccuaccgguucaacggcaucggggucacccagaacgugcucuacgagaaccagaagcugaucgccaaccaguucaacagcgccaucggcaagauccaggacucccugagcuccaccgccagcgcgcucgggaagcugcaggacguggucaaccagaacgcccaggcccugaacacgcucgugaagcagcuguccagcaacuucggcgccaucuccagcgugcugaacgacauccucucccgccuggacaaggucgaggccgaggugcagaucgaccggcugaucaccgggcgccuccagagccugcagaccuacgugacccagcagcugauccgggcggccgagauccgcgccagcgccaaccucgccgcgaccaagauguccgagugcguccugggccagagcaagcggguggacuucugcggcaagggguaccaccugauguccuucccccagagcgccccgcacggcguggucuuccuccacgugacguacguccccgcccaggagaagaacuucaccaccgcccccgcgaucugccacgacgggaaggcccacuucccccgcgagggcguguucguguccaacgggacccacugguucgucacgcagcggaacuucuacgagccgcagaucaucaccaccgacaacaccuucgugagcggcaacugcgacguggucaucggcaucgugaacaacacgguguacgacccccugcagcccgagcuggacuccuucaaggaggagcucgacaaguacuucaagaaccacaccagccccgacgucgaccugggggacaucuccggcaucaacgccagcguggugaacauccagaaggagaucgaccgccugaacgaggucgccaagaaccucaacgagucccugaucgaccugcaggagcucgggaaguacgagcaguacaucaaguggccgugguacaucuggcugggcuucaucgccggccugaucgcgaucgugauggugaccaucaugcucugcugcaugaccagcugcugcuccugccugaaggggugcugcagcugcggcuccugcuucaaguucgacgaggacgacagcgagcccguccugaagggggugaagcuccacuacacguga

SEQ ID NO: 11752 - RNA, 3822 nt, Artificial Sequence
  SARS-CoV-2/Switzerland/1000477797/2020__EPI_ISL_413023 spike protein CDS gc (1-1273)
auguucguguuccugguccuccugccccuggugagcucccagugcgugaaccucaccacccgcacgcagcugccgcccgccuacaccaacagcuucacccggggcgucuacuaccccgacaagguguuccgcuccagcgugcugcacuccacccaggaccucuuccugcccuucuucagcaacgucacgugguuccacgccauccacguguccgggaccaacggcaccaagcgguucgacaacccggugcugcccuucaacgacggggucuacuucgcgagcaccgagaaguccaacaucauccgcggcuggaucuucgggacgacccucgacagcaagacccagucccugcugaucgugaacaacgccaccaacguggucaucaaggugugcgaguuccaguucugcaacgaccccuuccucggcguguacuaccacaagaacaacaagagcuggauggaguccgaguuccgggucuacagcuccgccaacaacugcacguucgaguacgugagccagcccuuccugauggaccuggagggcaagcaggggaacuucaagaaccuccgcgaguucguguucaagaacaucgacggcuacuucaacaucuacuccaagcacaccccgaucaaccugguccgggaccugccccagggguucagcgcccucgagccccugguggaccugcccaucggcaucaacaucacccgcuuccagacccuccuggcccugcaccgguccuaccucacgccgggggacagcagcuccggcuggaccgcgggcgccgccgccuacuacgugggguaccugcagccccgcaccuuccugcucaaguacaacgagaacggcaccaucacggacgcggucgacugcgcccuggacccccugagcgagaccaagugcacccucaaguccuucaccguggagaaggggaucuaccagacgagcaacuuccgggugcagcccaccgaguccaucguccgcuucccgaacaucaccaaccugugccccuucggcgagguguucaacgccacccgguucgccagcgucuacgccuggaaccgcaagcggaucuccaacugcguggcggacuacagcgugcuguacaacuccgccagcuucuccacguucaagugcuacggcgucagccccaccaagcucaacgaccugugcuucaccaacguguacgccgacuccuucgugauccgcggggacgagguccggcagaucgcccccggccagaccgggaagaucgccgacuacaacuacaagcugccggacgacuucacgggcugcgugaucgcguggaacagcaacaaccucgacuccaaggucgggggcaacuacaacuaccuguaccgccuguuccgcaagagcaaccucaagcccuucgagcgggacaucuccaccgagaucuaccaggccggcagcacccccugcaacgggguggagggcuucaacugcuacuucccccugcaguccuacggguuccagccgaccaacggcgugggguaccagcccuaccggguggucgugcugagcuucgagcuccugcacgcccccgccacggugugcggccccaagaaguccaccaaccuggucaagaacaagugcgugaacuucaacuucaacggccucaccgggaccggcgugcugaccgagagcaacaagaaguuccugccguuccagcaguucgggcgcgacaucgccgacacgaccgacgcgguccgcgacccccagacccuggagauccucgacaucacccccugcagcuucggcgggguguccgugaucacgccgggcaccaacaccagcaaccaggucgccgugcuguaccagggcgugaacugcaccgagguccccguggccauccacgccgaccagcugacgcccaccuggcggguguacuccaccgggagcaacgucuuccagacccgcgccggcugccucaucggggcggagcacgugaacaacuccuacgagugcgacauccccaucggcgccggcaucugcgccagcuaccagacgcagaccaacuccccgcggcgcgcccggagcguggcgucccagagcaucaucgccuacaccaugucccugggggccgagaacagcgucgccuacuccaacaacagcaucgccauccccaccaacuucacgaucuccgugaccaccgagauccugcccgugagcaugaccaagacgagcgucgacugcaccauguacaucugcggcgacuccaccgagugcagcaaccuccugcugcaguacggguccuucugcacccagcucaaccgcgcgcugacgggcaucgccguggagcaggacaagaacacccaggagguguucgcccaggucaagcagaucuacaagacgcccccgaucaaggacuucgggggcuucaacuucagccagauccugcccgaccccuccaagcccagcaagcgguccuucaucgaggaccuccuguucaacaaggugacccuggccgacgccggcuucaucaagcaguacggggacugccucggcgacaucgcggcccgcgaccugaucugcgcccagaaguucaacgggcugaccgugcucccgccccugcugaccgacgagaugaucgcccaguacaccagcgcccuccuggcgggcaccaucacguccggguggaccuucggcgccggcgccgcccugcagauccccuucgcgaugcagauggccuaccgguucaacgggaucggcgucacccagaacgugcucuacgagaaccagaagcugaucgccaaccaguucaacagcgccaucgggaagauccaggacucccugagcuccaccgccagcgcgcucggcaagcugcaggacguggucaaccagaacgcccaggcccugaacacgcucgugaagcagcuguccagcaacuucggggccaucuccagcgugcugaacgacauccucucccgccuggacaaggucgaggccgaggugcagaucgaccggcugaucaccggccgccuccagagccugcagaccuacgugacccagcagcugauccgggcggccgagauccgcgccagcgccaaccucgccgcgaccaagauguccgagugcguccugggccagagcaagcggguggacuucugcgggaagggcuaccaccugauguccuucccccagagcgccccgcacgggguggucuuccuccacgugacguacguccccgcccaggagaagaacuucaccaccgcccccgcgaucugccacgacggcaaggcccacuucccccgcgaggggguguucguguccaacggcacccacugguucgucacgcagcggaacuucuacgagccgcagaucaucaccaccgacaacaccuucgugagcggcaacugcgacguggucaucgggaucgugaacaacacgguguacgacccccugcagcccgagcuggacuccuucaaggaggagcucgacaaguacuucaagaaccacaccagccccgacgucgaccugggcgacaucuccgggaucaacgccagcguggugaacauccagaaggagaucgaccgccugaacgaggucgccaagaaccucaacgagucccugaucgaccugcaggagcucggcaaguacgagcaguacaucaaguggccgugguacaucuggcugggcuucaucgccgggcugaucgcgaucgugauggugaccaucaugcucugcugcaugaccagcugcugcuccugccugaagggcugcugcagcugcggguccugcugcaaguucgacgaggacgacagcgagcccguccugaagggcgugaagcuccacuacacguga

SEQ ID NO: 11753 - RNA, 3822 nt, Artificial Sequence
  SARS-CoV-2/Belgium/BA-02291/2020__EPI_ISL_415159 spike protein CDS gc (1-1273)
auguucguguuccugguccuccugccccuggugagcucccagugcgugaaccucaccacccgcacgcagcugccgcccgccuacaccaacagcuucacccggggcgucuacuaccccgacaagguguuccgcuccagcgugcugcacuccacccaggaccucuuccugcccuucuucagcaacgucacgugguuccacgccauccacguguccgggaccaacggcaccaagcgguucgacaacccggugcugcccuucaacgacggggucuacuucgcgagcaccgagaaguccaacaucauccgcggcuggaucuucgggacgacccucgacagcaagacccagucccugcugaucgugaacaacgccaccaacguggucaucaaggugugcgaguuccaguucugcaacgaccccuuccucggcguguacuaccacaagaacaacaagagcuggauggaguccgaguuccgggucuacagcuccgccaacaacugcacguucgaguacgugagccagcccuuccugauggaccuggagggcaagcaggggaacuucaagaaccuccgcgaguucguguucaagaacaucgacggcuacuucaagaucuacuccaagcacaccccgaucaaccugguccgggaccugccccagggguucagcgcccucgagccccugguggaccugcccaucggcaucaacaucacccgcuuccagacccuccuggcccugcaccgguccuaccucacgccgggggacagcagcuccggcuggaccgcgggcgccgccgccuacuacgugggguaccugcagccccgcaccuuccugcucaaguacaacgagaacggcaccaucacggacgcggucgacugcgcccuggacccccugagcgagaccaagugcacccucaaguccuucaccguggagaaggggaucuaccagacgagcaacuuccgggugcagcccaccgaguccaucguccgcuucccgaacaucaccaaccugugccccuucggcgagguguucaacgccacccgguucgccagcgucuacgccuggaaccgcaagcggaucuccaacugcguggcggacuacagcgugcuguacaacuccgccagcuucuccacguucaagugcuacggcgucagccccaccaagcucaacgaccugugcuucaccaacguguacgccgacuccuucgugauccgcggggacgagguccggcagaucgcccccggccagaccgggaagaucgccgacuacaacuacaagcugccggacgacuucacgggcugcgugaucgcguggaacagcaacaaccucgacuccaaggucgggggcaacuacaacuaccuguaccgccuguuccggcgcagcaaccucaagcccuucgagcgggacaucuccaccgagaucuaccaggccggcagcacccccugcaacgggguggagggcuucaacugcuacuucccccugcaguccuacggguuccagccgaccaacggcgugggguaccagcccuaccgcguggucgugcugagcuucgagcuccugcccgcccccgccacggugugcggcccgaagaaguccaccaaccuggucaagaacaagugcgugaacuucaacuucaacggccucaccgggaccggcgugcugaccgaguccaacaagaaguuccugcccuuccagcaguucgggcgcgacaucgccgacacgaccgacgcgguccgggacccccagacccuggagauccucgacaucaccccgugcagcuucggcgggguguccgugaucacgcccggcaccaacaccagcaaccaggucgccgugcuguaccagggcgugaacugcaccgagguccccguggccauccacgccgaccagcugacgcccaccuggcgcguguacuccaccgggagcaacgucuuccagacccgggccggcugccucaucggggcggagcacgugaacaacuccuacgagugcgacaucccgaucggcgccggcaucugcgccagcuaccagacgcagaccaacagcccccgccgggcccgcagcguggcgucccagagcaucaucgccuacaccaugucccugggggccgagaacagcgucgccuacuccaacaacagcaucgccauccccaccaacuucacgaucuccgugaccaccgagauccugcccgugagcaugaccaagacgagcgucgacugcaccauguacaucugcggcgacuccaccgagugcagcaaccuccugcugcaguacggguccuucugcacccagcucaaccgggcgcugacgggcaucgccguggagcaggacaagaacacccaggagguguucgcccaggucaagcagaucuacaagaccccgcccaucaaggacuucgggggcuucaacuucagccagauccugcccgaccccuccaagccgagcaagcgcuccuucaucgaggaccuccuguucaacaaggugacccuggccgacgccggcuucaucaagcaguacggggacugccucggcgacaucgcggcccgggaccugaucugcgcccagaaguucaacgggcugacggugcucccgccccugcugaccgacgagaugaucgcccaguacaccagcgcccuccuggcgggcaccaucacguccggguggaccuucggcgccggcgccgcccugcagauccccuucgcgaugcagauggccuaccgcuucaacgggaucggcgucacccagaacgugcucuacgagaaccagaagcugaucgccaaccaguucaacagcgccaucgggaagauccaggacucccugagcuccgccgcgcccgcccucggcaagcugcaggacguggucaaccagaacgcccaggcccugaacacccucgugaagcagcugagcuccaacuucggggccaucagcuccgugcugaacgacauccucagccggcuggacaaggucgaggcggaggugcagaucgaccgccugaucacgggccggcuccagucccugcagaccuacgugacccagcagcugauccgcgccgccgagauccgggccagcgccaaccucgcggccaccaagaugagcgagugcguccugggccaguccaagcgcguggacuucugcgggaagggcuaccaccugaugagcuucccccaguccgcgccccacgggguggucuuccuccacgugaccuacguccccgcccaggagaagaacuucacgaccgccccggccaucugccacgacggcaaggcccacuucccccgggaggggguguucgugagcaacggcacccacugguucgucacccagcgcaacuucuacgagccccagaucaucacgaccgacaacaccuucguguccggcaacugcgacguggucaucgggaucgugaacaacaccguguacgacccccugcagccggagcuggacagcuucaaggaggagcucgacaaguacuucaagaaccacacgucccccgacgucgaccugggcgacaucagcgggaucaacgccuccguggugaacauccagaaggagaucgaccggcugaacgaggucgccaagaaccucaacgagagccugaucgaccugcaggagcucggcaaguacgagcaguacaucaaguggcccugguacaucuggcugggcuucaucgcggggcugaucgccaucgugauggugaccaucaugcucugcugcaugaccuccugcugcagcugccugaagggcugcugcuccugcgggagcugcugcaaguucgacgaggacgacuccgagccgguccugaagggcgugaagcuccacuacaccuga

SEQ ID NO: 11754 - RNA, 3822 nt, Artificial Sequence
  SARS-CoV-2/USA/WA8-UW5/2020__EPI_ISL_413486 spike protein CDS gc (1-1273)
auguucguguuccugguccuccugccccuggugagcucccagugcgugaaccucaccacccgcacgcagcugccgcccgccuacaccaacagcuucacccggggcgucuacuaccccgacaagguguuccgcuccagcgugcugcacuccacccaggaccucuuccugcccuucuucagcaacgucacgugguuccacgccauccacguguccgggaccaacggcaccaagcgguucgacaacccggugcugcccuucaacgacggggucuacuucgcgagcaccgagaaguccaacaucauccgcggcuggaucuucgggacgacccucgacagcaagacccagucccugcugaucgugaacaacgccaccaacguggucaucaaggugugcgaguuccaguucugcaacgaccccuuccucggcguguacuaccacaagaacaacaagagcuggauggaguccgaguuccgggucuacagcuccgccaacaacugcacguucgaguacgugagccagcccuuccugauggaccuggagggcaagcaggggaacuucaagaaccuccgcgaguucguguucaagaacaucgacggcuacuucaagaucuacuccaagcacaccccgaucaaccugguccgggaccugccccagggguucagcgcccucgagccccugguggaccugcccaucggcaucaacaucacccgcuuccagacccuccuggcccugcaccgguccuaccucacgccgggggacagcagcuccggcuggaccgcgggcgccgccgccuacuacgugggguaccugcagccccgcaccuuccugcucaaguacaacgagaacggcaccaucacggacgcggucgacugcgcccuggacccccugagcgagaccaagugcacccucaaguccuucaccguggagaaggggaucuaccagacgagcaacuuccgggugcagcccaccgaguccaucguccgcuucccgaacaucaccaaccugugccccuucggcgagguguucaacgccacccgguucgccagcgucuacgccuggaaccgcaagcggaucuccaacugcguggcggacuacagcgugcuguacaacuccgccagcuucuccacguucaagugcuacggcgucagccccaccaagcucaacgaccugugcuucaccaacguguacgccgacuccuucgugauccgcggggacgagguccggcagaucgcccccggccagaccgggaagaucgccgacuacaacuacaagcugccggacgacuucacgggcugcgugaucgcguggaacagcaacaaccucgacuccaaggucgggggcaacuacaacuaccuguaccgccuguuccgcaagagcaaccucaagcccuucgagcgggacaucuccaccgagaucuaccaggccggcagcacccccugcaacgggguggagggcuucaacugcuacuucccccugcaguccuacggguuccagccgaccaacggcgugggguaccagcccuaccggguggucgugcugagcuucgagcuccugcacgcccccgccacggugugcggccccaagaaguccaccaaccuggucaagaacaagugcgugaacuucaacuucaacggccucaccgggaccggcgugcugaccgagagcaacaagaaguuccugccguuccagcaguucgggcgcgacaucgccgacacgaccgacgcgguccgcgacccccagacccuggagauccucgacaucacccccugcagcuucggcgggguguccgugaucacgccgggcaccaacaccagcaaccaggucgccgugcuguaccaggacgugaacugcaccgagguccccguggccauccacgccgaccagcugacgcccaccuggcggguguacuccaccggcagcaacgucuuccagacccgcgccgggugccucaucggcgcggaguacgugaacaacuccuacgagugcgacauccccaucggggccggcaucugcgccagcuaccagacgcagaccaacuccccgcggcgcgcccggagcguggcgucccagagcaucaucgccuacaccaugucccugggcgccgagaacagcgucgccuacuccaacaacagcaucgccauccccaccaacuucacgaucuccgugaccaccgagauccugcccgugagcaugaccaagacgagcgucgacugcaccauguacaucugcggggacuccaccgagugcagcaaccuccugcugcaguacggcuccuucugcacccagcucaaccgcgcgcugacggggaucgccguggagcaggacaagaacacccaggagguguucgcccaggucaagcagaucuacaagacgcccccgaucaaggacuucggcggguucaacuucagccagauccugcccgaccccuccaagcccagcaagcgguccuucaucgaggaccuccuguucaacaaggugacccuggccgacgccggcuucaucaagcaguacggcgacugccucggggacaucgcggcccgcgaccugaucugcgcccagaaguucaacggccugaccgugcucccgccccugcugaccgacgagaugaucgcccaguacaccagcgcccuccuggcggggaccaucacguccggcuggaccuucggggccggcgccgcccugcagauccccuucgcgaugcagauggccuaccgguucaacggcaucggggucacccagaacgugcucuacgagaaccagaagcugaucgccaaccaguucaacagcgccaucggcaagauccaggacucccugagcuccaccgccagcgcgcucgggaagcugcaggacguggucaaccagaacgcccaggcccugaacacgcucgugaagcagcuguccagcaacuucggcgccaucuccagcgugcugaacgacauccucucccgccuggacaaggucgaggccgaggugcagaucgaccggcugaucaccgggcgccuccagagccugcagaccuacgugacccagcagcugauccgggcggccgagauccgcgccagcgccaaccucgccgcgaccaagauguccgagugcguccugggccagagcaagcggguggacuucugcggcaagggguaccaccugauguccuucccccagagcgccccgcacggcguggucuuccuccacgugacguacguccccgcccaggagaagaacuucaccaccgcccccgcgaucugccacgacgggaaggcccacuucccccgcgagggcguguucguguccaacgggacccacugguucgucacgcagcggaacuucuacgagccgcagaucaucaccaccgacaacaccuucgugagcggcaacugcgacguggucaucggcaucgugaacaacacgguguacgacccccugcagcccgagcuggacuccuucaaggaggagcucgacaaguacuucaagaaccacaccagccccgacgucgaccugggggacaucuccggcaucaacgccagcguggugaacauccagaaggagaucgaccgccugaacgaggucgccaagaaccucaacgagucccugaucgaccugcaggagcucgggaaguacgagcaguacaucaaguggccgugguacaucuggcugggcuucaucgccggccugaucgcgaucgugauggugaccaucaugcucugcugcaugaccagcugcugcuccugccugaaggggugcugcagcugcggcuccugcugcaaguucgacgaggacgacagcgagcccguccugaagggggugaagcuccacuacacguga

SEQ ID NO: 11755 - RNA, 3822 nt, Artificial Sequence
  SARS-CoV-2/England/20102000506/2020__EPI_ISL_415147 spike protein CDS gc (1-1273)
auguucguguuccugguccuccugccccuggugagcucccagugcgugaaccucaccacccgcacgcagcugccgcccgccuacaccaacagcuucacccggggcgucuacuaccccgacaagguguuccgcuccagcgugcugcacuccacccaggaccucuuccugcccuucuucagcaacgucacgugguuccacgccauccacguguccgggaccaacggcaccaagcgguucgacaacccggugcugcccuucaacgacggggucuacuucgcgagcaccgagaaguccaacaucauccgcggcuggaucuucgggacgacccucgacagcaagacccagucccugcugaucgugaacaacgccaccaacguggucaucaaggugugcgaguuccaguucugcaacgaccccuuccucggcguguacuaccacaagaacaacaagagcuggauggaguccgaguuccgggucuacagcuccgccaacaacugcacguucgaguacgugagccagcccuuccugauggaccuggagggcaagcaggggaacuucaagaaccuccgcgaguucguguucaagaacaucgacggcuacuucaagaucuacuccaagcacaccccgaucaaccugguccgggaccugccccagggguucagcgcccucgagccccugguggaccugcccaucggcaucaacaucacccgcuuccagacccuccuggcccugcaccgguccuaccucacgccgggggacagcagcuccggcuggaccgcgggcgccgccgccuacuacgugggguaccugcagccccgcaccuuccugcucaaguacaacgagaacggcaccaucacggacgcggucgacugcgcccuggacccccugagcgagaccaagugcacccucaaguccuucaccguggagaaggggaucuaccagacgagcaacuuccgggugcagcccaccgaguccaucguccgcuucccgaacaucaccaaccugugccccuucggcgagguguucaacgccacccgguucgccagcgucuacgccuggaaccgcaagcggaucuccaacugcguggcggacuacagcgugcuguacaacuccgccagcuucuccacguucaagugcuacggcgucagccccaccaagcucaacgaccugugcuucaccaacguguacgccgacuccuucgugauccgcggggacgagguccggcagaucgcccccggccagaccgggaagaucgccgacuacaacuacaagcugccggacgacuucacgggcugcgugaucgcguggaacagcaacaaccucgacuccaaggucgggggcaacuacaacuaccuguaccgccuguuccgcaagagcaaccucaagcccuucgagcgggacaucuccaccgagaucuaccaggccggcagcacccccugcaacgggguggagggcuucaacugcuacuucccccugcaguccuacggguuccagccgaccaacggcgugggguaccagcccuaccggguggucgugcugagcuucgagcuccugcacgcccccgccacggugugcggccccaagaaguccaccaaccuggucaagaacaagugcgugaacuucaacuucaacggccucaccgggaccggcgugcugaccgagagcaacaagaaguuccugccguuccagcaguucgggcgcgacaucgccgacacgaccgacgcgguccgcgacccccagacccuggagauccucgacaucacccccugcagcuucggcgggguguccgugaucacgccgggcaccaacaccagcaaccaggucgccgugcuguaccagggcgugaacugcaccgagguccccguggccauccacgccgaccagcugacgcccaccuggcggguguacuccaccgggagcaacgucuuccagacccgcgccggcugccucaucggggcggagcacgugaacaacuccuacgagugcgacauccccaucggcgccggcaucugcgccagcuaccagacgcagaccaacuccccgcggcgcgcccggagcguggcgucccagagcaucaucgccuacaccaugucccugggggccgagaacagcgucgccuacuccaacaacagcaucgccauccccaccaacuucacgaucuccgugaccaccgagauccugcccgugagcaugaccaagacgagcgucgacugcaccauguacaucugcggcgacuccaccgagugcagcaaccuccugcugcaguacggguccuucugcacccagcucaaccgcgcgcugacgggcaucgccguggagcaggacaagaacacccaggagguguucgcccaggucaagcagaucuacaagacgcccccgaucaaggacuucgggggcuucaacuucagccagauccugcccgaccccuccaagcccagcaagcgguccuucaucgaggaccuccuguucaacaaggugacccuggccgacgccggcuucaucaagcaguacggguacugccucggcgacaucgcggcccgcgaccugaucugcgcccagaaguucaacgggcugaccgugcucccgccccugcugaccgacgagaugaucgcccaguacaccagcgcccuccuggcgggcaccaucacguccggguggaccuucggcgccggcgccgcccugcagauccccuucgcgaugcagauggccuaccgguucaacgggaucggcgucacccagaacgugcucuacgagaaccagaagcugaucgccaaccaguucaacagcgccaucgggaagauccaggacucccugagcuccaccgccagcgcgcucggcaagcugcaggacguggucaaccagaacgcccaggcccugaacacgcucgugaagcagcuguccagcaacuucggggccaucuccagcgugcugaacgacauccucucccgccuggacaaggucgaggccgaggugcagaucgaccggcugaucaccggccgccuccagagccugcagaccuacgugacccagcagcugauccgggcggccgagauccgcgccagcgccaaccucgccgcgaccaagauguccgagugcguccugggccagagcaagcggguggacuucugcgggaagggcuaccaccugauguccuucccccagagcgccccgcacgggguggucuuccuccacgugacguacguccccgcccaggagaagaacuucaccaccgcccccgcgaucugccacgacggcaaggcccacuucccccgcgaggggguguucguguccaacggcacccacugguucgucacgcagcggaacuucuacgagccgcagaucaucaccaccgacaacaccuucgugagcggcaacugcgacguggucaucgggaucgugaacaacacgguguacgacccccugcagcccgagcuggacuccuucaaggaggagcucgacaaguacuucaagaaccacaccagccccgacgucgaccugggcgacaucuccgggaucaacgccagcguggugaacauccagaaggagaucgaccgccugaacgaggucgccaagaaccucaacgagucccugaucgaccugcaggagcucggcaaguacgagcaguacaucaaguggccgugguacaucuggcugggcuucaucgccgggcugaucgcgaucgugauggugaccaucaugcucugcugcaugaccagcugcugcuccugccugaagggcugcugcagcugcggguccugcugcaaguucgacgaggacgacagcgagcccguccugaagggcgugaagcuccacuacacguga

SEQ ID NO: 11756 - RNA, 3822 nt, Artificial Sequence
  SARS-CoV-2/Belgium/VAG-03013/2020__EPI_ISL_415155 spike protein CDS gc (1-1273)
auguucguguuccugguccuccugccccuggugagcucccagugcgugaaccucaccacccgcacgcagcugccgcccgccuacaccaacagcuucacccggggcgucuacuaccccgacaagguguuccgcuccagcgugcugcacuccacccaggaccucuuccugcccuucuucagcaacgucacgugguuccacgccauccacguguccgggaccaacggcaccaagcgguucgacaacccggugcugcccuucaacgacggggucuacuucgcgagcaccgagaaguccaacaucauccgcggcuggaucuucgggacgacccucgacagcaagacccagucccugcugaucgugaacaacgccaccaacguggucaucaaggugugcgaguuccaguucugcaacgaccccuuccucggcguguacuaccacaagaacaacaagagcuggauggaguccgaguuccgggucuacagcuccgccaacaacugcacguucgaguacgugagccagcccuuccugauggaccuggagggcaagcaggggaacuucaagaaccuccgcgaguucguguucaagaacaucgacggcuacuucaagaucuacuccaagcacaccccgaucaaccugguccgggaccugccccagggguucagcgcccucgagccccugguggaccugcccaucggcaucaacaucacccgcuuccagacccuccuggcccugcaccgguccuaccucacgccgggggacagcagcuccggcuggaccgcgggcgccgccgccuacuacgugggguaccugcagccccgcaccuuccugcucaaguacaacgagaacggcaccaucacggacgcggucgacugcgcccuggacccccugagcgagaccaagugcacccucaaguccuucaccguggagaaggggaucuaccagacgagcaacuuccgggugcagcccaccgaguccaucguccgcuucccgaacaucaccaaccugugccccuucggcgagguguucaacgccacccgguucgccagcgucuacgccuggaaccgcaagcggaucuccaacugcguggcggacuacagcgugcuguacaacuccgccagcuucuccacguucaagugcuacggcgucagccccaccaagcucaacgaccugugcuucaccaacguguacgccgacuccuucgugauccgcggggacgagguccggcagaucgcccccggccagaccgggaagaucgccgacuacaacuacaagcugccggacgacuucacgggcugcgugaucgcguggaacagcaacaaccucgacuccaaggucgggggcaacuacaacuaccuguaccgccuguuccgcaagagcaaccucaagcccuucgagcgggacaucuccaccgagaucuaccaggccggcagcacccccugcaacgggguggagggcuucaacugcuacuucccccugcaguccuacggguuccagccgaccaacggcgugggguaccagcccuaccggguggucgugcugagcuucgagcuccugcacgcccccgccacggugugcggccccaagaaguccaccaaccuggucaagaacaagugcgugaacuucaacuucaacggccucaccgggaccggcgugcugaccgagagcaacaagaaguuccugccguuccagcaguucgggcgcgacaucgccgacacgaccgacgcgguccgcgacccccagacccuggagauccucgacaucacccccugcagcuucggcgggguguccgugaucacgccgggcaccaacaccagcaaccaggucgccgugcuguaccagggcgugaacugcaccgagguccccguggccauccacgccgaccagcugacgcccaccuggcggguguacuccaccgggagcaacgucuuccagacccgcgccggcugccucaucggggcggagcacgugaacaacuccuacgagugcgacauccccaucggcgccggcaucugcgccagcuaccagacgcagaccaacuccccgcggcgcgcccggagcguggcgucccagagcaucaucgccuacaccaugucccugggggccgagaacagcgucgccuacuccaacaacagcaucgccauccccaccaacuucacgaucuccgugaccaccgagauccugcccgugagcaugaccaagacgagcgucgacugcaccauguacaucugcggcgacuccaccgagugcagcaaccuccugcugcaguacggguccuucugcacccagcucaaccgcgcgcugacgggcaucgccguggagcaggacaagaacacccaggagguguucgcccaggucaagcagaucuacaagacgcccccgaucaaggacuucgggggcuucaacuucagccagauccugcccgaccccuccaagcccagcaagcgguccuucaucgaggaccuccuguucaacaaggugacccuggccgacgccggcuucaucaagcaguacggggacugccucggcgacaucgcggcccgcgaccugaucugcgcccagaaguucaacgggcugaccgugcucccgccccugcugaccgacgagaugaucgcccaguacaccagcgcccuccuggcgggcaccaucacguccggguggaccuucggcgccggcgccgcccugcagauccccuucgcgaugcagauggccuaccgguucaacgggaucggcgucacccagaacgugcucuacgagaaccagaagcugaucgccaaccaguucaacagcgccaucgggaagauccaggacucccugagcuccaccgccacggcgcucggcaagcugcaggacguggucaaccagaacgcccaggcccugaacacccucgugaagcagcugagcuccaacuucggggccaucagcuccgugcugaacgacauccucagccgccuggacaaggucgaggccgaggugcagaucgaccggcugaucaccggccgccuccagucccugcagaccuacgugacccagcagcugauccgggcggccgagauccgcgccagcgccaaccucgccgcgacgaagaugagcgagugcguccugggccaguccaagcggguggacuucugcgggaagggcuaccaccugaugagcuucccccaguccgccccgcacgggguggucuuccuccacgugaccuacguccccgcccaggagaagaacuucaccaccgcccccgcgaucugccacgacggcaaggcccacuucccccgcgaggggguguucgugagcaacggcacgcacugguucgucacccagcggaacuucuacgagccgcagaucaucaccaccgacaacacguucguguccggcaacugcgacguggucaucgggaucgugaacaacaccguguacgacccccugcagcccgagcuggacagcuucaaggaggagcucgacaaguacuucaagaaccacaccucccccgacgucgaccugggcgacaucagcgggaucaacgccuccguggugaacauccagaaggagaucgaccgccugaacgaggucgccaagaaccucaacgagagccugaucgaccugcaggagcucggcaaguacgagcaguacaucaaguggccgugguacaucuggcugggcuucaucgccgggcugaucgcgaucgugauggugaccaucaugcucugcugcaugacguccugcugcagcugccugaagggcugcugcuccugcgggagcugcugcaaguucgacgaggacgacuccgagcccguccugaagggcgugaagcuccacuacaccuga

SEQ ID NO: 11757 - RNA, 3822 nt, Artificial Sequence
  SARS-CoV-2/Belgium/BC-03016/2020__EPI_ISL_415157 spike protein CDS gc (1-1273)
auguucguguuccugguccuccugccccuggugagcucccagugcgugaaccucaccacccgcacgcagcugccgcccgccuacaccaacagcuucacccggggcgucuacuaccccgacaagguguuccgcuccagcgugcugcacuccacccaggaccucuuccugcccuucuucagcaacgucacgugguuccacgccauccacguguccgggaccaacggcaccaagcgguucgacaacccggugcugcccuucaacgacggggucuacuucgcgagcaccgagaaguccaacaucauccgcggcuggaucuucgggacgacccucgacagcaagacccagucccugcugaucgugaacaacgccaccaacguggucaucaaggugugcgaguuccaguucugcaacgaccccuuccucggcguguacuaccacaagaacaacaagagcuggauggaguccgaguuccgggucuacagcuccgccaacaacugcacguucgaguacgugagccagcccuuccugauggaccuggagggcaagcaggggaacuucaagaaccuccgcgaguucguguucaagaacaucgacggcuacuucaagaucuacuccaagcacaccccgaucaaccugguccgggaccugccccagggguucagcgcccucgagccccugguggaccugcccaucggcaucaacaucacccgcuuccagacccuccuggcccugcaccgguccuaccucacgccgggggacagcagcuccggcuggaccgcgggcgccgccgccuacuacgugggguaccugcagccccgcaccuuccugcucaaguacaacgagaacggcaccaucacggacgcggucgacugcgcccuggacccccugagcgagaccaagugcacccucaaguccuucaccguggagaaggggaucuaccagacgagcaacuuccgggugcagcccaccgaguccaucguccgcuucccgaacaucaccaaccugugccccuucggcgagguguucaacgccacccgguucgccagcgucuacgccuggaaccgcaagcggaucuccaacugcguggcggacuacagcgugcuguacaacuccgccagcuucuccacguucaagugcuacggcgucagccccaccaagcucaacgaccugugcuucaccaacguguacgccgacuccuucgugauccgcggggacgagguccggcagaucgcccccggccagaccgggaagaucgccgacuacaacuacaagcugccggacgacuucacgggcugcgugaucgcguggaacagcaacaaccucgacuccaaggucgggggcaacuacaacuaccuguaccgccuguuccgcaagagcaaccucaagcccuucgagcgggacaucuccaccgagaucuaccaggccggcagcacccccugcaacgggguggagggcuucaacugcuacuucccccugcaguccuacggguuccagccgaccaacggcgugggguaccagcccuaccggguggucgugcugagcuucgagcuccugcacgcccccgccacggugugcggccccaagaaguccaccaaccuggucaagaacaagugcgugaacuucaacuucaacggccucaccgggaccggcgugcugaccgagagcaacaagaaguuccugccguuccagcaguucgggcgcgacaucgccgacacgaccgacgcgguccgcgacccccagacccuggagauccucgacaucacccccugcagcuucggcgggguguccgugaucacgccgggcaccaacaccagcaaccaggucgccgugcuguaccagggcgugaacugcaccgagguccccguggccauccacgccgaccagcugacgcccaccuggcggguguacuccaccgggagcaacgucuuccagacccgcgccggcugccucaucggggcggagcacgugaacaacuccuacgagugcgacauccccaucggcgccggcaucugcgccagcuaccagacgcagaccaacuccccgcggcgcgcccggagcguggcgucccagagcaucaucgccuacaccaugucccugggggccgagaacagcgucgccuacuccaacaacagcaucgccauccccaccaacuucacgaucuccgugaccaccgagauccugcccgugagcaugaccaagacgagcgucgacugcaccauguacaucugcggcgacuccaccgagugcagcaaccuccugcugcaguacggguccuucugcacccagcucaaccgcgcgcugacgggcaucgccguggagcaggacaagaacacccaggagguguucgcccaggucaagcagaucuacaagacgcccccgaucaaggacuucgggggcuucaacuucagccagauccugcccgaccccuccaagcccagcaagcgguccuucaucgaggaccuccuguucaacaaggugacccuggccgacgccggcuucaucaagcaguacggggacugccucggcgacaucgcggcccgcgaccugaucugcgcccagaaguucaacgggcugaccgugcucccgccccugcugaccgacgagaugaucgcccaguacaccagcgcccuccuggcgggcaccaucacguccggguggaccuucggcgccggcgccgcccugcagauccccuucgcgaugcagauggccuaccgguucaacgggaucggcgucacccagaacgugcucuacgagaaccagaagcugaucgccaaccaguucaacagcgccaucgggaagauccaggacucccugagcuccaccgcccccgcgcucggcaagcugcaggacguggucaaccagaacgcccaggcccugaacacgcucgugaagcagcugagcuccaacuucggggccaucagcuccgugcugaacgacauccucagccgccuggacaaggucgaggccgaggugcagaucgaccggcugaucaccggccgccuccagucccugcagaccuacgugacccagcagcugauccgggcggccgagauccgcgccagcgccaaccucgccgcgaccaagaugagcgagugcguccugggccaguccaagcggguggacuucugcgggaagggcuaccaccugaugagcuucccgcaguccgcgccccacgggguggucuuccuccacgugacguacguccccgcccaggagaagaacuucaccaccgcccccgccaucugccacgacggcaaggcccacuucccgcgcgaggggguguucgugagcaacggcacccacugguucgucacgcagcggaacuucuacgagccccagaucaucaccaccgacaacaccuucguguccggcaacugcgacguggucaucgggaucgugaacaacacgguguacgacccccugcagcccgagcuggacagcuucaaggaggagcucgacaaguacuucaagaaccacaccuccccggacgucgaccugggcgacaucagcgggaucaacgccuccguggugaacauccagaaggagaucgaccgccugaacgaggucgccaagaaccucaacgagagccugaucgaccugcaggagcucggcaaguacgagcaguacaucaaguggcccugguacaucuggcugggcuucaucgccgggcugaucgcgaucgugauggugaccaucaugcucugcugcaugaccuccugcugcagcugccugaagggcugcugcuccugcgggagcugcugcaaguucgacgaggacgacuccgagcccguccugaagggcgugaagcuccacuacacguga

SEQ ID NO: 11758 - RNA, 3822 nt, Artificial Sequence
  SARS-CoV-2/Germany/BavPat3/2020__EPI_ISL_414521 spike protein CDS gc (1-1273)
auguucguguuccugguccuccugccccuggugagcucccagugcgugaaccucaccacccgcacgcagcugccgcccgccuacaccaacagcuucacccggggcgucuacuaccccgacaagguguuccgcuccagcgugcugcacuccacccaggaccucuuccugcccuucuucagcaacgucacgugguuccacgccauccacguguccgggaccaacggcaccaagcgguucgacaacccggugcugcccuucaacgacggggucuacuucgcgagcaccgagaaguccaacaucauccgcggcuggaucuucgggacgacccucgacagcaagacccagucccugcugaucgugaacaacgccaccaacguggucaucaaggugugcgaguuccaguucugcaacgaccccuuccucggcguguacuaccacaagaacaacaagagcuggauggaguccgaguuccgggucuacagcuccgccaacaacugcacguucgaguacgugagccagcccuuccugauggaccuggagggcaagcaggggaacuucaagaaccuccgcgaguucguguucaagaacaucgacggcuacuucaagaucuacuccaagcacaccccgaucaaccugguccgggaccugccccagggguucagcgcccucgagccccugguggaccugcccaucggcaucaacaucacccgcuuccagacccuccuggcccugcaccgguccuaccucacgccgggggacagcagcuccggcuggaccgcgggcgccgccgccuacuacgugggguaccugcagccccgcaccuuccugcucaaguacaacgagaacggcaccaucacggacgcggucgacugcgcccuggacccccugagcgagaccaagugcacccucaaguccuucaccguggagaaggggaucuaccagacgagcaacuuccgggugcagcccaccgaguccaucguccgcuucccgaacaucaccaaccugugccccuucggcgagguguucaacgccacccgguucgccagcgucuacgccuggaaccgcaagcggaucuccaacugcguggcggacuacagcgugcuguacaacuccgccagcuucuccacguucaagugcuacggcgucagccccaccaagcucaacgaccugugcuucaccaacguguacgccgacuccuucgugauccgcggggacgagguccggcagaucgcccccggccagaccgggaagaucgccgacuacaacuacaagcugccggacgacuucacgggcugcgugaucgcguggaacagcaacaaccucgacuccaaggucgggggcaacuacaacuaccuguaccgccuguuccgcaagagcaaccucaagcccuucgagcgggacaucuccaccgagaucuaccaggccggcagcacccccugcaacgggguggagggcuucaacugcuacuucccccugcaguccuacggguuccagccgaccaacggcgugggguaccagcccuaccggguggucgugcugagcuucgagcuccugcacgcccccgccacggugugcggccccaagaaguccaccaaccuggucaagaacaagugcgugaacuucaacuucaacggccucaccgggaccggcgugcugaccgagagcaacaagaaguuccugccguuccagcaguucgggcgcgacaucgccgacacgaccgacgcgguccgcgacccccagacccuggagauccucgacaucacccccugcagcuucggcgggguguccgugaucacgccgggcaccaacaccagcaaccaggucgccgugcuguaccaggacgugaacugcaccgagguccccguggccauccacgccgaccagcugacgcccaccuggcggguguacuccaccggcagcaacgucuuccagacccgcgccgggugccucaucggcgcggagcacgugaacaacuccuacgagugcgacauccccaucggggccggcaucugcgccagcuaccagacgcagaccaacuccccgcggcgcgcccggagcguggcgucccagagcaucaucgccuacaccaugucccugggcgccgagaacagcgucgccuacuccaacaacagcaucgccauccccaccaacuucacgaucuccgugaccaccgagauccugcccgugagcaugaccaagacgagcgucgacugcaccauguacaucugcggggacuccaccgagugcagcaaccuccugcugcaguacggcuccuucugcacccagcucaaccgcgcgcugacggggaucgccguggagcaggacaagaacacccagcaggucuucgcccaggugaagcagaucuacaagacgcccccgaucaaggacuucggcggguucaacuucagccagauccugcccgaccccuccaagcccagcaagcgguccuucaucgaggaccuccuguucaacaaggugacccuggccgacgccggcuucaucaagcaguacggcgacugccucggggacaucgcggcccgcgaccugaucugcgcccagaaguucaacggccugaccgugcucccgccccugcugaccgacgagaugaucgcccaguacaccagcgcccuccuggcggggaccaucacguccggcuggaccuucggggccggcgccgcccugcagauccccuucgcgaugcagauggccuaccgguucaacggcaucggggucacccagaacgugcucuacgagaaccagaagcugaucgccaaccaguucaacagcgccaucggcaagauccaggacucccugagcuccaccgccagcgcgcucgggaagcugcaggacguggucaaccagaacgcccaggcccugaacacgcucgugaagcagcuguccagcaacuucggcgccaucuccagcgugcugaacgacauccucucccgccuggacaaggucgaggccgaggugcagaucgaccggcugaucaccgggcgccuccagagccugcagaccuacgugacccagcagcugauccgggcggccgagauccgcgccagcgccaaccucgccgcgaccaagauguccgagugcguccugggccagagcaagcggguggacuucugcggcaagggguaccaccugauguccuucccccagagcgccccgcacggcguggucuuccuccacgugacguacguccccgcccaggagaagaacuucaccaccgcccccgcgaucugccacgacgggaaggcccacuucccccgcgagggcguguucguguccaacgggacccacugguucgucacgcagcggaacuucuacgagccgcagaucaucaccaccgacaacaccuucgugagcggcaacugcgacguggucaucggcaucgugaacaacacgguguacgacccccugcagcccgagcuggacuccuucaaggaggagcucgacaaguacuucaagaaccacaccagccccgacgucgaccugggggacaucuccggcaucaacgccagcguggugaacauccagaaggagaucgaccgccugaacgaggucgccaagaaccucaacgagucccugaucgaccugcaggagcucgggaaguacgagcaguacaucaaguggccgugguacaucuggcugggcuucaucgccggccugaucgcgaucgugauggugaccaucaugcucugcugcaugaccagcugcugcuccugccugaaggggugcugcagcugcggcuccugcugcaaguucgacgaggacgacagcgagcccguccugaagggggugaagcuccacuacacguga

SEQ ID NO: 11759 - RNA, 3822 nt, Artificial Sequence
  SARS-CoV-2/France/HF1805/2020__EPI_ISL_414628 spike protein CDS gc (1-1273)
auguucguguuccugguccuccugccccuggugagcucccagugcgugaaccucaccacccgcacgcagcugccgcccgccuacaccaacagcuucacccggggcgucuacuaccccgacaagguguuccgcuccagcgugcugcacuccacccaggaccucuuccugcccuucuucagcaacgucacgugguuccacgccauccacguguccgggaccaacggcaccaagcgguucgacaacccggugcugcccuucaacgacggggucuacuucgcgagcaccgagaaguccaacaucauccgcggcuggaucuucgggacgacccucgacagcaagacccagucccugcugaucgugaacaacgccaccaacguggucaucaaggugugcgaguuccaguucugcaacgaccccuuccucggcguguacuaccacaagaacaacaagagcuggauggaguccgaguuccgggucuacagcuccgccaacaacugcacguucgaguacgugagccagcccuuccugauggaccuggagggcaagcaggggaacuucaagaaccuccgcgaguucguguucaagaacaucgacggcuacuucaagaucuacuccaagcacaccccgaucaaccugguccgggaccugccccagggguucagcgcccucgagccccugguggaccugcccaucggcaucaacaucacccgcuuccagacccuccuggcccugcaccgguccuaccucacgccgggggacagcagcuccggcuggaccgcgggcgccgccgccuacuacgugggguaccugcagccccgcaccuuccugcucaaguacaacgagaacggcaccaucacggacgcggucgacugcgcccuggacccccugagcgagaccaagugcacccucaaguccuucaccguggagaaggggaucuaccagacgagcaacuuccgggugcagcccaccgaguccaucguccgcuucccgaacaucaccaaccugugccccuucggcgagguguucaacgccacccgguucgccagcgucuacgccuggaaccgcaagcggaucuccaacugcguggcggacuacagcgugcuguacaacuccgccagcuucuccacguucaagugcuacggcgucagccccaccaagcucaacgaccugugcuucaccaacguguacgccgacuccuucgugauccgcggggacgagguccggcagaucgcccccggccagaccgggaagaucgccgacuacaacuacaagcugccggacgacuucacgggcugcgugaucgcguggaacagcaacaaccucgacuccaaggucgggggcaacuacaacuaccuguaccgccuguuccgcaagagcaaccucaagcccuucgagcgggacaucuccaccgagaucuaccaggccggcagcacccccugcaacgggguggagggcuucaacugcuacuucccccugcaguccuacggguuccagccgaccaacggcgugggguaccagcccuaccggguggucgugcugagcuucgagcuccugcacgcccccgccacggugugcggccccaagaaguccaccaaccuggucaagaacaagugcgugaacuucaacuucaacggccucaccgggaccggcgugcugaccgagagcaacaagaaguuccugccguuccagcaguucgggcgcgacaucgccgacacgaccgacgcgguccgcgacccccagacccuggagauccucgacaucacccccugcagcuucggcgggguguccgugaucacgccgggcaccaacaccagcaaccaggucgccgugcuguaccagggcgugaacugcaccgagguccccguggccauccacgccgaccagcugacgcccaccuggcggguguacuccaccgggagcaacgucuuccagacccgcgccggcugccucaucggggcggagcacgugaacaacuccuacgagugcgacauccccaucggcgccggcaucugcgccagcuaccagacgcagaccaacuccccgcggcgcgcccggagcguggcgucccagagcaucaucgccuacaccaugucccugggggccgagaacagcgucgccuacuccaacaacagcaucgccauccccaccaacuucacgaucuccgugaccaccgagauccugcccgugagcaugaccaagacgagcgucgacugcaccauguacaucugcggcgacuccaccgagugcagcaaccuccugcugcaguacggguccuucugcacccagcucaaccgcgcgcugacgggcaucgccguggagcaggacaagaacacccaggagguguucgcccaggucaagcagaucuacaagacgcccccgaucaaggacuucgggggcuucaacuucagccagauccugcccgaccccuccaagcccagcaagcgguccuucaucgaggaccuccuguucaacaaggugacccuggccgacgccggcuucaucaagcaguacggggacugccucggcgacaucgcggcccgcgaccugaucugcgcccagaaguucaacgggcugaccgugcucccgccccugcugaccgacgagaugaucgcccaguacaccagcgcccuccuggcgggcaccaucacguccggguggaccuucggcgccggcgccgcccugcagauccccuucgcgaugcagauggccuaccgguucaacgggaucggcgucacccagaacgugcucuacgagaaccagaagcugaucgccaaccaguucaacagcgccaucgggaagauccaggacucccugagcuccaccgccagcgcgcucggcaagcugcaggacguggucaaccagaacgcccaggcccugaacacgcucgugaagcagcuguccagcaacuucggggccaucuccagcgugcugaacgacauccucucccgccuggacaaggucgaggccgaggugcagaucgaccggcugaucaccggccgccuccagagccugcagaccuacgugacccagcagcugauccgggcggccgagauccgcgccagcgccaaccucgccgcgaccaagauguccgagugcguccugggccagagcaagcggguggacuucugcgggaagggcuaccaccugauguccuucccccagagcgccccgcacgggguggucuuccuccacgugacguacguccccgcccaggagaagaacuucaccaccgcccccgcgaucugccacgacggcaaggcccacuucccccgcgaggggguguucguguccaacggcacccacugguucgucacgcagcggaacuucuacgagccgcagaucaucaccaccgacaacaccuucgugagcggcaacugcgacguggucaucgggguggugaacaacacggucuacgacccccugcagcccgagcuggacuccuucaaggaggagcucgacaaguacuucaagaaccacaccagccccgacguggaccugggcgacaucuccgggaucaacgccagcguggucaacauccagaaggagaucgaccgccugaacgagguggccaagaaccucaacgagucccugaucgaccugcaggagcucggcaaguacgagcaguacaucaaguggccgugguacaucuggcugggcuucaucgccgggcugaucgcgaucgugauggucaccaucaugcucugcugcaugaccagcugcugcuccugccugaagggcugcugcagcugcggguccugcugcaaguucgacgaggacgacagcgagcccgugcugaagggcgugaagcuccacuacacguga

SEQ ID NO: 11760 - RNA, 3822 nt, Artificial Sequence
  SARS-CoV-2/Netherlands/ZuidHolland_9/2020__EPI_ISL_414445 spike protein CDS gc (1-1273)
auguucguguuccugguccuccugccccuggugagcucccagugcgugaaccucaccacccgcacgcagcugccgcccgccuacaccaacagcuucacccggggcgucuacuaccccgacaagguguuccgcuccagcgugcugcacuccacccaggaccucuuccugcccuucuucagcaacgucacgugguuccacgccauccacguguccgggaccaacggcaccaagcgguucgacaacccggugcugcccuucaacgacggggucuacuucgcgagcaccgagaaguccaacaucauccgcggcuggaucuucgggacgacccucgacagcaagacccagucccugcugaucgugaacaacgccaccaacguggucaucaaggugugcgaguuccaguucugcaacgaccccuuccucggcguguacuaccacaagaacaacaagagcuggauggaguccgaguuccgggucuacagcuccgccaacaacugcacguucgaguacgugagccagcccuuccugauggaccuggagggcaagcaggggaacuucaagaaccuccgcgaguucguguucaagaacaucgacggcuacuucaagaucuacuccaagcacaccccgaucaaccugguccgggaccugccccagggguucagcgcccucgagccccugguggaccugcccaucggcaucaacaucacccgcuuccagacccuccuggcccugcaccgguccuaccucacgccgggggacagcagcuccggcuggaccgcgggcgccgccgccuacuacgugggguaccugcagccccgcaccuuccugcucaaguacaacgagaacggcaccaucacggacgcggucgacugcgcccuggacccccugagcgagaccaagugcacccucaaguccuucaccguggagaaggggaucuaccagacgagcaacuuccgggugcagcccaccgaguccaucguccgcuucccgaacaucaccaaccugugccccuucggcgagguguucaacgccacccgguucgccagcgucuacgccuggaaccgcaagcggaucuccaacugcguggcggacuacagcgugcuguacaacuccgccagcuucuccacguucaagugcuacggcgucagccccaccaagcucaacgaccugugcuucaccaacguguacgccgacuccuucgugauccgcggggacgagguccggcagaucgcccccggccagaccgggaagaucgccgacuacaacuacaagcugccggacgacuucacgggcugcgugaucgcguggaacagcaacaaccucgacuccaaggucgggggcaacuacaacuaccuguaccgccuguuccgcaagagcaaccucaagcccuucgagcgggacaucuccaccgagaucuaccaggccggcagcacccccugcaacgggguggagggcuucaacugcuacuucccccugcaguccuacggguuccagccgaccaacggcgugggguaccagcccuaccggguggucgugcugagcuucgagcuccugcacgcccccgccacggugugcggccccaagaaguccaccaaccuggucaagaacaagugcgugaacuucaacuucaacggccucaccgggaccggcgugcugaccgagagcaacaagaaguuccugccguuccagcaguucgggcgcgacaucgccgacacgaccgacgcgguccgcgacccccagacccuggagauccucgacaucacccccugcagcuucggcgggguguccgugaucacgccgggcaccaacaccagcaaccaggucgccgugcuguaccagggcgugaacugcaccgagguccccguggccauccacgccgaccagcugacgcccaccuggcggguguacuccaccgggagcaacgucuuccagacccgcgccggcugccucaucggggcggagcacgugaacaacuccuacgagugcgacauccccaucggcgccggcaucugcgccagcuaccagacgcagaccaacuccccgcggcgcgcccggagcguggcgucccagagcaucaucgccuacaccaugucccugggggccgagaacagcgucgccuacuccaacaacagcaucgccauccccaccaacuucacgaucuccgugaccaccgagauccugcccgugagcaugaccaagacgagcgucgacugcaccauguacaucugcggcgacuccaccgagugcagcaaccuccugcugcaguacggguccuucugcacccagcucaaccgcgcgcugacgggcaucgccguggagcaggacaagaacacccaggagguguucgcccaggucaagcagaucuacaagacgcccccgaucaaggacuucgggggcuucaacuucagccagauccugcccgaccccuccaagcccagcaagcgguccuucaucgaggaccuccuguucaacaaggugacccuggccgacgccggcuucaucaagcaguacggggacugccucggcgacaucgcggcccgcgaccugaucugcgugcagaaguucaacgggcugaccguccucccgccccugcugaccgacgagaugaucgcccaguacaccagcgcccuccuggccggcaccaucacguccggguggaccuucggcgcgggcgccgcccugcagauccccuucgccaugcagauggcguaccgguucaacgggaucggcgugacccagaacgugcucuacgagaaccagaagcugaucgccaaccaguucaacagcgccaucgggaagauccaggacucccugagcuccaccgccagcgcccucggcaagcugcaggacgucgugaaccagaacgcgcaggcccugaacacgcucgugaagcagcuguccagcaacuucggggccaucuccagcguccugaacgacauccucucccgccuggacaagguggaggccgaggugcagaucgaccggcugaucaccggccgccuccagagccugcagaccuacgucacccagcagcugauccgggccgcggagauccgcgccagcgccaaccucgccgccaccaagauguccgagugcgugcugggccagagcaagcggguggacuucugcgggaagggcuaccaccugauguccuucccccagagcgcgccgcacggggucguguuccuccacgucacguacgugcccgcccaggagaagaacuucaccaccgcccccgccaucugccacgacggcaaggcgcacuucccccgcgaggggguguucgucuccaacggcacccacugguucgugacgcagcggaacuucuacgagccgcagaucaucaccaccgacaacaccuucgugagcggcaacugcgacgucgugaucgggaucgugaacaacacggucuacgacccccugcagcccgagcuggacuccuucaaggaggagcucgacaaguacuucaagaaccacaccagccccgacguggaccugggcgacaucuccgggaucaacgccagcguggucaacauccagaaggagaucgaccgccugaacgagguggccaagaaccucaacgagucccugaucgaccugcaggagcucggcaaguacgagcaguacaucaaguggccgugguacaucuggcugggcuucaucgccgggcugaucgccaucgugauggucaccaucaugcucugcugcaugaccagcugcugcuccugccugaagggcugcugcagcugcggguccugcugcaaguucgacgaggacgacagcgagcccgugcugaagggcgugaagcuccacuacacguga

SEQ ID NO: 11761 - RNA, 3822 nt, Artificial Sequence
  SARS-CoV-2/Finland/FIN03032020A/2020__EPI_ISL_413602 spike protein CDS gc (1-1273)
auguucguguuccugguccuccugccccuggugagcucccagugcgugaaccucaccacccgcacgcagcugccgcccgccuacaccaacagcuucacccggggcgucuacuaccccgacaagguguuccgcuccagcgugcugcacuccacccaggaccucuuccugcccuucuucagcaacgucacgugguuccacgccauccacguguccgggaccaacggcaccaagcgguucgacaacccggugcugcccuucaacgacggggucuacuucgcgagcaccgagaaguccaacaucauccgcggcuggaucuucgggacgacccucgacagcaagacccagucccugcugaucgugaacaacgccaccaacguggucaucaaggugugcgaguuccaguucugcaacgaccccuuccucggcguguacuaccacaagaacaacaagagcuggauggaguccgaguuccgggucuacagcuccgccaacaacugcacguucgaguacgugagccagcccuuccugauggaccuggagggcaagcaggggaacuucaagaaccuccgcgaguucguguucaagaacaucgacggcuacuucaagaucuacuccaagcacaccccgaucaaccugguccgggaccugccccagggguucagcgcccucgagccccugguggaccugcccaucggcaucaacaucacccgcuuccagacccuccuggcccugcaccgguccuaccucacgccgggggacagcagcuccggcuggaccgcgggcgccgccgccuacuacgugggguaccugcagccccgcaccuuccugcucaaguacaacgagaacggcaccaucacggacgcggucgacugcgcccuggacccccugagcgagaccaagugcacccucaaguccuucaccguggagaaggggaucuaccagacgagcaacuuccgggugcagcccaccgaguccaucguccgcuucccgaacaucaccaaccugugccccuucggcgagguguucaacgccacccgguucgccagcgucuacgccuggaaccgcaagcggaucuccaacugcguggcggacuacagcgugcuguacaacuccgccagcuucuccacguucaagugcuacggcgucagccccaccaagcucaacgaccugugcuucaccaacguguacgccgacuccuucgugauccgcggggacgagguccggcagaucgcccccggccagaccgggaagaucgccgacuacaacuacaagcugccggacgacuucacgggcugcgugaucagcuggaacuccaacaaccucgacagcaaggucgggggcaacuacaacuaccuguaccgccuguuccggaaguccaaccucaagcccuucgagcgcgacaucagcaccgagaucuaccaggcgggcuccacccccugcaacgggguggagggcuucaacugcuacuucccccugcagagcuacggguuccagccgaccaacggcgugggguaccagcccuaccggguggucgugcugagcuucgagcuccugcacgcccccgccacggugugcggccccaagaaguccaccaaccuggucaagaacaagugcgugaacuucaacuucaacggccucaccgggaccggcgugcugaccgagagcaacaagaaguuccugccguuccagcaguucgggcgcgacaucgccgacacgaccgacgccguccgcgacccccagacccuggagauccucgacaucacccccugcuccuucggcggggugagcgugaucacgccgggcaccaacaccuccaaccaggucgcggugcuguaccagggcgugaacugcaccgagguccccguggccauccacgccgaccagcugacgcccaccuggcggguguacagcaccggguccaacgucuuccagacccgcgccggcugccucaucggggccgagcacgugaacaacagcuacgagugcgacauccccaucggcgcgggcaucugcgccuccuaccagacgcagaccaacagcccgcggcgcgcccgguccguggccagccaguccaucaucgcguacaccaugagccugggggccgagaacuccgucgccuacagcaacaacuccaucgccauccccaccaacuucacgaucagcgugaccaccgagauccugcccgugagcaugaccaagacguccgucgacugcaccauguacaucugcggcgacagcaccgagugcuccaaccuccugcugcaguacgggagcuucugcacccagcucaaccgcgcccugacgggcaucgcgguggagcaggacaagaacacccaggagguguucgcccaggucaagcagaucuacaagacgcccccgaucaaggacuucgggggcuucaacuucucccagauccugcccgaccccagcaagcccuccaagcggagcuucaucgaggaccuccuguucaacaaggugacccuggccgacgccggcuucaucaagcaguacggggacugccucggcgacaucgccgcgcgcgaccugaucugcgcccagaaguucaacgggcugaccgugcucccgccccugcugaccgacgagaugaucgcccaguacaccuccgcccuccuggccggcaccaucacgagcggguggaccuucggcgcgggcgccgcccugcagauccccuucgccaugcagauggcguaccgguucaacgggaucggcgucacccagaacgugcucuacgagaaccagaagcugaucgccaaccaguucaacuccgccaucgggaagauccaggacagccuguccagcaccgccuccgcccucggcaagcugcaggacguggucaaccagaacgcgcaggcccugaacacgcucgugaagcagcugagcuccaacuucggggccaucagcuccgugcugaacgacauccucagccgccuggacaaggucgaggccgaggugcagaucgaccggcugaucaccggccgccuccagagccugcagaccuacgugacccagcagcugauccgggccgcggagauccgcgccuccgccaaccucgccgccaccaagaugagcgagugcguccugggccaguccaagcggguggacuucugcgggaagggcuaccaccugaugagcuucccccaguccgcgccgcacgggguggucuuccuccacgugacguacguccccgcccaggagaagaacuucaccaccgcccccgccaucugccacgacggcaaggcgcacuucccccgcgaggggguguucgugagcaacggcacccacugguucgucacgcagcggaacuucuacgagccgcagaucaucaccaccgacaacaccuucguguccggcaacugcgacguggucaucgggaucgugaacaacacgguguacgacccccugcagcccgagcuggacagcuucaaggaggagcucgacaaguacuucaagaaccacaccucccccgacgucgaccugggcgacaucagcgggaucaacgccuccguggugaacauccagaaggagaucgaccgccugaacgaggucgccaagaaccucaacgagagccugaucgaccugcaggagcucggcaaguacgagcaguacaucaaguggccgugguacaucuggcugggcuucaucgccgggcugaucgccaucgugauggugaccaucaugcucugcugcaugaccuccugcugcagcugccugaagggcugcugcuccugcgggagcugcugcaaguucgacgaggacgacuccgagcccguccugaagggcgugaagcuccacuacacguga

SEQ ID NO: 11762 - RNA, 3822 nt, Artificial Sequence
  SARS-CoV-2/France/GE1977/2020__EPI_ISL_414632 spike protein CDS gc (1-1273)
auguucguguuccugguccuccugccccuggugagcucccagugcgugaaccucaccacccgcacgcagcugccgcccgccuacaccaacagcuucacccggggcgucuacuaccccgacaagguguuccgcuccagcgugcugcacuccacccaggaccucuuccugcccuucuucagcaacgucacgugguuccacgccauccacguguccgggaccaacggcaccaagcgguucgacaacccggugcugcccuucaacgacggggucuacuucgcgagcaccgagaaguccaacaucauccgcggcuggaucuucgggacgacccucgacagcaagacccagucccugcugaucgugaacaacgccaccaacguggucaucaaggugugcgaguuccaguucugcaacgaccccuuccucggcguguacuaccacaagaacaacaagagcuggauggaguccgaguuccgggucuacagcuccgccaacaacugcacguucgaguacgugagccagcccuuccugauggaccuggagggcaagcaggggaacuucaagaaccuccgcgaguucguguucaagaacaucgacggcuacuucaagaucuacuccaagcacaccccgaucaaccugguccgggaccugccccagggguucagcgcccucgagccccugguggaccugcccaucggcaucaacaucacccgcuuccagacccuccuggcccugcaccgguccuaccucacgccgggggacagcagcuccggcuggaccgcgggcgccgccgccuacuacgugggguaccugcagccccgcaccuuccugcucaaguacaacgagaacggcaccaucacggacgcggucgacugcgcccuggacccccugagcgagaccaagugcacccucaaguccuucaccguggagaaggggaucuaccagacgagcaacuuccgggugcagcccaccgaguccaucguccgcuucccgaacaucaccaaccugugccccuucggcgagguguucaacgccacccgguucgccagcgucuacgccuggaaccgcaagcggaucuccaacugcguggcggacuacagcgugcuguacaacuccgccagcuucuccacguucaagugcuacggcgucagccccaccaagcucaacgaccugugcuucaccaacguguacgccgacuccuucgugauccgcggggacgagguccggcagaucgcccccggccagaccgggaagaucgccgacuacaacuacaagcugccggacgacuucacgggcugcgugaucgcguggaacagcaacaaccucgacuccaaggucgggggcaacuacaacuaccuguaccgccuguuccgcaagagcaaccucaagcccuucgagcgggacaucuccaccgagaucuaccaggccggcagcacccccugcaacgggguggagggcuucaacugcuacuucccccugcaguccuacggguuccagccgaccaacggcgugggguaccagcccuaccggguggucgugcugagcuucgagcuccugcacgcccccgccacggugugcggccccaagaaguccaccaaccuggucaagaacaagugcgugaacuucaacuucaacggccucaccgggaccggcgugcugaccgagagcaacaagaaguuccugccguuccagcaguucgggcgcgacaucgccgacacgaccgacgcgguccgcgacccccagacccuggagauccucgacaucacccccugcagcuucggcgggguguccgugaucacgccgggcaccaacaccagcaaccaggucgccgugcuguaccagggcgugaacugcaccgagguccccguggccauccacgccgaccagcugacgcccaccuggcggguguacuccaccgggagcaacgucuuccagacccgcgccggcugccucaucggggcggagcacgugaacaacuccuacgagugcgacauccccaucggcgccggcaucugcgccagcuaccagacgcagaccaacuccccgcggcgcgcccggagcguggcgucccagagcaucaucgccuacaccaugucccugggggccgagaacagcgucgccuacuccaacaacagcaucgccauccccaccaacuucacgaucuccgugaccaccgagauccugcccgugagcaugaccaagacgagcgucgacugcaccauguacaucugcggcgacuccaccgagugcagcaaccuccugcugcaguacggguccuucugcacccagcucaaccgcgcgcugacgggcaucgccguggagcaggacaagaacacccaggagguguucgcccaggucaagcagaucuacaagacgcccccgaucaaggacuucgggggcuucaacuucagccagauccugcccgaccccuccaagcccagcaagcgguccuucaucgaggaccuccuguucaacaaggugacccuggccgacgccggcuucaucaagcaguacggggacugccucggcgacaucgcggcccgcgaccugaucugcgcccagaaguucaacgggcugaccgugcucccgccccugcugaccgacgagaugaucgcccaguacaccagcgcccuccuggcgggcaccaucacguccggguggaccuucggcgccggcgccgcccugcagauccccuucgcgaugcagauggccuaccgguucaacgggaucggcgucacccagaacgugcucuacgagaaccagaagcugaucgccaaccaguucaacagcgccaucgggaagauccaggacucccuguucagcaccgccuccgcgcucggcaagcugcaggacguggucaaccagaacgcccaggcccugaacacgcucgugaagcagcugagcuccaacuucggggccaucagcuccgugcugaacgacauccucagccgccuggacaaggucgaggccgaggugcagaucgaccggcugaucaccggccgccuccagucccugcagaccuacgugacccagcagcugauccgggcggccgagauccgcgccagcgccaaccucgccgcgaccaagaugagcgagugcguccugggccaguccaagcggguggacuucugcgggaagggcuaccaccugaugagcuucccccaguccgccccgcacgggguggucuuccuccacgugacguacguccccgcccaggagaagaacuucaccaccgcccccgcgaucugccacgacggcaaggcccacuucccccgcgaggggguguucgugagcaacggcacccacugguucgucacgcagcggaacuucuacgagccgcagaucaucaccaccgacaacaccuucguguccggcaacugcgacguggucaucgggaucgugaacaacacgguguacgacccccugcagcccgagcuggacagcuucaaggaggagcucgacaaguacuucaagaaccacaccucccccgacgucgaccugggcgacaucagcgggaucaacgccuccguggugaacauccagaaggagaucgaccgccugaacgaggucgccaagaaccucaacgagagccugaucgaccugcaggagcucggcaaguacgagcaguacaucaaguggccgugguacaucuggcugggcuucaucgccgggcugaucgcgaucgugauggugaccaucaugcucugcugcaugaccuccugcugcagcugccugaagggcugcugcuccugcgggagcugcugcaaguucgacgaggacgacuccgagcccguccugaagggcgugaagcuccacuacacguga

SEQ ID NO: 11763 - RNA, 3822 nt, Artificial Sequence
  SARS-CoV-2/Finland/FIN-313/2020__EPI_ISL_414641 spike protein CDS gc (1-1273)
auguucguguuccugguccuccugccccuggugagcucccagugcgugaaccucaccacccgcacgcagcugccgcccgccuacaccaacagcuucacccggggcgucuacuaccccgacaagguguuccgcuccagcgugcugcacuccacccaggaccucuuccugcccuucuucagcaacgucacgugguuccacgccauccacguguccgggaccaacggcaccaagcgguucgacaacccggugcugcccuucaacgacggggucuacuucgcgagcaccgagaaguccaacaucauccgcggcuggaucuucgggacgacccucgacagcaagacccagucccugcugaucgugaacaacgccaccaacguggucaucaaggugugcgaguuccaguucugcaacgaccccuuccucggcguguacuaccacaagaacaacaagagcuggauggaguccgaguuccgggucuacagcuccgccaacaacugcacguucgaguacgugagccagcccuuccugauggaccuggagggcaagcaggggaacuucaagaaccuccgcgaguucguguucaagaacaucgacggcuacuucaagaucuacuccaagcacaccccgaucaaccugguccgggaccugccccagggguucagcgcccucgagccccugguggaccugcccaucggcaucaacaucacccgcuucaagacccuccuggcccugcaccgguccuaccucacgccgggggacagcagcuccggcuggaccgcgggcgccgccgccuacuacgugggguaccugcagccccgcaccuuccugcucaaguacaacgagaacggcaccaucacggacgcggucgacugcgcccuggacccccugagcgagaccaagugcacccucaaguccuucaccguggagaaggggaucuaccagacgagcaacuuccgggugcagcccaccgaguccaucguccgcuucccgaacaucaccaaccugugccccuucggcgagguguucaacgccacccgguucgccagcgucuacgccuggaaccgcaagcggaucuccaacugcguggcggacuacagcgugcuguacaacuccgccagcuucuccacguucaagugcuacggcgucagccccaccaagcucaacgaccugugcuucaccaacguguacgccgacuccuucgugauccgcggggacgagguccggcagaucgcccccggccagaccgggaagaucgccgacuacaacuacaagcugccggacgacuucacgggcugcgugaucgcguggaacagcaacaaccucgacuccaaggucgggggcaacuacaacuaccuguaccgccuguuccgcaagagcaaccucaagcccuucgagcgggacaucuccaccgagaucuaccaggccggcagcacccccugcaacgggguggagggcuucaacugcuacuucccccugcaguccuacggguuccagccgaccaacggcgugggguaccagcccuaccggguggucgugcugagcuucgagcuccugcacgcccccgccacggugugcggccccaagaaguccaccaaccuggucaagaacaagugcgugaacuucaacuucaacggccucaccgggaccggcgugcugaccgagagcaacaagaaguuccugccguuccagcaguucgggcgcgacaucgccgacacgaccgacgcgguccgcgacccccagacccuggagauccucgacaucacccccugcagcuucggcgggguguccgugaucacgccgggcaccaacaccagcaaccaggucgccgugcuguaccagggcgugaacugcaccgagguccccguggccauccacgccgaccagcugacgcccaccuggcggguguacuccaccgggagcaacgucuuccagacccgcgccggcugccucaucggggcggagcacgugaacaacuccuacgagugcgacauccccaucggcgccggcaucugcgccagcuaccagacgcagaccaacuccccgcggcgcgcccggagcguggcgucccagagcaucaucgccuacaccaugucccugggggccgagaacagcgucgccuacuccaacaacagcaucgccauccccaccaacuucacgaucuccgugaccaccgagauccugcccgugagcaugaccaagacgagcgucgacugcaccauguacaucugcggcgacuccaccgagugcagcaaccuccugcugcaguacggguccuucugcacccagcucaaccgcgcgcugacgggcaucgccguggagcaggacaagaacacccaggagguguucgcccaggucaagcagaucuacaagacgcccccgaucaaggacuucgggggcuucaacuucagccagauccugcccgaccccuccaagcccagcaagcgguccuucaucgaggaccuccuguucaacaaggugacccuggccgacgccggcuucaucaagcaguacggggacugccucggcgacaucgcggcccgcgaccugaucugcgcccagaaguucaacgggcugaccgugcucccgccccugcugaccgacgagaugaucgcccaguacaccagcgcccuccuggcgggcaccaucacguccggguggaccuucggcgccggcgccgcccugcagauccccuucgcgaugcagauggccuaccgguucaacgggaucggcgucacccagaacgugcucuacgagaaccagaagcugaucgccaaccaguucaacagcgccaucgggaagauccaggacucccugagcuccaccgccagcgcgcucggcaagcugcaggacguggucaaccagaacgcccaggcccugaacacgcucgugaagcagcuguccagcaacuucggggccaucuccagcgugcugaacgacauccucucccgccuggacaaggucgaggccgaggugcagaucgaccggcugaucaccggccgccuccagagccugcagaccuacgugacccagcagcugauccgggcggccgagauccgcgccagcgccaaccucgccgcgaccaagauguccgagugcguccugggccagagcaagcggguggacuucugcgggaagggcuaccaccugauguccuucccccagagcgccccgcacgggguggucuuccuccacgugacguacguccccgcccaggagaagaacuucaccaccgcccccgcgaucugccacgacggcaaggcccacuucccccgcgaggggguguucguguccaacggcacccacugguucgucacgcagcggaacuucuacgagccgcagaucaucaccaccgacaacaccuucgugagcggcaacugcgacguggucaucgggaucgugaacaacacgguguacgacccccugcagcccgagcuggacuccuucaaggaggagcucgacaaguacuucaagaaccacaccagccccgacgucgaccugggcgacaucuccgggaucaacgccagcguggugaacauccagaaggagaucgaccgccugaacgaggucgccaagaaccucaacgagucccugaucgaccugcaggagcucggcaaguacgagcaguacaucaaguggccgugguacaucuggcugggcuucaucgccgggcugaucgcgaucgugauggugaccaucaugcucugcugcaugaccagcugcugcuccugccugaagggcugcugcagcugcggguccugcugcaaguucgacgaggacgacagcgagcccguccugaagggcgugaagcuccacuacacguga

SEQ ID NO: 11764 - RNA, 3822 nt, Artificial Sequence
  SARS-CoV-2/Netherlands/ZuidHolland_2/2020__EPI_ISL_414556 spike protein CDS gc (1-1273)
auguucguguuccugguccuccugccccuggugagcucccagugcgugaaccucaccacccgcacgcagcugccgcccgccuacaccaacagcuucacccggggcgucuacuaccccgacaagguguuccgcuccagcgugcugcacuccacccaggaccucuuccugcccuucuucagcaacgucacgugguuccacgccauccacguguccgggaccaacggcaccaagcgguucgacaacccggugcugcccuucaacgacggggucuacuucgcgagcaccgagaaguccaacaucauccgcggcuggaucuucgggacgacccucgacagcaagacccagucccugcugaucgugaacaacgccaccaacguggucaucaaggugugcgaguuccaguucugcaacgaccccuuccucggcguguacuaccacaagaacaacaagagcuggauggaguccgaguuccgggucuacagcuccgccaacaacugcacguucgaguacgugagccagcccuuccugauggaccuggagggcaagcaggggaacuucaagaaccuccgcgaguucguguucaagaacaucgacggcuacuucaagaucuacuccaagcacaccccgaucaaccugguccgggaccugccccagggguucagcgcccucgagccccugguggaccugcccaucggcaucaacaucacccgcuuccagacccuccuggcccugcaccgguccuaccucacgccgggggacagcagcuccggcuggaccgcgggcgccgccgccuacuacgugggguaccugcagccccgcaccuuccugcucaaguacaacgagaacggcaccaucacggacgcggucgacugcgcccuggacccccugagcgagaccaagugcacccucaaguccuucaccguggagaaggggaucuaccagacgagcaacuuccgggugcagcccaccgaguccaucguccgcuucccgaacaucaccaaccugugccccuucggcgagguguucaacgccacccgguucgccagcgucuacgccuggaaccgcaagcggaucuccaacugcguggcggacuacagcgugcuguacaacuccgccagcuucuccacguucaagugcuacggcgucagccccaccaagcucaacgaccugugcuucaccaacguguacgccgacuccuucgugauccgcggggacgagguccggcagaucgcccccggccagaccgggaagaucgccgacuacaacuacaagcugccggacgacuucacgggcugcgugaucgcguggaacagcaacaaccucgacuccaaggucgggggcaacuacaacuaccuguaccgccuguuccgcaagagcaaccucaagcccuucgagcgggacaucuccaccgagaucuaccaggccggcagcacccccugcaacgggguggagggcuucaacugcuacuucccccugcaguccuacggguuccagccgaccaacggcgugggguaccagcccuaccggguggucgugcugagcuucgagcuccugcacgcccccgccacggugugcggccccaagaaguccaccaaccuggucaagaacaagugcgugaacuucaacuucaacggccucaccgggaccggcgugcugaccgagagcaacaagaaguuccugccguuccagcaguucgggcgcgacaucgccgacacgaccgacgcgguccgcgacccccagacccuggagauccucgacaucacccccugcagcuucggcgggguguccgugaucacgccgggcaccaacaccagcaaccaggucgccgugcuguaccagggcgugaacugcaccgagguccccguggccauccacgccgaccagcugacgcccaccuggcggguguacuccaccgggagcaacgucuuccagacccgcgccggcugccucaucggggcggagcacgugaacaacuccuacgagugcgacauccccaucggcgccggcaucugcgccagcuaccagacgcagaccaacuccccgcggcgcgcccggagcguggcgucccagagcaucaucgccuacaccaugucccugggggccgagaacagcgucgccuacuccaacaacagcaucgccauccccaccaacuucacgaucuccgugaccaccgagauccugcccgugagcaugaccaagacgagcgucgacugcaccauguacaucugcggcgacuccaccgagugcagcaaccuccugcugcaguacggguccuucugcacccagcucaaccgcgcgcugacgggcaucgcccuggagcaggacaagaacacccaggagguguucgcccaggugaagcagaucuacaagacgcccccgaucaaggacuucgggggcuucaacuucagccagauccuccccgaccccuccaagcccagcaagcgguccuucaucgaggaccugcuguucaacaaggucacccucgccgacgccggcuucaucaagcaguacggggacugccugggcgacaucgcggcccgcgaccugaucugcgcccagaaguucaacgggcucaccgugcugccgccccugcucaccgacgagaugaucgcccaguacaccagcgcccugcuggcgggcaccaucacguccggguggaccuucggcgccggcgccgcccuccagauccccuucgcgaugcagauggccuaccgguucaacgggaucggcgugacccagaacguccuguacgagaaccagaagcugaucgccaaccaguucaacagcgccaucgggaagauccaggacucccucagcuccaccgccagcgcgcugggcaagcugcaggacguggugaaccagaacgcccaggcccucaacacgcuggucaagcagcuguccagcaacuucggggccaucuccagcgugcucaacgacauccugucccgccuggacaagguggaggccgagguccagaucgaccggcucaucaccggccgccugcagagccugcagaccuacgugacccagcagcucauccgggcggccgagauccgcgccagcgccaaccuggccgcgaccaagauguccgagugcgugcugggccagagcaagcgggucgacuucugcgggaagggcuaccaccucauguccuucccccagagcgccccgcacggggugguguuccugcacgucacguacgugcccgcccaggagaagaacuucaccaccgcccccgcgaucugccacgacggcaaggcccacuucccccgcgagggggucuucguguccaacggcacccacugguucgugacgcagcggaacuucuacgagccgcagaucaucaccaccgacaacaccuucgucagcggcaacugcgacguggugaucgggaucgucaacaacacgguguacgacccccugcagcccgagcucgacuccuucaaggaggagcuggacaaguacuucaagaaccacaccagccccgacguggaccugggcgacaucuccgggaucaacgccagcgucgugaacauccagaaggagaucgaccgccucaacgagguggccaagaaccugaacgagucccugaucgaccuccaggagcugggcaaguacgagcaguacaucaaguggccgugguacaucuggcugggcuucaucgccgggcucaucgcgaucgucauggugaccaucaugcugugcugcaugaccagcugcugcuccugccugaagggcugcugcagcugcggguccugcugcaaguucgacgaggacgacagcgagcccgugcucaagggcgucaagcugcacuacacguga

SEQ ID NO: 11765 - RNA, 3822 nt, Artificial Sequence
  SARS-CoV-2/USA/WA-UW31/2020__EPI_ISL_414618 spike protein CDS gc (1-1273)
auguucguguuccugguccuccugccccuggugagcucccagugcgugaaccucaccacccgcacgcagcugccgcccgccuacaccaacagcuucacccggggcgucuacuaccccgacaagguguuccgcuccagcgugcugcacuccacccaggaccucuuccugcccuucuucagcaacgucacgugguuccacgccauccacguguccgggaccaacggcaccaagcgguucgacaacccggugcugcccuucaacgacggggucuacuucgcgagcaccgagaaguccaacaucauccgcggcuggaucuucgggacgacccucgacagcaagacccagucccugcugaucgugaacaacgccaccaacguggucaucaaggugugcgaguuccaguucugcaacgaccccuuccucggcguguacuaccacaagaacaacaagagcuggauggaguccgaguuccgggucuacagcuccgccaacaacugcacguucgaguacgugagccagcccuuccugauggaccuggagggcaagcaggggaacuucaagaaccuccgcgaguucguguucaagaacaucgacggcuacuucaagaucuacuccaagcacaccccgaucaaccugguccgggaccugccccagggguucagcgcccucgagccccugguggaccugcccaucggcaucaacaucacccgcuuccagacccuccuggcccugcaccgguccuaccucacgccgggggacagcagcuccggcuggaccgcgggcgccgccgccuacuacgugggguaccugcagccccgcaccuuccugcucaaguacaacgagaacggcaccaucacggacgcggucgacugcgcccuggacccccugagcgagaccaagugcacccucaaguccuucaccguggagaaggggaucuaccagacgagcaacuuccgggugcagcccaccgaguccaucguccgcuucccgaacaucaccaaccugugccccuucggcgagguguucaacgccacccgguucgccagcgucuacgccuggaaccgcaagcggaucuccaacugcguggcggacuacagcgugcuguacaacuccgccagcuucuccacguucaagugcuacggcgucagccccaccaagcucaacgaccugugcuucaccaacguguacgccgacuccuucgugauccgcggggacgagguccggcagaucgcccccggccagaccgggaagaucgccgacuacaacuacaagcugccggacgacuucacgggcugcgugaucgcguggaacagcaacaaccucgacuccaaggucgggggcaacuacaacuaccuguaccgccuguuccgcaagagcaaccucaagcccuucgagcgggacaucuccaccgagaucuaccaggccggcagcacccccugcaacggggccgagggcuucaacugcuacuucccccugcaguccuacggguuccagccgaccaacggcgugggguaccagcccuaccggguggugguccugagcuucgagcuccugcacgcccccgccacggugugcggccccaagaaguccaccaaccuggugaagaacaagugcgucaacuucaacuucaacggccucaccgggaccggcgugcugaccgagagcaacaagaaguuccugccguuccagcaguucgggcgcgacaucgcggacacgaccgacgccgugcgcgacccccagacccuggagauccucgacaucacccccugcagcuucggcggggucuccgugaucacgccgggcaccaacaccagcaaccagguggccguccuguaccaggacgugaacugcaccgaggugcccgucgccauccacgccgaccagcugacgcccaccuggcggguguacuccaccggcagcaacguguuccagacccgcgcggggugccucaucggcgccgagcacgucaacaacuccuacgagugcgacauccccaucggggccggcaucugcgccagcuaccagacgcagaccaacuccccgcggcgcgcgcggagcguggccucccagagcaucaucgccuacaccaugucccugggcgccgagaacagcguggccuacuccaacaacagcaucgcgauccccaccaacuucacgaucuccgucaccaccgagauccugcccgugagcaugaccaagacgagcguggacugcaccauguacaucugcggggacuccaccgagugcagcaaccuccugcugcaguacggcuccuucugcacccagcucaaccgcgcccugacggggaucgccgucgagcaggacaagaacacccaggagguguucgcccaggugaagcagaucuacaagacgcccccgaucaaggacuucggcggguucaacuucagccagauccugcccgaccccuccaagcccagcaagcgguccuucaucgaggaccuccuguucaacaaggucacccuggccgacgcgggcuucaucaagcaguacggcgacugccucggggacaucgccgcccgcgaccugaucugcgcccagaaguucaacggccugaccgugcucccgccccugcugaccgacgagaugaucgcccaguacaccagcgcgcuccuggccgggaccaucacguccggcuggaccuucggggccggcgccgcgcugcagauccccuucgccaugcagauggccuaccgguucaacggcaucggggugacccagaacguccucuacgagaaccagaagcugaucgccaaccaguucaacagcgccaucggcaagauccaggacucccugagcuccaccgcgagcgcccucgggaagcugcaggacguggugaaccagaacgcccaggcccugaacacgcucgucaagcagcuguccagcaacuucggcgccaucuccagcgugcugaacgacauccucucccgccuggacaagguggaggcggagguccagaucgaccggcugaucaccgggcgccuccagagccugcagaccuacgugacccagcagcugauccgggccgccgagauccgcgccagcgccaaccucgcggccaccaagauguccgagugcgugcugggccagagcaagcgggucgacuucugcggcaagggguaccaccugauguccuucccccagagcgccccgcacggcgugguguuccuccacgucacguacgugcccgcccaggagaagaacuucaccaccgcgcccgccaucugccacgacgggaaggcccacuucccccgcgagggcgucuucguguccaacgggacccacugguucgugacgcagcggaacuucuacgagccgcagaucaucaccaccgacaacaccuucgucagcggcaacugcgacguggugaucggcaucgucaacaacacgguguacgacccccugcagcccgagcuggacuccuucaaggaggagcucgacaaguacuucaagaaccacaccagccccgacguggaccugggggacaucuccggcaucaacgccagcgucgugaacauccagaaggagaucgaccgccugaacgagguggccaagaaccucaacgagucccugaucgaccugcaggagcucgggaaguacgagcaguacaucaaguggccgugguacaucuggcugggcuucaucgcgggccugaucgccaucgucauggugaccaucaugcucugcugcaugaccagcugcugcuccugccugaaggggugcugcagcugcggcuccugcugcaaguucgacgaggacgacagcgagcccgugcugaagggggucaagcuccacuacacguga

SEQ ID NO: 11766 - RNA, 3822 nt, Artificial Sequence
  SARS-CoV-2/South Korea/SNU01/2020__EPI_ISL_411929 spike protein CDS gc (1-1273)
auguucguguuccugguccuccugccccuggugagcucccagugcgugaaccucaccacccgcacgcagcugccgcccgccuacaccaacagcuucacccggggcgucuacuaccccgacaagguguuccgcuccagcgugcugcacuccacccaggaccucuuccugcccuucuucagcaacgucacgugguuccacgccauccacguguccgggaccaacggcaccaagcgguucgacaacccggugcugcccuucaacgacggggucuacuucgcgagcaccgagaaguccaacaucauccgcggcuggaucuucgggacgacccucgacagcaagacccagucccugcugaucgugaacaacgccaccaacguggucaucaaggugugcgaguuccaguucugcaacgaccccuuccucggcguguacuaccacaagaacaacaagagcuggauggaguccgaguuccgggucuacagcuccgccaacaacugcacguucgaguacgugagccagcccuuccugauggaccuggagggcaagcaggggaacuucaagaaccuccgcgaguucguguucaagaacaucgacggcuacuucaagaucuacuccaagcacaccccgaucaaccugguccgggaccugccccagggguucugggcccucgagccccugguggaccugcccaucggcaucaacaucacccgcuuccagacccuccuggcccugcaccggagcuaccucacgccgggggacuccagcagcggcuggaccgcgggcgccgccgccuacuacgugggguaccugcagccccgcaccuuccugcucaaguacaacgagaacggcaccaucacggacgcggucgacugcgcccuggacccccuguccgagaccaagugcacccucaagagcuucaccguggagaaggggaucuaccagacguccaacuuccgggugcagcccaccgagagcaucguccgcuucccgaacaucaccaaccugugccccuucggcgagguguucaacgccacccgguucgccuccgucuacgccuggaaccgcaagcggaucagcaacugcguggcggacuacuccgugcuguacaacagcgccuccuucagcacguucaagugcuacggcgucucccccaccaagcucaacgaccugugcuucaccaacguguacgccgacagcuucgugauccgcggggacgagguccggcagaucgcccccggccagaccgggaagaucgccgacuacaacuacaagcugccggacgacuucacgggcugcgugaucgcguggaacuccaacaaccucgacagcaaggucgggggcaacuacaacuaccuguaccgccuguuccggaaguccaaccucaagcccuucgagcgcgacaucagcaccgagaucuaccaggccggcuccacccccugcaacgggguggagggcuucaacugcuacuucccccugcagagcuacggguuccagccgaccaacggcgugggguaccagcccuaccggguggucgugcuguccuucgagcuccugcacgcccccgccacggugugcggccccaagaaguccaccaaccuggucaagaacaagugcgugaacuucaacuucaacggccucaccgggaccggcgugcugaccgagagcaacaagaaguuccugccguuccagcaguucgggcgcgacaucgccgacacgaccgacgcgguccgcgacccccagacccuggagauccucgacaucacccccugcagcuucggcggggugagcgugaucacgccgggcaccaacaccuccaaccaggucgccgugcuguaccaggacgugaacugcaccgagguccccguggccauccacgccgaccagcugacgcccaccuggcggguguacagcaccggcuccaacgucuuccagacccgcgccgggugccucaucggcgcggagcacgugaacaacagcuacgagugcgacauccccaucggggccggcaucugcgccuccuaccagacgcagaccaacagcccgcggcgcgcccgguccguggcgagccaguccaucaucgccuacaccaugagccugggcgccgagaacuccgucgccuacagcaacaacuccaucgccauccccaccaacuucacgaucagcgugaccaccgagauccugcccguguccaugaccaagacgagcgucgacugcaccauguacaucugcggggacagcaccgagugcuccaaccuccugcugcaguacggcagcuucugcacccagcucaaccgcgcgcugacggggaucgccguggagcaggacaagaacacccaggagguguucgcccaggucaagcagaucuacaagacgcccccgaucaaggacuucggcggguucaacuucucccagauccugcccgaccccagcaagcccuccaagcggagcuucaucgaggaccuccuguucaacaaggugacccuggccgacgccggcuucaucaagcaguacggcgacugccucggggacaucgcggcccgcgaccugaucugcgcccagaaguucaacggccugaccgugcucccgccccugcugaccgacgagaugaucgcccaguacaccuccgcccuccuggcggggaccaucacgagcggcuggaccuucggggccggcgccgcccugcagauccccuucgcgaugcagauggccuaccgguucaacggcaucggggucacccagaacgugcucuacgagaaccagaagcugaucgccaaccaguucaacuccgccaucggcaagauccaggacagccuguccagcaccgccuccgcgcucgggaagcugcaggacguggucaaccagaacgcccaggcccugaacacgcucgugaagcagcugagcuccaacuucggcgccaucagcuccgugcugaacgacauccucagccgccuggacaaggucgaggccgaggugcagaucgaccggcugaucaccgggcgccuccagucccugcagaccuacgugacccagcagcugauccgggcggccgagauccgcgccagcgccaaccucgccgcgaccaagaugagcgagugcguccugggccaguccaagcggguggacuucugcggcaagggguaccaccugaugagcuucccccaguccgccccgcacggcguggucuuccuccacgugacguacguccccgcccaggagaagaacuucaccaccgcccccgcgaucugccacgacgggaaggcccacuucccccgcgagggcguguucgugagcaacgggacccacugguucgucacgcagcggaacuucuacgagccgcagaucaucaccaccgacaacaccuucguguccggcaacugcgacguggucaucggcaucgugaacaacacgguguacgacccccugcagcccgagcuggacagcuucaaggaggagcucgacaaguacuucaagaaccacaccucccccgacgucgaccugggggacaucagcggcaucaacgccuccguggugaacauccagaaggagaucgaccgccugaacgaggucgccaagaaccucaacgagagccugaucgaccugcaggagcucgggaaguacgagcaguacaucaaguggccgugguacaucuggcugggcuucaucgccggccugaucgcgaucgugauggugaccaucaugcucugcugcaugaccuccugcugcagcugccugaaggggugcugcuccugcggcagcugcugcaaguucgacgaggacgacuccgagcccguccugaagggggugaagcuccacuacacguga

SEQ ID NO: 11767 - RNA, 3822 nt, Artificial Sequence
  SARS-CoV-2/China/WF0004/2020__EPI_ISL_413694 spike protein CDS gc (1-1273)
auguucguguuccugguccuccugccccuggugagcucccagugcgugaaccucaccacccgcacgcagcugccgcccgccuacaccaacagcuucacccggggcgucuacuaccccgacaagguguuccgcuccagcgugcugcacuccacccaggaccucuuccugcccuucuucagcaacgucacgugguuccacgccauccacguguccgggaccaacggcaccaagcgguucgacaacccggugcugcccuucaacgacggggucuacuucgcgagcaccgagaaguccaacaucauccgcggcuggaucuucgggacgacccucgacagcaagacccagucccugcugaucgugaacaacgccaccaacguggucaucaaggugugcgaguuccaguucugcaacgaccccuuccucggcguguacuaccacaagaacaacaagagcuggacggaguccgaguuccgggucuacagcuccgccaacaacugcaccuucgaguacgugagccagcccuuccugauggaccuggagggcaagcaggggaacuucaagaaccuccgcgaguucguguucaagaacaucgacggcuacuucaagaucuacuccaagcacaccccgaucaaccugguccgggaccugccccagggguucagcgcccucgagccccugguggaccugcccaucggcaucaacaucacccgcuuccagacgcuccuggcccugcaccgguccuaccucaccccgggggacagcagcuccggcuggaccgcgggcgccgccgccuacuacgugggguaccugcagccccgcaccuuccugcucaaguacaacgagaacggcacgaucaccgacgcggucgacugcgcccuggacccccugagcgagaccaagugcacccucaaguccuucacgguggagaaggggaucuaccagaccagcaacuuccgggugcagcccaccgaguccaucguccgcuucccgaacaucaccaaccugugccccuucggcgagguguucaacgccacgcgguucgccagcgucuacgccuggaaccgcaagcggaucuccaacugcguggcggacuacagcgugcuguacaacuccgccagcuucuccaccuucaagugcuacggcgucagccccaccaagcucaacgaccugugcuucaccaacguguacgccgacuccuucgugauccgcggggacgagguccggcagaucgcccccggccagacggggaagaucgccgacuacaacuacaagcugccggacgacuucaccggcugcgugaucgcguggaacagcaacaaccucgacuccaaggucgggggcaacuacaacuaccuguaccgccuguuccgcaagagcaaccucaagcccuucgagcgggacaucuccaccgagaucuaccaggccggcagcacccccugcaacgggguggagggcuucaacugcuacuucccccugcaguccuacggguuccagccgacgaacggcgugggguaccagcccuaccggguggucgugcugagcuucgagcuccugcacgcccccgccaccgugugcggccccaagaaguccaccaaccuggucaagaacaagugcgugaacuucaacuucaacggccucaccgggaccggcgugcugacggagagcaacaagaaguuccugccguuccagcaguucgggcgcgacaucgccgacaccaccgacgcgguccgcgacccccagacccuggagauccucgacaucacgcccugcagcuucggcgggguguccgugaucaccccgggcaccaacaccagcaaccaggucgccgugcuguaccaggacgugaacugcacggagguccccguggccauccacgccgaccagcugacccccaccuggcggguguacuccaccggcagcaacgucuuccagacgcgcgccgggugccucaucggcgcggagcacgugaacaacuccuacgagugcgacauccccaucggggccggcaucugcgccagcuaccagacccagaccaacuccccgcggcgcgcccggagcguggcgucccagagcaucaucgccuacaccaugucccugggcgccgagaacagcgucgccuacuccaacaacagcaucgccauccccacgaacuucaccaucuccgugaccaccgagauccugcccgugagcaugacgaagaccagcgucgacugcaccauguacaucugcggggacuccaccgagugcagcaaccuccugcugcaguacggcuccuucugcacgcagcucaaccgcgcgcugaccgggaucgccguggagcaggacaagaacacccaggagguguucgcccaggucaagcagaucuacaagacgcccccgaucaaggacuucggcggguucaacuucagccagauccugcccgaccccuccaagcccagcaagcgguccuucaucgaggaccuccuguucaacaaggugacccuggccgacgccggcuucaucaagcaguacggcgacugccucggggacaucgcggcccgcgaccugaucugcgcccagaaguucaacggccugaccgugcucccgccccugcugaccgacgagaugaucgcccaguacaccagcgcccuccuggcggggacgaucaccuccggcuggaccuucggggccggcgccgcccugcagauccccuucgcgaugcagauggccuaccgguucaacggcaucggggucacccagaacgugcucuacgagaaccagaagcugaucgccaaccaguucaacagcgccaucggcaagauccaggacucccugagcuccacggccagcgcgcucgggaagcugcaggacguggucaaccagaacgcccaggcccugaacacccucgugaagcagcuguccagcaacuucggcgccaucuccagcgugcugaacgacauccucucccgccuggacaaggucgaggccgaggugcagaucgaccggcugaucaccgggcgccuccagagccugcagaccuacgugacccagcagcugauccgggcggccgagauccgcgccagcgccaaccucgccgcgacgaagauguccgagugcguccugggccagagcaagcgguucgacuucugcggcaagggguaccaccugauguccuucccccagagcgccccgcacggcgugguguuccuccacgucaccuacgugcccgcccaggagaagaacuucaccaccgcccccgcgaucugccacgacgggaaggcccacuucccccgcgagggcgucuucguguccaacgggacgcacugguucgugacccagcggaacuucuacgagccgcagaucaucaccaccgacaacacguucgucagcggcaacugcgacguggugaucggcaucgucaacaacaccguguacgacccccugcagcccgagcuggacuccuucaaggaggagcucgacaaguacuucaagaaccacaccagccccgacguggaccugggggacaucuccggcaucaacgccagcgucgugaacauccagaaggagaucgaccgccugaacgagguggccaagaaccucaacgagucccugaucgaccugcaggagcucgggaaguacgagcaguacaucaaguggccgugguacaucuggcugggcuucaucgccggccugaucgcgaucgucauggugaccaucaugcucugcugcaugacgagcugcugcuccugccugaaggggugcugcagcugcggcuccugcugcaaguucgacgaggacgacagcgagcccgugcugaagggggucaagcuccacuacaccuga

SEQ ID NO: 11768 - RNA, 3822 nt, Artificial Sequence
  SARS-CoV-2/China/WF0028/2020__EPI_ISL_413791 spike protein CDS gc (1-1273)
auguucguguuccugguccuccugccccuggugagcucccagugcgugaaccucaccacccgcacgcagcugccgcccgccuacaccaacagcuucacccggggcgucuacuaccccgacaagguguuccgcuccagcgugcugcacuccacccaggaccucuuccugcccuucuucagcaacgucacgugguuccacgccauccacguguccgggaccaacggcaccaagcgguucgacaacccggugcugcccuucaacgacggggucuacuucgcgagcaccgagaaguccaacaucauccgcggcuggaucuucgggacgacccucgacagcaagacccagucccugcugaucgugaacaacgccaccaacguggucaucaaggugugcgaguuccaguucugcaacgaccccuuccucggcguguacuaccacaagaacaacaagagcuggauggaguccgaguuccgggucuacagcuccgccaacaacugcacguucgaguacgugagccagcccuuccugauggaccuggagggcaagcaggggaacuucaagaaccuccgcgaguucguguucaagaacaucgacggcuacuucaagaucuacuccaagcacaccccgaucaaccugguccgggaccugccccagggguucagcgcccucgagccccugguggaccugcccaucggcaucaacaucacccgcuuccagacccuccuggcccugcaccgguccuaccucacgccgggggacagcagcuccggcuggaccgcgggcgccgccgccuacuacgugggguaccugcagccccgcaccuuccugcucaaguacaacgagaacggcaccaucacggacgcggucgacugcgcccuggacccccugagcgagaccaagugcacccucaaguccuucaccguggagaaggggaucuaccagacgagcaacuuccgggugcagcccaccgaguccaucguccgcuucccgaacaucaccaaccugugccccuucggcgagguguucaacgccacccgguucgccagcgucuacgccuggaaccgcaagcggaucuccaacugcguggcggacuacagcgugcuguacaacuccgccagcuucuccacguucaagugcuacggcgucagccccaccaagcucaacgaccugugcuucaccaacguguacgccgacuccuucgugauccgcggggacgagguccggcagaucgcccccggccagaccgggaagaucgccgacuacaacuacaagcugccggacgacuucacgggcugcgugaucgcguggaacagcaacaaccucgacuccaaggucgggggcaacuacaacuaccuguaccgccuguuccgcaagagcaaccucaagcccuucgagcgggacaucuccaccgagaucuaccaggccggcagcacccccugcaacgggguggagggcuucaacugcuacuucccccugcaguccuacggguuccagccgaccaacggcgugggguaccagcccuaccggguggucgugcugagcuucgagcuccugcacgcccccgccacggugugcggccccaagaaguccaccaaccuggucaagaacaagugcgugaacuucaacuucaacggccucaccgggaccggcgugcugaccgagagcaacaagaaguuccugccguuccagcaguucgggcgcgacaucgccgacacgaccgacgcgguccgcgacccccagacccuggagauccucgacaucacccccugcagcuucggcgggguguccgugaucacgccgggcaccaacaccagcaaccaggucgccgugcuguaccaggacgugaacugcaccgagguccccguggccauccacgccgaccagcugacgcccaccuggcggguguacuccaccggcagcaacgucuuccagacccgcgccgggugccucaucggcgcggagcacgugaacaacuccuacgagugcgacauccccaucggggccggcaucugcgccagcuaccagacgcagaccaacuccccgcggcgcgcccggagcguggcgucccagagcaucaucgccuacaccaugucccugggcgccgagaacagcgucgccuacuccaacaacagcaucgccauccccaccaacuucacgaucuccgugaccaccgagauccugcccgugagcaugaccaagacgagcgucgacugcaccauguacaucugcggggacuccaccgagugcagcaaccuccugcugcaguacggcuccuucugcacccagcucaaccgcgcgcugacggggaucgccguggagcaggacaagaacacccaggagguguucgcccaggucaagcagaucuacaagacgcccccgaucaaggacuucggcggguucaacuucagccagauccugcccgaccccuccaagcccagcaagcgguccuucaucgaggaccuccuguucaacaaggugacccuggccgacgccggcuucaucaagcaguacggcgacugccucggggacaucgcggcccgcgaccugaucugcgcccagaaguucaacggccugaccgugcucccgccccugcugaccgacgagaugaucgcccaguacaccagcgcccuccuggcggggaccaucacguccggcuggaccuucggggccggcgccgcccugcagauccccuucgcgaugcagauggccuaccgguucaacggcaucggggucacccagaacgugcucuacgagaaccagaagcugaucgccaaccaguucaacagcgccaucggcaagauccaggacucccugagcuccaccgccagcgcgcucgggaagcugcaggacguggucaaccagaacgcccaggcccugaacacgcucgugaagcagcuguccagcaacuucggcgccaucuccagcgugcugaacgacauccucucccgccuggacaaggucgaggccgaggugcagaucgaccggcugaucaccgggcgccuccagagccugcagaccuacgugacccagcagcugauccgggcggccgagauccgcgccagcgccaaccucgccgcgaccaagauguccgagugcguccugggccagagcaagcggguggacuucugcggcaagggguaccaccugauguccuucccccagagcgccccgcacggcguggucuuccuccacgugacguacguccccgcccaggagaagaacuucaccaccgcccccgcgaucugccacgacgggaaggcccacuucccccgcgagggcguguucguguccaacgggacccacugguucgucacgcagcggaacuucuacgagccgcagaucaucaccaccgacaacaccuucgugagcggcaacugcgacguggucaucggcaucgugaacaacacgguguacgacccccugcagcccgagcuggaguccuucaaggaggagcucgacaaguacuucaagaaccacaccagccccgacgucgaccugggggacaucuccggcaucaacgccagcguggugaacauccagaaggagaucgaccgccugaacgaggucgccaagaaccucaacgagucccugaucgaccugcaggagcucgggaaguacgagcaguacaucaaguggccgugguacaucuggcugggcuucaucgccggccugaucgcgaucgugauggugaccaucaugcucugcugcaugaccagcugcugcuccugccugaaggggugcugcagcugcggcuccugcugcaaguucgacgaggacgacagcgagcccguccugaagggggugaagcuccacuacacguga

SEQ ID NO: 11769 - RNA, 3822 nt, Artificial Sequence
  SARS-CoV-2/2019-nCoV/USA-CruiseA-18/2020__MT159716.1 spike protein CDS gc (1-1273)
auguucguguuccugguccuccugccccuggugagcucccagugcgugaaccucaccacccgcacgcagcugccgcccgccuacaccaacagcuucacccggggcgucuacuaccccgacaagguguuccgcuccagcgugcugcacuccacccaggaccucuuccugcccuucuucagcaacgucacgugguuccacgccauccacguguccgggaccaacggcaccaagcgguucgacaacccggugcugcccuucaacgacggggucuacuucgcgagcaccgagaaguccaacaucauccgcggcuggaucuucgggacgacccucgacagcaagacccagucccugcugaucgugaacaacgccaccaacguggucaucaaggugugcgaguuccaguucugcaacgaccccuuccucggcguguacuaccacaagaacaacaagagcuggauggaguccgagcugcgggucuacagcuccgccaacaacugcacguucgaguacgugagccagcccuuccugauggaccucgagggcaagcaggggaacuucaagaaccugcgcgaguucguguucaagaacaucgacggcuacuucaagaucuacuccaagcacaccccgaucaaccugguccgggaccucccccagggguucagcgcccuggagccccugguggaccuccccaucggcaucaacaucacccgcuuccagacccugcuggcccuccaccgguccuaccugacgccgggggacagcagcuccggcuggaccgcgggcgccgccgccuacuacgugggguaccugcagccccgcaccuuccuccugaaguacaacgagaacggcaccaucacggacgcggucgacugcgcccuggacccccucagcgagaccaagugcacccugaaguccuucaccguggagaaggggaucuaccagacgagcaacuuccgggugcagcccaccgaguccaucguccgcuucccgaacaucaccaaccugugccccuucggcgagguguucaacgccacccgguucgccagcgucuacgccuggaaccgcaagcggaucuccaacugcguggcggacuacagcgugcucuacaacuccgccagcuucuccacguucaagugcuacggcgucagccccaccaagcugaacgaccugugcuucaccaacguguacgccgacuccuucgugauccgcggggacgagguccggcagaucgcccccggccagaccgggaagaucgccgacuacaacuacaagcucccggacgacuucacgggcugcgugaucgcguggaacagcaacaaccuggacuccaaggucgggggcaacuacaacuaccuguaccgccucuuccgcaagagcaaccugaagcccuucgagcgggacaucuccaccgagaucuaccaggccggcagcacccccugcaacgggguggagggcuucaacugcuacuucccccugcaguccuacggguuccagccgaccaacggcgugggguaccagcccuaccggguggucgugcucagcuucgagcugcugcacgcccccgccacggugugcggccccaagaaguccaccaaccucgucaagaacaagugcgugaacuucaacuucaacggccugaccgggaccggcgugcugaccgagagcaacaagaaguuccugccguuccagcaguucgggcgcgacaucgccgacacgaccgacgcgguccgcgacccccagacccucgagauccuggacaucacccccugcagcuucggcgggguguccgugaucacgccgggcaccaacaccagcaaccaggucgccgugcuguaccaggacgugaacugcaccgagguccccguggccauccacgccgaccagcucacgcccaccuggcggguguacuccaccggcagcaacgucuuccagacccgcgccgggugccugaucggcgcggagcacgugaacaacuccuacgagugcgacauccccaucggggccggcaucugcgccagcuaccagacgcagaccaacuccccgcggcgcgcccggagcguggcgucccagagcaucaucgccuacaccaugucccugggcgccgagaacagcgucgccuacuccaacaacagcaucgccauccccaccaacuucacgaucuccgugaccaccgagauccuccccgugagcaugaccaagacgagcgucgacugcaccauguacaucugcggggacuccaccgagugcagcaaccugcugcuccaguacggcuccuucugcacccagcugaaccgcgcgcugacggggaucgccguggagcaggacaagaacacccaggagguguucgcccaggucaagcagaucuacaagacgcccccgaucaaggacuucggcggguucaacuucagccagauccuccccgaccccuccaagcccagcaagcgguccuucaucgaggaccugcuguucaacaaggugacccucgccgacgccggcuucaucaagcaguacggcgacugccugggggacaucgcggcccgcgaccugaucugcgcccagaaguucaacggccucaccgugcugccgccccugcucaccgacgagaugaucgcccaguacaccagcgcccugcuggcggggaccaucacguccggcuggaccuucggggccggcgccgcccuccagauccccuucgcgaugcagauggccuaccgguucaacggcaucggggucacccagaacgugcuguacgagaaccagaagcugaucgccaaccaguucaacagcgccaucggcaagauccaggacucccucagcuccaccgccagcgcgcuggggaagcugcaggacguggucaaccagaacgcccaggcccucaacacgcuggugaagcagcuguccagcaacuucggcgccaucuccagcgugcucaacgacauccugucccgccuggacaaggucgaggccgaggugcagaucgaccggcucaucaccgggcgccugcagagccugcagaccuacgugacccagcagcucauccgggcggccgagauccgcgccagcgccaaccuggccgcgaccaagauguccgagugcguccugggccagagcaagcggguggacuucugcggcaagggguaccaccucauguccuucccccagagcgccccgcacggcguggucuuccugcacgugacguacguccccgcccaggagaagaacuucaccaccgcccccgcgaucugccacgacgggaaggcccacuucccccgcgagggcguguucguguccaacgggacccacugguucgucacgcagcggaacuucuacgagccgcagaucaucaccaccgacaacaccuucgugagcggcaacugcgacguggucaucggcaucgugaacaacacgguguacgacccccugcagcccgagcucgacuccuucaaggaggagcuggacaaguacuucaagaaccacaccagccccgacgucgaccugggggacaucuccggcaucaacgccagcguggugaacauccagaaggagaucgaccgccucaacgaggucgccaagaaccugaacgagucccugaucgaccuccaggagcuggggaaguacgagcaguacaucaaguggccgugguacaucuggcugggcuucaucgccggccucaucgcgaucgugauggugaccaucaugcugugcugcaugaccagcugcugcuccugccugaaggggugcugcagcugcggcuccugcugcaaguucgacgaggacgacagcgagcccguccucaagggggugaagcugcacuacacguga

SEQ ID NO: 11770 - RNA, 3822 nt, Artificial Sequence
  SARS-CoV-2/SARS-CoV-2/Yunnan-01/human/2020/CHN__MT049951.1 spike protein CDS gc (1-1273)
auguucguguuccugguccuccugccccuggugagcucccagugcgugaaccucaccacccgcacgcagcugccgcccgccaacaccaacagcuucacccggggcgucuacuaccccgacaagguguuccgcuccagcgugcugcacuccacccaggaccucuuccugcccuucuucagcaacgucacgugguuccacgccauccacguguccgggaccaacggcaccaagcgguucgacaacccggugcugcccuucaacgacggggucuacuucgcgagcaccgagaaguccaacaucauccgcggcuggaucuucgggacgacccucgacagcaagacccagucccugcugaucgugaacaacgccaccaacguggucaucaaggugugcgaguuccaguucugcaacgaccccuuccucggcguguacuaccacaagaacaacaagagcuggauggaguccgaguuccgggucuacagcuccgccaacaacugcacguucgaguacgugagccagcccuuccugauggaccuggagggcaagcaggggaacuucaagaaccuccgcgaguucguguucaagaacaucgacggcuacuucaagaucuacuccaagcacaccccgaucaaccugguccgggaccugccccagggguucagcgcccucgagccccugguggaccugcccaucggcaucaacaucacccgcuuccagacccuccuggcccugcaccgguccuaccucacgccgggggacagcagcuccggcuggaccgcgggcgccgccgccuacuacgugggguaccugcagccccgcaccuuccugcucaaguacaacgagaacggcaccaucacggacgcggucgacugcgcccuggacccccugagcgagaccaagugcacccucaaguccuucaccguggagaaggggaucuaccagacgagcaacuuccgggugcagcccaccgaguccaucguccgcuucccgaacaucaccaaccugugccccuucggcgagguguucaacgccacccgguucgccagcgucuacgccuggaaccgcaagcggaucuccaacugcguggcggacuacagcgugcuguacaacuccgccagcuucuccacguucaagugcuacggcgucagccccaccaagcucaacgaccugugcuucaccaacguguacgccgacuccuucgugauccgcggggacgagguccggcagaucgcccccggccagaccgggaagaucgccgacuacaacuacaagcugccggacgacuucacgggcugcgugaucgcguggaacagcaacaaccucgacuccaaggucgggggcaacuacaacuaccuguaccgccuguuccgcaagagcaaccucaagcccuucgagcgggacaucuccaccgagaucuaccaggccggcagcacccccugcaacgggguggagggcuucaacugcuacuucccccugcaguccuacggguuccagccgaccaacggcgugggguaccagcccuaccggguggucgugcugagcuucgagcuccugcacgcccccgccacggugugcggccccaagaaguccaccaaccuggucaagaacaagugcgugaacuucaacuucaacggccucaccgggaccggcgugcugaccgagagcaacaagaaguuccugccguuccagcaguucgggcgcgacaucgccgacacgaccgacgcgguccgcgacccccagacccuggagauccucgacaucacccccugcagcuucggcgggguguccgugaucacgccgggcaccaacaccagcaaccaggucgccgugcuguaccaggacgugaacugcaccgagguccccguggccauccacgccgaccagcugacgcccaccuggcggguguacuccaccggcagcaacgucuuccagacccgcgccgggugccucaucggcgcggagcacgugaacaacuccuacgagugcgacauccccaucggggccggcaucugcgccagcuaccagacgcagaccaacuccccgcggcgcgcccggagcguggcgucccagagcaucaucgccuacaccaugucccugggcgccgagaacagcgucgccuacuccaacaacagcaucgccauccccaccaacuucacgaucuccgugaccaccgagauccugcccgugagcaugaccaagacgagcgucgacugcaccauguacaucugcggggacuccaccgagugcagcaaccuccugcugcaguacggcuccuucugcacccagcucaaccgcgcgcugacggggaucgccguggagcaggacaagaacacccaggagguguucgcccaggucaagcagaucuacaagacgcccccgaucaaggacuucggcggguucaacuucagccagauccugcccgaccccuccaagcccagcaagcgguccuucaucgaggaccuccuguucaacaaggugacccuggccgacgccggcuucaucaagcaguacggcgacugccucggggacaucgcggcccgcgaccugaucugcgcccagaaguucaacggccugaccgugcucccgccccugcugaccgacgagaugaucgcccaguacaccagcgcccuccuggcggggaccaucacguccggcuggaccuucggggccggcgccgcccugcagauccccuucgcgaugcagauggccuaccgguucaacggcaucggggucacccagaacgugcucuacgagaaccagaagcugaucgccaaccaguucaacagcgccaucggcaagauccaggacucccugagcuccaccgccagcgcgcucgggaagcugcaggacguggucaaccagaacgcccaggcccugaacacgcucgugaagcagcuguccagcaacuucggcgccaucuccagcgugcugaacgacauccucucccgccuggacaaggucgaggccgaggugcagaucgaccggcugaucaccgggcgccuccagagccugcagaccuacgugacccagcagcugauccgggcggccgagauccgcgccagcgccaaccucgccgcgaccaagauguccgagugcguccugggccagagcaagcggguggacuucugcggcaagggguaccaccugauguccuucccccagagcgccccgcacggcguggucuuccuccacgugacguacguccccgcccaggagaagaacuucaccaccgcccccgcgaucugccacgacgggaaggcccacuucccccgcgagggcguguucguguccaacgggacccacugguucgucacgcagcggaacuucuacgagccgcagaucaucaccaccgacaacaccuucgugagcggcaacugcgacguggucaucggcaucgugaacaacacgguguacgacccccugcagcccgagcuggacuccuucaaggaggagcucgacaaguacuucaagaaccacaccagccccgacgucgaccugggggacaucuccggcaucaacgccagcguggugaacauccagaaggagaucgaccgccugaacgaggucgccaagaaccucaacgagucccugaucgaccugcaggagcucgggaaguacgagcaguacaucaaguggccgugguacaucuggcugggcuucaucgccggccugaucgcgaucgugauggugaccaucaugcucugcugcaugaccagcugcugcuccugccugaaggggugcugcagcugcggcuccugcugcaaguucgacgaggacgacagcgagcccguccugaagggggugaagcuccacuacacguga

SEQ ID NO: 11771 - RNA, 3822 nt, Artificial Sequence
  SARS-CoV-2/USA/WA-UW292/2020__EPI_ISL_418077 spike protein CDS gc (1-1273)
auguucguguuccugguccuccugccccuggugagcucccagugcgugaaccucaccacccgcacgcagcugccgcccgccuacaccaacagcuucacccggggcgucuacuaccccgacaagguguuccgcuccagcgugcugcacuccacccaggaccucuuccugcccuucuucagcaacgucacgugguuccacgccauccacguguccgggaccaacggcaccaagcgguucgacaacccggugcugcccuucaacgacggggucuacuucgcgagcaccgagaaguccaacaucauccgcggcuggaucuucgggacgacccucgacagcaagacccagucccugcugaucgugaacaacgccaccaacguggucaucaaggugugcgaguuccaguucugcaacgaccccuuccucggcguguacuaccacaagaacaacaagagcuggauggaguccgaguuccgggucuacagcuccgccaacaacugcacguucgaguacgugagccagcccuuccugauggaccuggagggcaagcaggggaacuucaagaaccuccgcgaguucguguucaagaacaucgacggcuacuucaagaucuacuccaagcacaccccgaucaaccugguccgggaccugccccagggguucagcgcccucgagccccugguggaccugcccaucggcaucaacaucacccgcuuccagacccuccuggcccugcaccgguccuaccucacgccgggggacagcagcuccggcuggaccgcgggcgccgccgccuacuacgugggguaccugcagccccgcaccuuccugcucaaguacaacgagaacggcaccaucacggacgcggucgacugcgcccuggacccccugagcgagaccaagugcacccucaaguccuucaccguggagaaggggaucuaccagacgagcaacuuccgggugcagcccaccgaguccaucguccgcuucccgaacaucaccaaccugugccccuucggcgagguguucaacgccacccgguucgccagcgucuacgccuggaaccgcaagcggaucuccaacugcguggcggacuacagcgugcuguacaacuccgccagcuucuccacguucaagugcuacggcgucagccccaccaagcucaacgaccugugcuucaccaacguguacgccgacuccuucgugauccgcggggacgagguccggcagaucgcccccggccagaccgggaagaucgccgacuacaacuacaagcugccggacgacuucacgggcugcgugaucgcguggaacagcaacaaccucgacuccaaggucgggggcaacuacaacuaccuguaccgccuguuccgcaagagcaaccucaagcccuucgagcgggacaucuccaccgagaucuaccaggccagcuccacccccugcaacggcguggagggguucaacugcuacuucccccugcagagcuacggcuuccagccgaccaacggggugggcuaccagcccuaccggguggucgugcugagcuucgagcuccugcacgcccccgccacggugugcgggcccaagaaguccaccaaccuggucaagaacaagugcgugaacuucaacuucaacggccucaccggcaccggggugcugaccgagagcaacaagaaguuccugccguuccagcaguucggccgcgacaucgccgacacgaccgacgcgguccgcgacccccagacccuggagauccucgacaucacccccugcuccuucgggggcgugagcgugaucacgccggggaccaacaccuccaaccaggucgccgugcuguaccaggacgugaacugcaccgagguccccguggccauccacgccgaccagcugacgcccaccuggcggguguacagcaccggcuccaacgucuuccagacccgcgccggcugccucaucggggcggagcacgugaacaacagcuacgagugcgacauccccaucggcgccgggaucugcgccuccuaccagacgcagaccaacagcccgcggcgcgcccgguccguggcgagccaguccaucaucgccuacaccaugagccugggcgccgagaacuccgucgccuacagcaacaacuccaucgccauccccaccaacuucacgaucagcgugaccaccgagauccugcccgugagcaugaccaagacguccgucgacugcaccauguacaucugcggcgacagcaccgagugcuccaaccuccugcugcaguacgggagcuucugcacccagcucaaccgcgcgcugacgggcaucgccguggagcaggacaagaacacccaggagguguucgcccaggucaagcagaucuacaagacgcccccgaucaaggacuucgggggcuucaacuucucccagauccugcccgaccccagcaagcccuccaagcggagcuucaucgaggaccuccuguucaacaaggugacccuggccgacgccggguucaucaagcaguacggcgacugccucggcgacaucgcggcccgcgaccugaucugcgcccagaaguucaacgggcugaccgugcucccgccccugcugaccgacgagaugaucgcccaguacaccuccgcccuccuggcgggcaccaucacgagcggguggaccuucggcgccggggccgcccugcagauccccuucgcgaugcagauggccuaccgguucaacggcaucggcgucacccagaacgugcucuacgagaaccagaagcugaucgccaaccaguucaacuccgccaucgggaagauccaggacagccuguccagcaccgccuccgcgcucggcaagcugcaggacguggucaaccagaacgcccaggcccugaacacgcucgugaagcagcugagcuccaacuucggggccaucagcuccgugcugaacgacauccucagccgccuggacaaggucgaggccgaggugcagaucgaccggcugaucaccggccgccuccagagccugcagaccuacgugacccagcagcugauccgggcggccgagauccgcgccuccgccaaccucgccgcgaccaagaugagcgagugcguccuggggcaguccaagcggguggacuucugcggcaagggcuaccaccugaugagcuucccccaguccgccccgcacgggguggucuuccuccacgugacguacguccccgcccaggagaagaacuucaccaccgcccccgcgaucugccacgacggcaaggcccacuucccccgcgaggggguguucgugagcaacggcacccacugguucgucacgcagcggaacuucuacgagccgcagaucaucaccaccgacaacaccuucguguccgggaacugcgacguggucaucggcaucgugaacaacacgguguacgacccccugcagcccgagcuggacagcuucaaggaggagcucgacaaguacuucaagaaccacaccucccccgacgucgaccugggcgacaucagcgggaucaacgccuccguggugaacauccagaaggagaucgaccgccugaacgaggucgccaagaaccucaacgagagccugaucgaccugcaggagcucggcaaguacgagcaguacaucaaguggccgugguacaucuggcugggguucaucgccggccugaucgcgaucgugauggugaccaucaugcucugcugcaugaccuccugcugcagcugccugaagggcugcugcuccugcgggagcugcugcaaguucgacgaggacgacuccgagcccguccugaagggcgugaagcuccacuacacguga

SEQ ID NO: 11772 - RNA, 3822 nt, Artificial Sequence
  SARS-CoV-2/Iceland/192/2020__EPI_ISL_417819 spike protein CDS gc (1-1273)
auguucguguucuucguccugcucccccuggugagcucccagugcgugaaccugaccacccgcacgcagcucccgcccgccuacaccaacagcuucacccggggcgucuacuaccccgacaagguguuccgcuccagcgugcugcacuccacccaggaccuguuccuccccuucuucagcaacgucacgugguuccacgccauccacguguccgggaccaacggcaccaagcgguucgacaacccggugcugcccuucaacgacggggucuacuucgcgagcaccgagaaguccaacaucauccgcggcuggaucuucgggacgacccuggacagcaagacccagucccuccugaucgugaacaacgccaccaacguggucaucaaggugugcgaguuccaguucugcaacgaccccuuccugggcguguacuaccacaagaacaacaagagcuggauggaguccgaguuccgggucuacagcuccgccaacaacugcacguucgaguacgugagccagcccuuccucauggaccuggagggcaagcaggggaacuucaagaaccugcgcgaguucguguucaagaacaucgacggcuacuucaagaucuacuccaagcacaccccgaucaaccucguccgggaccugccccagggguucagcgcccuggagccccucguggaccugcccaucggcaucaacaucacccgcuuccagacccugcucgcccugcaccgguccuaccugacgccgggggacagcagcuccggcuggaccgcgggcgccgccgccuacuacgugggguaccuccagccccgcaccuuccugcugaaguacaacgagaacggcaccaucacggacgcggucgacugcgcccucgacccccugagcgagaccaagugcacccugaaguccuucaccguggagaaggggaucuaccagacgagcaacuuccgggugcagcccaccgaguccaucguccgcuucccgaacaucaccaaccucugccccuucggcgagguguucaacgccacccgguucgccagcgucuacgccuggaaccgcaagcggaucuccaacugcguggcggacuacagcgugcuguacaacuccgccagcuucuccacguucaagugcuacggcgucagccccaccaagcugaacgaccucugcuucaccaacguguacgccgacuccuucgugauccgcggggacgagguccggcagaucgcccccggccagaccgggaagaucgccgacuacaacuacaagcugccggacgacuucacgggcugcgugaucgcguggaacagcaacaaccuggacuccaaggucgggggcaacuacaacuaccucuaccgccuguuccgcaagagcaaccugaagcccuucgagcgggacaucuccaccgagaucuaccaggccggcagcacccccugcaacgggguggagggcuucaacugcuacuucccccuccaguccuacggguuccagccgaccaacggcgugggguaccagcccuaccggguggucgugcugagcuucgagcugcuccacgcccccgccacggugugcggccccaagaaguccaccaaccuggucaagaacaagugcgugaacuucaacuucaacggccugaccgggaccggcgugcucaccgagagcaacaagaaguuccugccguuccagcaguucgggcgcgacaucgccgacacgaccgacgcgguccgcgacccccagacccuggagauccuggacaucacccccugcagcuucggcgggguguccgugaucacgccgggcaccaacaccagcaaccaggucgccgugcucuaccagggcgugaacugcaccgagguccccguggccauccacgccgaccagcugacgcccaccuggcggguguacuccaccgggagcaacgucuuccagacccgcgccggcugccugaucggggcggagcacgugaacaacuccuacgagugcgacauccccaucggcgccggcaucugcgccagcuaccagacgcagaccaacuccccgcggcgcgcccggagcguggcgucccagagcaucaucgccuacaccaugucccucggggccgagaacagcgucgccuacuccaacaacagcaucgccauccccaccaacuucacgaucuccgugaccaccgagauccugcccgugagcaugaccaagacgagcgucgacugcaccauguacaucugcggcgacuccaccgagugcagcaaccugcuccugcaguacggguccuucugcacccagcugaaccgcgcgcucacgggcaucgccguggagcaggacaagaacacccaggagguguucgcccaggucaagcagaucuacaagacgcccccgaucaaggacuucgggggcuucaacuucagccagauccugcccgaccccuccaagcccagcaagcgguccuucaucgaggaccuccuguucaacaaggugacccuggccgacgccggcuucaucaagcaguacggggacugccugggcgacaucgcggcccgcgaccucaucugcgcccagaaguucaacgggcugaccgugcugccgccccuccugaccgacgagaugaucgcccaguacaccagcgcccugcucgcgggcaccaucacguccggguggaccuucggcgccggcgccgcccugcagauccccuucgcgaugcagauggccuaccgguucaacgggaucggcgucacccagaacgugcuguacgagaaccagaagcucaucgccaaccaguucaacagcgccaucgggaagauccaggacucccugagcuccaccgccagcgcgcugggcaagcuccaggacguggucaaccagaacgcccaggcccugaacacgcuggugaagcagcucuccagcaacuucggggccaucuccagcgugcugaacgacauccugucccgccucgacaaggucgaggccgaggugcagaucgaccggcugaucaccggccgccugcagagccuccagaccuacgugacccagcagcugauccgggcggccgagauccgcgccagcgccaaccuggccgcgaccaagauguccgagugcguccucggccagagcaagcggguggacuucugcgggaagggcuaccaccugauguccuucccccagagcgccccgcacgggguggucuuccugcacgugacguacguccccgcccaggagaagaacuucaccaccgcccccgcgaucugccacgacggcaaggcccacuucccccgcgaggggguguucguguccaacggcacccacugguucgucacgcagcggaacuucuacgagccgcagaucaucaccaccgacaacaccuucgugagcggcaacugcgacguggucaucgggaucgugaacaacacgguguacgacccccuccagcccgagcuggacuccuucaaggaggagcuggacaaguacuucaagaaccacaccagccccgacgucgaccucggcgacaucuccgggaucaacgccagcguggugaacauccagaaggagaucgaccgccugaacgaggucgccaagaaccugaacgagucccucaucgaccugcaggagcugggcaaguacgagcaguacaucaaguggccgugguacaucuggcucggcuucaucgccgggcugaucgcgaucgugauggugaccaucaugcugugcugcaugaccagcugcugcuccugccucaagggcugcugcagcugcggguccugcugcaaguucgacgaggacgacagcgagcccguccugaagggcgugaagcugcacuacacguga

SEQ ID NO: 11773 - RNA, 3822 nt, Artificial Sequence
  SARS-CoV-2/Belgium/ULG-6939/2020__EPI_ISL_417020 spike protein CDS gc (1-1273)
auguucguguuccugguccuccugccccuggugagcucccagugcgugaaccucaccacccgcacgcagcugccgcccgccuacaccaacagcuucacccggggcgucuacuaccccgacaagguguuccgcuccagcgugcugcacuccacccaggaccucuuccugcccuucuucagcaacgucacgugguuccacgccauccacguguccgggaccaacggcaccaagcgguucgacaacccggugcugcccuucaacgacggggucuacuucgcgagcaccgagaaguccaacaucauccgcggcuggaucuucgggacgacccucgacagcaagacccagucccugcugaucgugaacaacgccaccaacguggucaucaaggugugcgaguuccaguucugcaacgaccccuuccucggcguguacuaccacaagaacaacaagagcuggauggaguccgaguuccgggucuacagcuccgccaacaacugcacguucgaguacgugagccagcccuuccugauggaccuggagggcaagcaggggaacuucaagaaccuccgcgaguucguguucaagaacaucgacggcuacuucaagaucuacuccaagcacaccccgaucaaccugguccgggaccugccccagggguucagcgcccucgagccccugguggaccugcccaucggcaucaacaucacccgcuuccagacccuccuggcccugcaccgguccuaccucacgccgggggacagcagcuccggcuggaccgcgggcgccgccgccuacuacgugggguaccugcagccccgcaccuuccugcucaaguacaacgagaacggcaccaucacggacgcggucgacugcgcccuggacccccugagcgagaccaagugcacccucaaguccuucaccguggagaaggggaucuaccagacgagcaacuuccgggugcagcccaccgaguccaucguccgcuucccgaacaucaccaaccugugccccuucggcgagguguucaacgccacccgguucgccagcgucuacgccuggaaccgcaagcggaucuccaacugcguggcggacuacagcgugcuguacaacuccgccagcuucuccacguucaagugcuacggcgucagccccaccaagcucaacgaccugugcuucaccaacguguacgccgacuccuucgugauccgcggggacgagguccggcagaucgcccccggccagaccgggaagaucgccgacuacaacuacaagcugccggacgacuucacgggcugcgugaucgcguggaacagcaacaaccucgacuccaaggucgggggcaacuacaacuaccuguaccgccuguuccgcaagagcaaccucaagcccuucgagcgggacaucuccaccgagaucuaccaggccggcagcacccccugcaacgggguggagggcuucaacugcuacuucccccugcaguccuacggguuccagccgaccaacggcgugggguaccagcccuaccggguggucgugcugagcuucgagcuccugcacgcccccgccacggugugcggccccaagaaguccaccaaccuggucaagaacaagugcgugaacuucaacuucaacggccucaccgggaccggcgugcugaccgagagcaacaagaaguuccugccguuccagcaguucgggcgcgacaucgccgacacgaccgacgcgguccgcgacccccagacccuggagauccucgacaucacccccugcagcuucggcgggguguccgugaucacgccgggcaccaacaccagcaaccaggucgccgugcuguaccagggcgugaacugcaccgagguccccguggccauccacgccgaccagcugacgcccaccuggcggguguacuccaccgggagcaacgucuuccagacccgcgccggcugccucaucggggcggagcacgugaacaacuccuacgagugcgacauccccaucggcgccggcaucugcgccagcuaccagacgcagaccaacuccccgcggcgcgcccggagcguggcgucccagagcaucaucgccuacaccaugucccugggggccgagaacagcgucguguacuccaacaacagcaucgccauccccaccaacuucacgaucuccgugaccaccgagauccugcccgucagcaugaccaagacgagcguggacugcaccauguacaucugcggcgacuccaccgagugcagcaaccuccugcugcaguacggguccuucugcacccagcucaaccgcgcccugacgggcaucgcgguggagcaggacaagaacacccaggaggucuucgcccaggugaagcagaucuacaagacgcccccgaucaaggacuucgggggcuucaacuucagccagauccugcccgaccccuccaagcccagcaagcgguccuucaucgaggaccuccuguucaacaaggugacccuggccgacgccggcuucaucaagcaguacggggacugccucggcgacaucgccgcgcgcgaccugaucugcgcccagaaguucaacgggcugaccguccucccgccccugcugaccgacgagaugaucgcccaguacaccagcgcccuccuggccggcaccaucacguccggguggaccuucggcgcgggcgccgcccugcagauccccuucgccaugcagauggcguaccgguucaacgggaucggcgugacccagaacgugcucuacgagaaccagaagcugaucgccaaccaguucaacagcgccaucgggaagauccaggacucccugagcuccaccgccagcgcccucggcaagcugcaggacgucgugaaccagaacgcgcaggcccugaacacgcucgugaagcagcuguccagcaacuucggggccaucuccagcguccugaacgacauccucucccgccuggacaagguggaggccgaggugcagaucgaccggcugaucaccggccgccuccagagccugcagaccuacgucacccagcagcugauccgggccgcggagauccgcgccagcgccaaccucgccgccaccaagauguccgagugcgugcugggccagagcaagcggguggacuucugcgggaagggcuaccaccugauguccuucccccagagcgcgccgcacggggucguguuccuccacgucacguacgugcccgcccaggagaagaacuucaccaccgcccccgccaucugccacgacggcaaggcgcacuucccccgcgaggggguguucgucuccaacggcacccacugguucgugacgcagcggaacuucuacgagccgcagaucaucaccaccgacaacaccuucgugagcggcaacugcgacgucgugaucgggaucgugaacaacacggucuacgacccccugcagcccgagcuggacuccuucaaggaggagcucgacaaguacuucaagaaccacaccagccccgacguggaccugggcgacaucuccgggaucaacgccagcguggucaacauccagaaggagaucgaccgccugaacgagguggccaagaaccucaacgagucccugaucgaccugcaggagcucggcaaguacgagcaguacaucaaguggccgugguacaucuggcugggcuucaucgccgggcugaucgccaucgugauggucaccaucaugcucugcugcaugaccagcugcugcuccugccugaagggcugcugcagcugcggguccugcugcaaguucgacgaggacgacagcgagcccgugcugaagggcgugaagcuccacuacacguga

SEQ ID NO: 11774 - RNA, 3822 nt, Artificial Sequence
  SARS-CoV-2/France/HF2496/2020__EPI_ISL_418231 spike protein CDS gc (1-1273)
auguucguguuccugguccuccugccccuggugagcucccagugcgugaaccucaccacccgcacgcagcugccgcccgccuacaccaacagcuucacccggggcgucuacuaccccgacaagguguuccgcuccagcgugcugcacuccacccaggaccucuuccugcccuucuucagcaacgucacgugguuccacgccauccacguguccgggaccaacggcaccaagcgguucgacaacccggugcugcccuucaacgacggggucuacuucgcgagcaccgagaaguccaacaucauccgcggcuggaucuucgggacgacccucgacagcaagacccagucccugcugaucgugaacaacgccaccaacguggucaucaaggugugcgaguuccaguucugcaacgaccccuuccucggcguguacuaccacaagaacaacaagagcuggauggaguccgaguuccgggucuacagcuccgccaacaacugcacguucgaguacgugagccagcccuuccugauggaccuggagggcaagcaggggaacuucaagaaccuccgcgaguucguguucaagaacaucgacggcuacuucaagaucuacuccaagcacaccccgaucaaccugguccgggaccugccccagggguucagcgcccucgagccccugguggaccugcccaucggcaucaacaucacccgcuuccagacccuccuggcccugcaccgguccuaccucacgccgggggacagcagcuccggcuggaccgcgggcgccgccgccuacuacgugggguaccugcagccccgcaccuuccugcucaaguacaacgagaacggcaccaucacggacgcggucgacugcgcccuggacccccugagcgagaccaagugcacccucaaguccuucaccguggagaaggggaucuaccagacgagcaacuuccgggugcagcccaccgaguccaucguccgcuucccgaacaucaccaaccugugccccuucggcgagguguucaacgccacccgguucgccagcgucuacgccuggaaccgcaagcggaucuccaacugcguggcggacuacagcgugcuguacaacuccgccagcuucuccacguucaagugcuacggcgucagccccaccaagcucaacgaccugugcuucaccaacguguacgccgacuccuucgugauccgcggggacgagguccggcagaucgcccccggccagaccgggaagaucgccgacuacaacuacaagcugccggacgacuucacgggcugcgugaucgcguggaacagcaacaaccucgacuccaaggucgggggcaacuacaacuaccuguaccgccuguuccgcaagagcaaccucaagcccuucgagcgggacaucuccaccgagaucuaccaggccggcagcacccccugcaacgggguggagggcuucaacugcuacuucccccugcaguccuacggguuccagccgaccaacggcgugggguaccagcccuaccggguggucgugcugagcuucgagcuccugcacgcccccgccacggugugcggccccaagaaguccaccaaccuggucaagaacaagugcgugaacuucaacuucaacggccucaccgggaccggcgugcugaccgagagcaacaagaaguuccugccguuccagcaguucgggcgcgacaucgccgacacgaccgacgcgguccgcgacccccagacccuggagauccucgacaucacccccugcagcuucggcgggguguccgugaucacgccgggcaccaacaccagcaaccaggucgccgugcuguaccagggcgugaacugcaccgagguccccguggccauccacgccgaccagcugacgcccaccuggcggguguacuccaccgggagcaacgucuuccagacccgcgccggcugccucaucggggcggagcacgugaacaacuccuacgagugcgacauccccaucggcgccggcaucugcgccagcuaccagacgcagaccaacuccccgcggcgcgcccggagcguggcgucccagagcaucaucgccuacaccaugucccugggggccgagaacagcgucgccuacuccaacaacagcaucgccauccccaccaacuucacgaucuccgugaccaccgagauccugcccgugagcaugaccaagacgagcgucgacugcaccauguacaucugcggcgacuccaccgagugcagcaaccuccugcugcaguacggguccuucugcacccagcucaaccgcgcgcugacgggcaucgccguggagcaggacaagaacacccaggagguguucgcccaggucaagcagaucuacaagacgcccccgaucaaggacuucgggggcuucaacuucagccagauccugcccgaccccuccaagcccagcaagcgguccuucaucgaggaccuccuguucaacaaggugacccuggccgacgccggcuucaucaagcaguacggggacugccucggcgacaucguggcgcgcgaccugaucugcgcccagaaguucaacgggcugaccguccucccgccccugcugaccgacgagaugaucgcccaguacaccagcgcccuccuggccggcaccaucacguccggguggaccuucggcgcgggcgccgcccugcagauccccuucgccaugcagauggcguaccgguucaacgggaucggcgugacccagaacgugcucuacgagaaccagaagcugaucgccaaccaguucaacagcgccaucgggaagauccaggacucccugagcuccaccgccagcgcccucggcaagcugcaggacgucgugaaccagaacgcgcaggcccugaacacgcucgugaagcagcuguccagcaacuucggggccaucuccagcguccugaacgacauccucucccgccuggacaagguggaggccgaggugcagaucgaccggcugaucaccggccgccuccagagccugcagaccuacgucacccagcagcugauccgggccgcggagauccgcgccagcgccaaccucgccgccaccaagauguccgagugcgugcugggccagagcaagcggguggacuucugcgggaagggcuaccaccugauguccuucccccagagcgcgccgcacggggucguguuccuccacgucacguacgugcccgcccaggagaagaacuucaccaccgcccccgccaucugccacgacggcaaggcgcacuucccccgcgaggggguguucgucuccaacggcacccacugguucgugacgcagcggaacuucuacgagccgcagaucaucaccaccgacaacaccuucgugagcggcaacugcgacgucgugaucgggaucgugaacaacacggucuacgacccccugcagcccgagcuggacuccuucaaggaggagcucgacaaguacuucaagaaccacaccagccccgacguggaccugggcgacaucuccgggaucaacgccagcguggucaacauccagaaggagaucgaccgccugaacgagguggccaagaaccucaacgagucccugaucgaccugcaggagcucggcaaguacgagcaguacaucaaguggccgugguacaucuggcugggcuucaucgccgggcugaucgccaucgugauggucaccaucaugcucugcugcaugaccagcugcugcuccugccugaagggcugcugcagcugcggguccugcugcaaguucgacgaggacgacagcgagcccgugcugaagggcgugaagcuccacuacacguga

SEQ ID NO: 11775 - RNA, 3822 nt, Artificial Sequence
  SARS-CoV-2/USA/WA-UW291/2020__EPI_ISL_418076 spike protein CDS gc (1-1273)
auguucguguuccugguccuccugccccuggugagcucccagugcgugaaccucaccacccgcacgcagcugccgcccgccuacaccaacagcuucacccggggcgucuacuaccccgacaagguguuccgcuccagcgugcugcacuccacccaggaccucuuccugcccuucuucagcaacgucacgugguuccacgccauccacguguccgggaccaacggcaccaagcgguucgacaacccggugcugcccuucaacgacggggucuacuucgcgagcaccgagaaguccaacaucauccgcggcuggaucuucgggacgacccucgacagcaagacccagucccugcugaucgugaacaacgccaccaacguggucaucaaggugugcgaguuccaguucugcaacgaccccuuccucggcguguacuaccacaagaacaacaagagcuggauggaguccgaguuccgggucuacagcuccgccaacaacugcacguucgaguacgugagccagcccuuccugauggaccuggagggcaagcaggggaacuucaagaaccuccgcgaguucguguucaagaacaucgacggcuacuucaagaucuacuccaagcacaccccgaucaaccugguccgggaccugccccagggguucagcgcccucgagccccugguggaccugcccaucggcaucaacaucacccgcuuccagacccuccuggcccugcaccgguccuaccucacgccgggggacagcagcuccggcuggaccgcgggcgccgccgccuacuacgugggguaccugcagccccgcaccuuccugcucaaguacaacgagaacggcaccaucacggacgcggucgacugcgcccuggacccccugagcgagaccaagugcacccucaaguccuucaccguggagaaggggaucuaccagacgagcaacuuccgggugcagcccaccgaguccaucguccgcuucccgaacaucaccaaccugugccccuucggcgagguguucaacgccacccgguucgccagcgucuacgccuggaaccgcaagcggaucuccaacugcguggcggacuacagcgugcuguacaacuccgccagcuucuccacguucaagugcuacggcgucagccccaccaagcucaacgaccugugcuucaccaacguguacgccgacuccuucgugauccgcggggacgagguccggcagaucgcccccggccagaccgggaagaucgccgacuacaacuacaagcugccggacgacuucacgggcugcgugaucgcguggaacagcaacaaccucgacuccaaggucgggggcaacuacaacuaccuguaccgccuguuccgcaagagcaaccucaagcccuucgagcgggacaucuccaccgagaucuaccaggccggcagcacccccugcaacgggguggagggcuucaacugcuacuucccccugcaguccuacggguuccagccgaccaacggcgugggguaccagcccuaccggguggucgugcugagcuucgagcuccugcacgcccccgccacggugugcggccccaagaaguccaccaaccuggucaagaacaagugcgugaacuucaacuucaacggccucaccgggaccggcgugcugaccgagagcaacaagaaguuccugccguuccagcaguucgggcgcgacaucgccgacacgaccgacgcgguccgcgacccccagacccuggagauccucgacaucacccccugcagcuucggcgggguguccgugaucacgccgggcaccaacaccagcaaccaggucgccgugcuguaccagggcgugaacugcaccgagguccccguggccauccacgccgaccagcugacgcccaccuggcggguguacuccaccgggagcaacgucuuccagacccgcgccggcugccucaucggggcggagcacgugaacaacuccuacgagugcgacauccccaucggcgccggcaucugcgccagcuaccagacgcagaccaacuccccgcggcgcgcccggagcguggcgucccagagcaucaucgccuacaccaugucccugggggccgagaacagcgucgccuacuccaacaacagcaucgccauccccaccaacuucacgaucuccgugaccaccgagauccugcccgugagcaugaccaagacgagcgucgacugcaccauguacaucugcggcgacuccaccgagugcagcaaccuccugcugcaguacggguccuucugcacccagcucaaccgcgcgcugacgggcaucgccguggagcaggacaagaacacccaggagguguucgcccaggucaagcagaucuacaagacgcccccgaucaaggacuucgggggcuucaacuucagccagauccugcccgaccccuccaagcccagcaagcgguccuucaucgaggaccuccuguucaacaaggugacccuggccgacgccggcuucaucaagcaguacggggacugccucggcgacaucgcggcccgcgaccugaucugcgcccagaaguucaacgggcugaccgugcucccgccccugcugaccgacgagaugaucgcccaguacaccagcgcccuccuggcgggcaccaucacguccggguggaccuucggcgccggcgccgcccugcagauccccuucgcgaugcagauggccuaccgguucaacgggaucggcgucacccagaacgugcucuacgagaaccagaagcugaucgccaaccaguucaacagcgccaucgggaagauccaguacucccugagcuccaccgccagcgcgcucggcaagcugcaggacguggucaaccagaacgcccaggcccugaacacgcucgugaagcagcuguccagcaacuucggggccaucuccagcgugcugaacgacauccucucccgccuggacaaggucgaggccgaggugcagaucgaccggcugaucaccggccgccuccagagccugcagaccuacgugacccagcagcugauccgggcggccgagauccgcgccagcgccaaccucgccgcgaccaagauguccgagugcguccugggccagagcaagcggguggacuucugcgggaagggcuaccaccugauguccuucccccagagcgccccgcacgggguggucuuccuccacgugacguacguccccgcccaggagaagaacuucaccaccgcccccgcgaucugccacgacggcaaggcccacuucccccgcgaggggguguucguguccaacggcacccacugguucgucacgcagcggaacuucuacgagccgcagaucaucaccaccgacaacaccuucgugagcggcaacugcgacguggucaucgggaucgugaacaacacgguguacgacccccugcagcccgagcuggacuccuucaaggaggagcucgacaaguacuucaagaaccacaccagccccgacgucgaccugggcgacaucuccgggaucaacgccagcguggugaacauccagaaggagaucgaccgccugaacgaggucgccaagaaccucaacgagucccugaucgaccugcaggagcucggcaaguacgagcaguacaucaaguggccgugguacaucuggcugggcuucaucgccgggcugaucgcgaucgugauggugaccaucaugcucugcugcaugaccagcugcugcuccugccugaagggcugcugcagcugcggguccugcugcaaguucgacgaggacgacagcgagcccguccugaagggcgugaagcuccacuacacguga

SEQ ID NO: 11776 - RNA, 3822 nt, Artificial Sequence
  SARS-CoV-2/Portugal/PT0034/2020__EPI_ISL_418019 spike protein CDS gc (1-1273)
auguucguguuccugguccuccugccccuggugagcucccagugcgugaaccucaccacccgcacgcagcugccgcccgccuacaccaacagcuucacccggggcgucuacuaccccgacaagguguuccgcuccagcgugcugcacuccacccaggaccucuuccugcccuucuucagcaacgucacgugguuccacgccauccacguguccgggaccaacggcaccaagcgguucgacaacccggugcugcccuucaacgacggggucuacuucgcgagcaccgagaaguccaacaucauccgcggcuggaucuucgggacgacccucgacagcaagacccagucccugcugaucgugaacaacgccaccaacguggucaucaaggugugcgaguuccaguucugcaacgaccccuuccucggcguguacuaccacaagaacaacaagagcuggauggaguccgaguuccgggucuacagcuccgccaacaacugcacguucgaguacgugagccagcccuuccugauggaccuggagggcaagcaggggaacuucaagaaccuccgcgaguucguguucaagaacaucgacggcuacuucaagaucuacuccaagcacaccccgaucaaccugguccgggaccugccccagggguucagcgcccucgagccccugguggaccugcccaucggcaucaacaucacccgcuuccagacccuccuggcccugcaccgguccuaccucacgccgggggacagcagcuccggcuggaccgcgggcgccgccgccuacuacgugggguaccugcagccccgcaccuuccugcucaaguacaacgagaacggcaccaucacggacgcggucgacugcgcccuggacccccugagcgagaccaagugcacccucaaguccuucaccguggagaaggggaucuaccagacgagcaacuuccgggugcagcccaccgaguccaucguccgcuucccgaacaucaccaaccugugccccuucggcgagguguucaacgccacccgguucgccagcgucuacgccuggaaccgcaagcggaucuccaacugcguggcggacuacagcgugcuguacaacuccgccagcuucuccacguucaagugcuacggcgucagccccaccaagcucaacgaccugugcuucaccaacguguacgccgacuccuucgugauccgcggggacgagguccggcagaucgcccccggccagaccgggaagaucgccgacuacaacuacaagcugccggacgacuucacgggcugcgugaucgcguggaacagcaacaaccucgacuccaaggucgggggcaacuacaacuaccuguaccgccuguuccgcaagagcaaccucaagcccuucgagcgggacaucuccaccgagaucuaccaggccggcagcacccccugcaacgggguggagggcuucaacugcuacuucccccugcaguccuacggguuccagccgaccaacggcgugggguaccagcccuaccggguggucgugcugagcuucgagcuccugcacgcccccgccacggugugcggccccaagaaguccaccaaccuggucaagaacaagugcgugaacuucaacuucaacggccucaccgggaccggcgugcugaccgagagcaacaagaaguuccugccguuccagcaguucgggcgcgacaucgccgacacgaccgacgcgguccgcgacccccagacccuggagauccucgacaucacccccugcagcuucggcgggguguccgugaucacgccgggcaccaacaccagcaaccaggucgccgugcuguaccagggcgugaacugcaccgagguccccguggccauccacgccgaccagcugacgcccaccuggcggguguacuccaccgggagcaacgucuuccagacccgcgccggcugccucaucggggcggagcacgugaacaacuccuacgagugcgacauccccaucggcgccggcaucugcgccagcuaccagacgcagaccaacuccccgcggcgcgcccggagcguggcgucccagagcaucaucgccuacaccaugucccugggggccgagaacagcgucgccuacuccaacaacagcaucgccauccccaccaacuucacgaucuccgugaccaccgagauccugcccgugagcaugaccaagacgagcgucgacugcaccauguacaucugcggcgacuccaccgagugcagcaaccuccugcugcaguacggguccuucugcacccagcucaaccgcgcgcugacgggcaucgccguggagcaggacaagaacacccaggagguguucgcccaggucaagcagaucuacaagacgcccccgaucaaggacuucgggggcuucaacuucagccagauccugcccgaccccuccaagcccagcaagcgguccuucaucgaggaccuccuguucaacaaggugacccuggccgacgccggcuucaucaagcaguacggggacugccucggcgacaucgcggcccgcgaccugaucugcgcccagaaguucaacgggcugaccgugcucccgccccugcugaccgacgagaugaucgcccaguacaccagcgcccuccuggcgggcaccaucacguccggguggaccuucggcgccggcgccgcccugcagauccccuucgcgaugcagauggccuaccgguucaacgggaucggcgucacccagaacgugcucuacgagaaccagaagcugaucgccaaccaguucaacagcgccaucgggaagauccaggacucccugagcuccaccgccagcgcgcucggcaagcugcaggacguggucaaccagaacgcccaggcccugaacacgcucgugaagcagcuguccagcaacuucggggccaucuccagcgugcugaacgacauccucucccgccuggacaaggucgaggccgaggugcagaucgaccggcugaucaccggccgccuccagagccugcagaccuacgugacccagcagcugauccgggcggccgagauccgcgccagcgccaaccucgccgcgaccaagauguccgagugcguccugggccagagcaagcggguggacuucugcgggaagggcuaccaccugauguccuucccccagagcgccccgcacgggguggucuuccuccacgugacguacguccccgcccaggagaagaacuucaccaccgcccccgcgaucugccacgacggcaaggcccacuucccccgcgaggggguguucguguccaacggcacccacugguucgucacgcagcggaacuucuacgagccgcagaucaucaccaccgacaacaccuucgugagcggcaacugcgacguggucaucgggaucgugaacaacacgguguacgacccccugcagcccgagcuggacuccuucaaggaggagcucgacaaguacuucaagaaccacaccagccccgacgucgaccugggcgacaucuccgggaucaacgccagcguggugaacauccagaaggagaucgaccgccugaacgaggucgccaagaaccucaacgagucccugaucgaccugcaggagcucggcaaguacgagcaguacaucaaguggccgugguacaucuggcugggcuucaucgccgggcugaucgcgaucgugauggugaccaucaugcucugcugcaucaccagcugcugcuccugccugaagggcugcugcagcugcggguccugcugcaaguucgacgaggacgacagcgagcccguccugaagggcgugaagcuccacuacacguga

SEQ ID NO: 11777 - RNA, 3822 nt, Artificial Sequence
  SARS-CoV-2/Iceland/202/2020__EPI_ISL_417750 spike protein CDS gc (1-1273)
auguucguguuccugguccuccugccccuggugagcucccagugcgugaaccucaccacccgcacgcagcugccgcccgccuacaccaacagcuucacccggggcgucuacuaccccgacaagguguuccgcuccagcgugcugcacuccacccaggaccucuuccugcccuucuucagcaacgucacgugguuccacgccauccacguguccgggaccaacggcaccaagcgguucgacaacccggugcugcccuucaacgacggggucuacuucgcgagcaccgagaaguccaacaucauccgcggcuggaucuucgggacgacccucgacagcaagacccagucccugcugaucgugaacaacgccaccaacguggucaucaaggugugcgaguuccaguucugcaacgaccccuuccucggcguguacuaccacaagaacaacaagagcuggauggaguccgaguuccgggucuacagcuccgccaacaacugcacguucgaguacgugagccagcccuuccugauggaccuggagggcaagcaggggaacuucaagaaccuccgcgaguucguguucaagaacaucgacggcuacuucaagaucuacuccaagcacaccccgaucaaccugguccgggaccugccccagggguucagcgcccucgagccccugguggaccugcccaucggcaucaacaucacccgcuuccagacccuccuggcccugcaccgguccuaccucacgccgggggacagcagcuccggcuggaccgcgggcgccgccgccuacuacgugggguaccugcagccccgcaccuuccugcucaaguacaacgagaacggcaccaucacggacgcggucgacugcgcccuggacccccugagcgagaccaagugcacccucaaguccuucaccguggagaaggggaucuaccagacgagcaacuuccgggugcagcccaccgaguccaucguccgcuucccgaacaucaccaaccugugccccuucggcgagguguucaacgccacccgguucgccagcgucuacgccuggaaccgcaagcggaucuccaacugcguggcggacuacagcgugcuguacaacuccgccagcuucuccacguucaagugcuacggcgucagccccaccaagcucaacgaccugugcuucaccaacguguacgccgacuccuucgugauccgcggggacgagguccggcagaucgcccccggccagaccgggaagaucgccgacuacaacuacaagcugccggacgacuucacgggcugcgugaucgcguggaacagcaacaaccucgacuccaaggucgggggcaacuacaacuaccuguaccgccuguuccgcaagagcaaccucaagcccuucgagcgggacaucuccaccgagaucuaccaggccggcagcacccccugcaacgggguggagggcuucaacugcuacuucccccugcaguccuacggguuccagccgaccaacggcgugggguaccagcccuaccggguggucgugcugagcuucgagcuccugcacgcccccgccacggugugcggccccaagaaguccaccaaccuggucaagaacaagugcgugaacuucaacuucaacggccucaccgggaccggcgugcugaccgagagcaacaagaaguuccugccguuccagcaguucgggcgcgacaucgccgacacgaccgacgcgguccgcgacccccagacccuggagauccucgacaucacccccugcagcuucggcgggguguccgugaucacgccgggcaccaacaccagcaaccaggucgccgugcuguaccaggacgugaacugcaccgagguccccguggccauccacgccgaccagcugacgcccaccuggcggguguacuccaccggcagcaacgucuuccagacccgcgccgggugccucaucggcgcggagcacgugaacaacuccuacgagugcgacauccccaucggggccggcaucugcgccagcuaccagacgcagaccaacuccccgcggcgcgcccggagcguggcgucccagagcaucaucgccuacaccaugucccugggcgccgagaacagcgucgccuacuccaacaacagcaucgccauccccaccaacuucacgaucuccgugaccaccgagauccugcccgugagcaugaccaagacgagcgucgacugcaccauguacaucugcggggacuccaccgagugcagcaaccuccugcugcaguacggcuccuucugcacccagcucaaccgcgcgcugacggggaucgccguggagcaggacaagaacacccaggagguguucgcccaggucaagcagaucuacaagacgcccccgaucaaggacuucggcggguucaacuucagccagauccugcccgaccccuccaagcccagcaagcgguccuucaucgaggaccuccuguucaacaaggugacccuggccgacgccggcuucaucaagcaguacggcgacugccucggggacaucgcggcccgcgaccugaucugcgcccagaaguucaacggccugaccgugcucccgccccugcugaccgacgagaugaucgcccaguacaccagcgcccuccuggcggggaccaucacguccggcuggaccuucggggccggcgccgcccugcagauccccuucgcgaugcagauggccuaccgguucaacggcaucggggucacccagaacgugcucuacgagaaccagaagcugaucgccaaccaguucaacagcgccaucggcaagauccaggacucccugagcuccaccgccagcgcgcucgggaagcugcaggacguggucaaccagaacgcccaggcccugaacacgcucgugaagcagcuguccagcaacuucggcgccaucuccagcgugcugaacgacauccucucccgccuggacaaggucgaggccgaggugcagaucgaccggcugaucaccgggcgccuccagagccugcagaccuacgugacccagcagcugauccgggcggccgagauccgcgccagcgccaaccucgccgcgaccaagauguccgagugcguccugggccagagcaagcggguggacuucugcggcaagggguaccaccugauguccuucccccagagcgccccgcacggcguggucuuccuccacgugacguacguccccgcccaggagaagaacuucaccaccgcccccgcgaucugccacgacgggaaggcccacuucccccgcgagggcguguucguguccaacgggacccacugguucgucacgcagcggaacuucuacgagccgcagaucaucaccaccgacaacaccuucgugagcggcaacugcgacguggucaucggcaucgugaacaacacgguguacgacccccugcagcccgagcuggacuccuucaaggaggagcucgacaaguacuucaagaaccacaccagccccgacgucgaccugggggacaucccgggcaucaacgccuccguggugaacauccagaaggagaucgaccgccugaacgaggucgccaagaaccucaacgagagccugaucgaccugcaggagcucgggaaguacgagcaguacaucaaguggcccugguacaucuggcugggcuucaucgccggccugaucgcgaucgugauggugaccaucaugcucugcugcaugaccuccugcugcagcugccugaaggggugcugcuccugcggcagcugcugcaaguucgacgaggacgacuccgagcccguccugaagggggugaagcuccacuacacguga

SEQ ID NO: 11778 - RNA, 3822 nt, Artificial Sequence
  SARS-CoV-2/USA/WA-UW261/2020__EPI_ISL_418046 spike protein CDS gc (1-1273)
auguucguguuccugguccuccugccccuggugagcucccagugcgugaaccucaccacccgcacgcagcugccgcccgccuacaccaacagcuucacccggggcgucuacuaccccgacaagguguuccgcuccagcgugcugcacuccacccaggaccucuuccugcccuucuucagcaacgucacgugguuccacgccauccacguguccgggaccaacggcaccaagcgguucgacaacccggugcugcccuucaacgacggggucuacuucgcgagcaccgagaaguccaacaucauccgcggcuggaucuucgggacgacccucgacagcaagacccagucccugcugaucgugaacaacgccaccaacguggucaucaaggugugcgaguuccaguucugcaacgaccccuuccucggcguguacuaccacaagaacaacaagagcuggauggaguccgaguuccgggucuacagcuccgccaacaacugcacguucgaguacgugagccagcccuuccugauggaccuggagggcaagcaggggaacuucaagaaccuccgcgaguucguguucaagaacaucgacggcuacuucaagaucuacuccaagcacaccccgaucaaccugguccgggaccugccccagggguucagcgcccucgagccccugguggaccugcccaucggcaucaacaucacccgcuuccagacccuccuggcccugcaccgguccuaccucacgccgggggacagcagcuccggcuggaccgcgggcgccgccgccuacuacgugggguaccugcagccccgcaccuuccugcucaaguacaacgagaacggcaccaucacggacgcggucgacugcgcccuggacccccugagcgagaccaagugcacccucaaguccuucaccguggagaaggggaucuaccagacgagcaacuuccgggugcagcccaccgaguccaucguccgcuucccgaacaucaccaaccugugccccuucggcgagguguucaacgccacccgguucacgagcgucuacgccuggaaccgcaagcggaucuccaacugcguggccgacuacagcgugcuguacaacuccgcgagcuucuccaccuucaagugcuacggcgucagccccaccaagcucaacgaccugugcuucaccaacguguacgccgacuccuucgugauccgcggggacgagguccggcagaucgcccccggccagacggggaagaucgccgacuacaacuacaagcugccggacgacuucaccggcugcgugaucgccuggaacagcaacaaccucgacuccaaggucgggggcaacuacaacuaccuguaccgccuguuccgcaagagcaaccucaagcccuucgagcgggacaucuccaccgagaucuaccaggcgggcagcacccccugcaacgggguggagggcuucaacugcuacuucccccugcaguccuacggguuccagccgacgaacggcgugggguaccagcccuaccggguggucgugcugagcuucgagcuccugcacgcccccgccaccgugugcggccccaagaaguccaccaaccuggucaagaacaagugcgugaacuucaacuucaacggccucaccgggaccggcgugcugacggagagcaacaagaaguuccugccguuccagcaguucgggcgcgacaucgccgacaccaccgacgccguccgcgacccccagacccuggagauccucgacaucacgcccugcagcuucggcgggguguccgugaucaccccgggcaccaacaccagcaaccaggucgcggugcuguaccaggacgugaacugcacggagguccccguggccauccacgccgaccagcugacccccaccuggcggguguacuccaccggcagcaacgucuuccagacgcgcgccgggugccucaucggcgccgagcacgugaacaacuccuacgagugcgacauccccaucggggcgggcaucugcgccagcuaccagacccagaccaacuccccgcggcgcgcccggagcguggccucccagagcaucaucgcguacaccaugucccugggcgccgagaacagcgucgccuacuccaacaacagcaucgccauccccacgaacuucaccaucuccgugaccaccgagauccugcccgugagcaugacgaagaccagcgucgacugcaccauguacaucugcggggacuccaccgagugcagcaaccuccugcugcaguacggcuccuucugcacgcagcucaaccgcgcccugaccgggaucgcgguggagcaggacaagaacacccaggagguguucgcccaggucaagcagaucuacaagacgcccccgaucaaggacuucggcggguucaacuucagccagauccugcccgaccccuccaagcccagcaagcgguccuucaucgaggaccuccuguucaacaaggugacccuggccgacgccggcuucaucaagcaguacggcgacugccucggggacaucgccgcgcgcgaccugaucugcgcccagaaguucaacggccugaccgugcucccgccccugcugaccgacgagaugaucgcccaguacaccagcgcccuccuggccgggacgaucaccuccggcuggaccuucggggcgggcgccgcccugcagauccccuucgccaugcagauggcguaccgguucaacggcaucggggucacccagaacgugcucuacgagaaccagaagcugaucgccaaccaguucaacagcgccaucggcaagauccaggacucccugagcuccacggccagcgcccucgggaagcugcaggacguggucaaccagaacgcgcaggcccugaacacccucgugaagcagcuguccagcaacuucggcgccaucuccagcgugcugaacgacauccucucccgccuggacaaggucgaggccgaggugcagaucgaccggcugaucaccgggcgccuccagagccugcagaccuacgugacccagcagcugauccgggccgcggagauccgcgccagcgccaaccucgccgccacgaagauguccgagugcguccugggccagagcaagcggguggacuucugcggcaagggguaccaccugauguccuucccccagagcgcgccgcacggcguggucuuccuccacgugaccuacguccccgcccaggagaagaacuucaccaccgcccccgccaucugccacgacgggaaggcgcacuucccccgcgagggcguguucguguccaacgggacgcacugguucgucacccagcggaacuucuacgagccgcagaucaucaccaccgacaacacguucgugagcggcaacugcgacguggucaucggcaucgugaacaacaccguguacgacccccugcagcccgagcuggacuccuucaaggaggagcucgacaaguacuucaagaaccacaccagccccgacgucgaccugggggacaucuccggcaucaacgccagcguggugaacauccagaaggagaucgaccgccugaacgaggucgccaagaaccucaacgagucccugaucgaccugcaggagcucgggaaguacgagcaguacaucaaguggccgugguacaucuggcugggcuucaucgccggccugaucgccaucgugauggugaccaucaugcucugcugcaugacgagcugcugcuccugccugaaggggugcugcagcugcggcuccugcugcaaguucgacgaggacgacagcgagcccguccugaagggggugaagcuccacuacaccuga

SEQ ID NO: 11779 - RNA, 3822 nt, Artificial Sequence
  SARS-CoV-2/Portugal/PT0035/2020__EPI_ISL_418020 spike protein CDS gc (1-1273)
auguucguguuccugguccuccugccccuggugagcucccagugcgugaaccucaccacccgcacgcagcugccgcccgccuacaccaacagcuucacccggggcgucuacuaccccgacaagguguuccgcuccagcgugcugcacuccacccaggaccucuuccugcccuucuucagcaacgucacgugguuccacgccauccacguguccgggaccaacggcaccaagcgguucgacaacccggugcugcccuucaacgacggggucuacuucgcgagcaccgagaaguccaacaucauccgcggcuggaucuucgggacgacccucgacagcaagacccagucccugcugaucgugaacaacgccaccaacguggucaucaaggugugcgaguuccaguucugcaacgaccccuuccucggcguguacuaccacaagaacaacaagagcuggauggaguccgaguuccgggucuacagcuccgccaacaacugcacguucgaguacgugagccagcccuuccugauggaccuggagggcaagcaggggaacuucaagaaccuccgcgaguucguguucaagaacaucgacggcuacuucaagaucuacuccaagcacaccccgaucaaccugguccgggaccugccccagggguucagcgcccucgagccccugguggaccugcccaucggcaucaacaucacccgcuuccagacccuccuggcccugcaccgguccuaccucacgccgggggacagcagcuccggcuggaccgcgggcgccgccgccuacuacgugggguaccugcagccccgcaccuuccugcucaaguacaacgagaacggcaccaucacggacgcggucgacugcgcccuggacccccugagcgagaccaagugcacccucaaguccuucaccguggagaaggggaucuaccagacgagcaacuuccgggugcagcccaccgaguccaucguccgcuucccgaacaucaccaaccugugccccuucggcgagguguucaacgccacccgguucgccagcgucuacgccuggaaccgcaagcggaucuccaacugcguggcggacuacagcgugcuguacaacuccgccagcuucuccacguucaagugcuacggcgucagccccaccaagcucaacgaccugugcuucaccaacguguacgccgacuccuucgugauccgcggggacgagguccggcagaucgcccccggccagaccgggaagaucgccgacuacaacuacaagcugccggacgacuucacgggcugcgugaucgcguggaacagcaacaaccucgacuccaaggucgggggcaacuacaacuaccuguaccgccuguuccgcaagagcaaccucaagcccuucgagcgggacaucuccaccgagaucuaccaggccggcagcacccccugcaacgggguggagggcuucaacugcuacuucccccugcaguccuacggguuccagccgaccaacggcgugggguaccagcccuaccggguggucgugcugagcuucgagcuccugcacgcccccgccacggugugcggccccaagaaguccaccaaccuggucaagaacaagugcgugaacuucaacuucaacggccucaccgggaccggcgugcugaccgagagcaacaagaaguuccugccguuccagcaguucgggcgcgacaucgccgacacgaccgacgcgguccgcgacccccagacccuggagauccucgacaucacccccugcagcuucggcgggguguccgugaucacgccgggcaccaacaccagcaaccaggucgccgugcuguaccaggacgugaacugcaccgagguccccguggccauccacgccgaccagcugacgcccaccuggcggguguacuccaccggcagcaacgucuuccagacccgcgccgggugccucaucggcgcggagcacgugaacaacuccuacgagugcgacauccccaucggggccggcaucugcgccagcuaccagacgcagaccaacuccccgcggcgcgcccggagcguggcgucccagagcaucaucgccuacaccaugucccugggcgccgagaacagcgucgccuacuccaacaacagcaucgccauccccaccaacuucacgaucuccgugaccaccgagauccugcccgugagcaugaccaagacgagcgucgacugcaccauguacaucugcggggacuccaccgagugcagcaaccuccugcugcaguacggcuccuucugcacccagcucaaccgcgcgcugacggggaucgccguggagcaggacaagaacacccaggagguguucgcccaggucaagcagaucuacaagacgcccccgaucaaggacuucggcggguucaacuucagccagauccugcccgaccccuccaagcccagcaagcgguccuucaucgaggaccuccuguucaacaaggugacccuggccgacgccggcuucaucaagcaguacggcgacugccucggggacaucagcgcgcgcgaccugaucugcgcccagaaguucaacggccugaccgugcucccgccccugcugaccgacgagaugaucgcccaguacaccuccgcccuccuggccgggaccaucacgagcggcuggaccuucggggcgggcgccgcccugcagauccccuucgccaugcagauggcguaccgguucaacggcaucggggucacccagaacgugcucuacgagaaccagaagcugaucgccaaccaguucaacuccgccaucggcaagauccaggacagccuguccagcaccgccuccgcccucgggaagcugcaggacguggucaaccagaacgcgcaggcccugaacacgcucgugaagcagcugagcuccaacuucggcgccaucagcuccgugcugaacgacauccucagccgccuggacaaggucgaggccgaggugcagaucgaccggcugaucaccgggcgccuccagagccugcagaccuacgugacccagcagcugauccgggccgcggagauccgcgccuccgccaaccucgccgccaccaagaugagcgagugcguccugggccaguccaagcggguggacuucugcggcaagggguaccaccugaugagcuucccccaguccgcgccgcacggcguggucuuccuccacgugacguacguccccgcccaggagaagaacuucaccaccgcccccgccaucugccacgacgggaaggcgcacuucccccgcgagggcguguucgugagcaacgggacccacugguucgucacgcagcggaacuucuacgagccgcagaucaucaccaccgacaacaccuucguguccggcaacugcgacguggucaucggcaucgugaacaacacgguguacgacccccugcagcccgagcuggacagcuucaaggaggagcucgacaaguacuucaagaaccacaccucccccgacgucgaccugggggacaucagcggcaucaacgccuccguggugaacauccagaaggagaucgaccgccugaacgaggucgccaagaaccucaacgagagccugaucgaccugcaggagcucgggaaguacgagcaguacaucaaguggccgugguacaucuggcugggcuucaucgccggccugaucgccaucgugauggugaccaucaugcucugcugcaugaccuccugcugcagcugccugaaggggugcugcuccugcggcagcugcugcaaguucgacgaggacgacuccgagcccguccugaagggggugaagcuccacuacacguga

SEQ ID NO: 11780 - RNA, 3822 nt, Artificial Sequence
  SARS-CoV-2/USA/NY-NYUMC7/2020__EPI_ISL_418192 spike protein CDS gc (1-1273)
auguucguguuccugguccuccugccccuggugagcucccagugcgugaaccucaccacccgcacgcagcugccgcccgccuacaccaacagcuucacccggggcgucuacuaccccgacaagguguuccgcuccagcgugcugcacuccacccaggaccucuuccugcccuucuucagcaacgucacgugguuccacgccauccacguguccgggaccaacggcaccaagcgguucgacaacccggugcugcccuucaacgacggggucuacuucgcgagcaccgagaaguccaacaucauccgcggcuggaucuucgggacgacccucgacagcaagacccagucccugcugaucgugaacaacgccaccaacguggucaucaaggugugcgaguuccaguucugcaacgaccccuuccucggcguguaccaccacaagaacaacaagagcuggauggaguccgaguuccgggucuacagcuccgccaacaacugcacguucgaguacgugagccagcccuuccugauggaccuggagggcaagcaggggaacuucaagaaccuccgcgaguucguguucaagaacaucgacggcuacuucaagaucuacuccaagcacaccccgaucaaccugguccgggaccugccccagggguucagcgcccucgagccccugguggaccugcccaucggcaucaacaucacccgcuuccagacccuccuggcccugcaccgguccuaccucacgccgggggacagcagcuccggcuggaccgcgggcgccgccgccuacuacgugggguaccugcagccccgcaccuuccugcucaaguacaacgagaacggcaccaucacggacgcggucgacugcgcccuggacccccugagcgagaccaagugcacccucaaguccuucaccguggagaaggggaucuaccagacgagcaacuuccgggugcagcccaccgaguccaucguccgcuucccgaacaucaccaaccugugccccuucggcgagguguucaacgccacccgguucgccagcgucuacgccuggaaccgcaagcggaucuccaacugcguggcggacuacagcgugcuguacaacuccgccagcuucuccacguucaagugcuacggcgucagccccaccaagcucaacgaccugugcuucaccaacguguacgccgacuccuucgugauccgcggggacgagguccggcagaucgcccccggccagaccgggaagaucgccgacuacaacuacaagcugccggacgacuucacgggcugcgugaucgcguggaacagcaacaaccucgacuccaaggucgggggcaacuacaacuaccuguaccgccuguuccgcaagagcaaccucaagcccuucgagcgggacaucuccaccgagaucuaccaggccggcagcacccccugcaacgggguggagggcuucaacugcuacuucccccugcaguccuacggguuccagccgaccaacggcgugggguaccagcccuaccggguggucgugcugagcuucgagcuccugcacgcccccgccacggugugcggccccaagaaguccaccaaccuggucaagaacaagugcgugaacuucaacuucaacggccucaccgggaccggcgugcugaccgagagcaacaagaaguuccugccguuccagcaguucgggcgcgacaucgccgacacgaccgacgcgguccgcgacccccagacccuggagauccucgacaucacccccugcagcuucggcgggguguccgugaucacgccgggcaccaacaccagcaaccaggucgccgugcuguaccagggcgugaacugcaccgagguccccguggccauccacgccgaccagcugacgcccaccuggcggguguacuccaccgggagcaacgucuuccagacccgcgccggcugccucaucggggcggagcacgugaacaacuccuacgagugcgacauccccaucggcgccggcaucugcgccagcuaccagacgcagaccaacuccccgcggcgcgcccggagcguggcgucccagagcaucaucgccuacaccaugucccugggggccgagaacagcgucgccuacuccaacaacagcaucgccauccccaccaacuucacgaucuccgugaccaccgagauccugcccgugagcaugaccaagacgagcgucgacugcaccauguacaucugcggcgacuccaccgagugcagcaaccuccugcugcaguacggguccuucugcacccagcucaaccgcgcgcugacgggcaucgccguggagcaggacaagaacacccaggagguguucgcccaggucaagcagaucuacaagacgcccccgaucaaggacuucgggggcuucaacuucagccagauccugcccgaccccuccaagcccagcaagcgguccuucaucgaggaccuccuguucaacaaggugacccuggccgacgccggcuucaucaagcaguacggggacugccucggcgacaucgcggcccgcgaccugaucugcgcccagaaguucaacgggcugaccgugcucccgccccugcugaccgacgagaugaucgcccaguacaccagcgcccuccuggcgggcaccaucacguccggguggaccuucggcgccggcgccgcccugcagauccccuucgcgaugcagauggccuaccgguucaacgggaucggcgucacccagaacgugcucuacgagaaccagaagcugaucgccaaccaguucaacagcgccaucgggaagauccaggacucccugagcuccaccgccagcgcgcucggcaagcugcaggacguggucaaccagaacgcccaggcccugaacacgcucgugaagcagcuguccagcaacuucggggccaucuccagcgugcugaacgacauccucucccgccuggacaaggucgaggccgaggugcagaucgaccggcugaucaccggccgccuccagagccugcagaccuacgugacccagcagcugauccgggcggccgagauccgcgccagcgccaaccucgccgcgaccaagauguccgagugcguccugggccagagcaagcggguggacuucugcgggaagggcuaccaccugauguccuucccccagagcgccccgcacgggguggucuuccuccacgugacguacguccccgcccaggagaagaacuucaccaccgcccccgcgaucugccacgacggcaaggcccacuucccccgcgaggggguguucguguccaacggcacccacugguucgucacgcagcggaacuucuacgagccgcagaucaucaccaccgacaacaccuucgugagcggcaacugcgacguggucaucgggaucgugaacaacacgguguacgacccccugcagcccgagcuggacuccuucaaggaggagcucgacaaguacuucaagaaccacaccagccccgacgucgaccugggcgacaucuccgggaucaacgccagcguggugaacauccagaaggagaucgaccgccugaacgaggucgccaagaaccucaacgagucccugaucgaccugcaggagcucggcaaguacgagcaguacaucaaguggccgugguacaucuggcugggcuucaucgccgggcugaucgcgaucgugauggugaccaucaugcucugcugcaugaccagcugcugcuccugccugaagggcugcugcagcugcggguccugcugcaaguucgacgaggacgacagcgagcccguccugaagggcgugaagcuccacuacacguga

SEQ ID NO: 11781 - RNA, 3822 nt, Artificial Sequence
  SARS-CoV-2/Iceland/189/2020__EPI_ISL_417709 spike protein CDS gc (1-1273)
auguucguguuccugguccuccugccccuggugagcucccagugcgugaaccucaccacccgcacgcagcugccgcccgccuacaccaacagcuucacccggggcgucuacuaccccgacaagguguuccgcuccagcgugcugcacuccacccaggaccucuuccugcccuucuucagcaacgucacgugguuccacgccauccacguguccgggaccaacggcaccaagcgguucgacaacccggugcugcccuucaacgacggggucuacuucgcgagcaccgagaaguccaacaucauccgcggcuggaucuucgggacgacccucgacagcaagacccagucccugcugaucgugaacaacgccaccaacguggucaucaaggugugcgaguuccaguucugcaacgaccccuuccucggcguguacuaccacaagaacaacaagagcuggauggaguccgaguuccgggucuacagcuccgccaacaacugcacguucgaguacgugagccagcccuuccugauggaccuggagggcaagcaggggaacuucaagaaccuccgcgaguucguguucaagaacaucgacggcuacuucaagaucuacuccaagcacaccccgaucaaccugguccgggaccugccccagggguucagcgcccucgagccccugguggaccugcccaucggcaucaacaucacccgcuuccagacccuccuggcccugcaccgguccuaccucacgccgggggacagcagcuccggcuggaccgcgggcgccgccgccuacuacgugggguaccugcagccccgcaccuuccugcucaaguacaacgagaacggcaccaucacggacgcggucgacugcgcccuggacccccugagcgagaccaagugcacccucaaguccuucaccguggagaaggggaucuaccagacgagcaacuuccgggugcagcccaccgaguccaucguccgcuucccgaacaucaccaaccugugccccuucggcgagguguucaacgccacccgguucgccagcgucuacgccuggaaccgcaagcggaucuccaacugcguggcggacuacagcgugcuguacaacuccgccagcuucuccacguucaagugcuacggcgucagccccaccaagcucaacgaccugugcuucaccaacguguacgccgacuccuucgugauccgcggggacgagguccggcagaucgcccccggccagaccgggaagaucgccgacuacaacuacaagcugccggacgacuucacgggcugcgugaucgcguggaacagcaacaaccucgacuccaaggucgggggcaacuacaacuaccuguaccgccuguuccgcaagagcaaccucaagcccuucgagcgggacaucuccaccgagaucuaccaggccggcagcacccccugcaacgggguggagggcuucaacugcuacuucccccugcaguccuacggguuccagccgaccaacggcgugggguaccagcccuaccggguggucgugcugagcuucgagcuccugcacgcccccgccacggugugcggccccaagaaguccaccaaccuggucaagaacaagugcgugaacuucaacuucaacggccucaccgggaccggcgugcugaccgagagcaacaagaaguuccugccguuccagcaguucgggcgcgacaucgccgacacgaccgacgcgguccgcgacccccagacccuggagauccucgacaucacccccugcagcuucggcgggguguccgugaucacgccgggcaccaacaccagcaaccaggucgccgugcuguaccagggcgugaacugcaccgagguccccguggccauccacgccgaccagcugacgcccaccuggcggguguacuccaccgggagcaacgucuuccagacccgcgccggcugccucaucggggcggagcacgugaacaacuccuacgagugcgacauccccaucggcgccggcaucugcgccagcuaccagacgcagaccaacuccccgcggcgcgcccggagcguggcgucccagagcaucaucgccuacaccaugucccugggggccgagaacagcgucgccuacuccaacaacagcaucgccauccccaccaacuucacgaucuccgugaccaccgagauccugcccgugagcaugaccaagacgagcgucgacugcaccauguacaucugcggcgacuccaccgagugcagcaaccuccugcugcaguacggguccuucugcacccagcucaaccgcgcgcugacgggcaucgccguggagcaggacaagaacacccaggagguguucgcccaggucaagcagaucuacaagacgcccccgaucaaggacuucgggggcuucaacuucagccagauccugcccgaccccuccaagcccagcaagcgguccuucaucgaggaccuccuguucaacaaggugacccuggccgacgccggcuucaccaagcaguacggggacugccucggcgacaucgcggcccgcgaccugaucugcgcccagaaguucaacgggcugaccgugcucccgccccugcugaccgacgagaugaucgcccaguacaccagcgcccuccuggcgggcacgaucaccuccggguggaccuucggcgccggcgccgcccugcagauccccuucgcgaugcagauggccuaccgguucaacgggaucggcgucacccagaacgugcucuacgagaaccagaagcugaucgccaaccaguucaacagcgccaucgggaagauccaggacucccugagcuccacggccagcgcgcucggcaagcugcaggacguggucaaccagaacgcccaggcccugaacacccucgugaagcagcuguccagcaacuucggggccaucuccagcgugcugaacgacauccucucccgccuggacaaggucgaggccgaggugcagaucgaccggcugaucaccggccgccuccagagccugcagaccuacgugacccagcagcugauccgggcggccgagauccgcgccagcgccaaccucgccgcgacgaagauguccgagugcguccugggccagagcaagcggguggacuucugcgggaagggcuaccaccugauguccuucccccagagcgccccgcacgggguggucuuccuccacgugaccuacguccccgcccaggagaagaacuucaccaccgcccccgcgaucugccacgacggcaaggcccacuucccccgcgaggggguguucguguccaacggcacgcacugguucgucacccagcggaacuucuacgagccgcagaucaucaccaccgacaacacguucgugagcggcaacugcgacguggucaucgggaucgugaacaacaccguguacgacccccugcagcccgagcuggacuccuucaaggaggagcucgacaaguacuucaagaaccacaccagccccgacgucgaccugggcgacaucuccgggaucaacgccagcguggugaacauccagaaggagaucgaccgccugaacgaggucgccaagaaccucaacgagucccugaucgaccugcaggagcucggcaaguacgagcaguacaucaaguggccgugguacaucuggcugggcuucaucgccgggcugaucgcgaucgugauggugaccaucaugcucugcugcaugacgagcugcugcuccugccugaagggcugcugcagcugcggguccugcugcaaguucgacgaggacgacagcgagcccguccugaagggcgugaagcuccacuacaccuga

SEQ ID NO: 11782 - RNA, 3822 nt, Artificial Sequence
  SARS-CoV-2/Australia/NSW56/2020__EPI_ISL_417408 spike protein CDS gc (1-1273)
auguucguguuccugguccuccugccccuggugagcucccagugcgugaaccucaccacccgcacgcagcugccgcccgccuacaccaacagcuucacccggggcgucuacuaccccgacaagguguuccgcuccagcgugcugcacuccacccaggaccucuuccugcccuucuucagcaacgucacgugguuccacgccauccacguguccgggaccaacggcaccaagcgguucgacaacccggugcugcccuucaacgacggggucuacuucgcgagcaccgagaaguccaacaucauccgcggcuggaucuucgggacgacccucgacagcaagacccagucccugcugaucgugaacaacgccaccaacguggucaucaaggugugcgaguuccaguucugcaacgaccccuuccucggcguguacuaccacaagaacaacaagagcuggauggaguccgaguuccgggucuacagcuccgccaacaacugcacguucgaguacgugagccagcccuuccugauggaccuggagggcaagcaggggaacuucaagaaccuccgcgaguucguguucaagaacaucgacggcuacuucaagaucuacuccaagcacaccccgaucaaccugguccgggaccugccccagggguucagcgcccucgagccccugguggaccugcccaucggcaucaacaucacccgcuuccagacccuccuggcccugcaccgguccuaccucacgccgggggacagcagcuccggcuggaccgcgggcgccgccgccuacuacgugggguaccugcagccccgcaccuuccugcucaaguacaacgagaacggcaccaucacggacgcggucgacugcgcccuggacccccugagcgagaccaagugcacccucaaguccuucaccguggagaaggggaucuaccagacgagcaacuuccgggugcagcccaccgaguccaucguccgcuucccgaacaucaccaaccugugccccuucggcgagguguucaacgccacccgguucgccagcgucuacgccuggaaccgcaagcggaucuccaacugcguggcggacuacagcgugcuguacaacuccgccagcuucuccacguucaagugcuacggcgucagccccaccaagcucaacgaccugugcuucaccaacguguacgccgacuccuucgugauccgcggggacgagguccggcagaucgcccccggccagaccgggaagaucgccgacuacaacuacaagcugccggacgacuucacgggcugcgugaucgcguggaacagcaacaaccucgacuccaaggucgggggcaacuacaacuaccuguaccgccuguuccgcaagagcaaccucaagcccuucgagcgggacaucuccaccgagaucuaccaggccggcagcacccccugcaacgggguggagggcuucaacugcuacuucccccugcaguccuacggguuccagccgaccaacggcgugggguaccagcccuaccggguggucgugcugagcuucgagcuccugcacgcccccgccacggugugcggccccaagaaguccaccaaccuggucaagaacaagugcgugaacuucaacuucaacggccucaccgggaccggcgugcugaccgagagcaacaagaaguuccugccguuccagcaguucgggcgcgacaucgccgacacgaccgacgcgguccgcgacccccagacccuggagauccucgacaucacccccugcagcuucggcgggguguccgugaucacgccgggcaccaacaccagcaaccaggucgccgugcuguaccaggacgugaacugcaccgagguccccguggccauccacgccgaccagcugacgcccaccuggcggguguacuccaccggcagcaacgucuuccagacccgcgccgggugccucaucggcgcggagcacgugaacaacuccuacgagugcgacauccccaucggggccggcaucugcgccagcuaccagacgcagaccaacuccccgcggcgcgcccggagcguggcgucccagagcaucaucgccuacaccaugucccugggcgccgagaacagcgucgccuacuccaacaacagcaucgccauccccaccaacuucacgaucuccgugaccaccgagauccugcccgugagcaugaccaagacgagcgucgacugcaccauguacaucugcggggacuccaccgagugcagcaaccuccugcugcaguacggcuccuucugcacccagcucaaccgcgcgcugacggggaucgccguggagcaggacaagaacacccaggagguguucgcccaggucaagcagaucuacaagacgcccccgaucaaggacuucggcggguucaacuucagccagauccugcccgacuccagcaagcccuccaagcggagcuucaucgaggaccuccuguucaacaaggugacccuggccgacgccggcuucaucaagcaguacggcgacugccucggggacaucgcggcccgcgaccugaucugcgcccagaaguucaacggccugaccgugcugcccccgcuccugaccgacgagaugaucgcccaguacaccuccgcccuccuggcggggaccaucacgagcggcuggaccuucggggccggcgccgcccugcagauccccuucgcgaugcagauggccuaccgguucaacggcaucggggucacccagaacgugcucuacgagaaccagaagcugaucgccaaccaguucaacuccgccaucggcaagauccaggacagccuguccagcaccgccuccgcgcucgggaagcugcaggacguggucaaccagaacgcccaggcccugaacacgcucgugaagcagcugagcuccaacuucggcgccaucagcuccgugcugaacgacauccucagccgccuggacaaggucgaggccgaggugcagaucgaccggcugaucaccgggcgccuccagagccugcagaccuacgugacccagcagcugauccgggcggccgagauccgcgccuccgccaaccucgccgcgaccaagaugagcgagugcguccugggccaguccaagcggguggacuucugcggcaagggguaccaccugaugagcuucccccaguccgcgccccacggcguggucuuccuccacgugacguacgucccggcccaggagaagaacuucaccaccgcccccgccaucugccacgacgggaaggcccacuucccccgcgagggcguguucgugagcaacgggacccacugguucgucacgcagcggaacuucuacgagccccagaucaucaccaccgacaacaccuucguguccggcaacugcgacguggucaucggcaucgugaacaacacgguguacgacccgcugcagcccgagcuggacagcuucaaggaggagcucgacaaguacuucaagaaccacaccucccccgacgucgaccugggggacaucagcggcaucaacgccuccguggugaacauccagaaggagaucgaccgccugaacgaggucgccaagaaccucaacgagagccugaucgaccugcaggagcucgggaaguacgagcaguacaucaaguggcccugguacaucuggcugggcuucaucgccggccugaucgcgaucgugauggugaccaucaugcucugcugcaugaccuccugcugcagcugccugaaggggugcugcuccugcggcagcugcugcaaguucgacgaggacgacuccgagccgguccugaagggggugaagcuccacuacacguga

SEQ ID NO: 11783 - RNA, 3822 nt, Artificial Sequence
  SARS-CoV-2/Iceland/280/2020__EPI_ISL_417608 spike protein CDS gc (1-1273)
auguucguguuccugguccuccugccccuggugagcucccagugcgugaaccucaccacccgcacgcagcugccgcccgccuacaccaacagcuucacccggggcgucuacuaccccgacaagguguuccgcuccagcgugcugcacuccacccaggaccucuuccugcccuucuucagcaacgucacgugguuccacgccauccacguguccgggaccaacggcaccaagcgguucgacaacccggugcugcccuucaacgacggggucuacuucgcgagcaccgagaaguccaacaucauccgcggcuggaucuucgggacgacccucgacagcaagacccagucccugcugaucgugaacaacgccaccaacguggucaucaaggugugcgaguuccaguucugcaacgaccccuuccucggcguguacuaccacaagaacaacaagagcuggauggaguccgaguuccgggucuacagcuccgccaacaacugcacguucgaguacgugagccagcccuuccugauggaccuggagggcaagcaggggaacuucaagaaccuccgcgaguucguguucaagaacaucgacggcuacuucaagaucuacuccaagcacaccccgaucaaccugguccgggaccugccccagggguucagcgcccucgagccccugguggaccugcccaucggcaucaacaucacccgcuuccagacccuccuggcccugcaccgguccuaccucacgccgggggacagcagcuccggcuggaccgcgggcgccgccgccuacuacgugggguaccugcagccccgcaccuuccugcucaaguacaacgagaacggcaccaucacggacgcggucgacugcgcccuggacccccugagcgagaccaagugcacccucaaguccuucaccguggagaaggggaucuaccagacgagcaacuuccgggugcagcccaccgaguccaucguccgcuucccgaacaucaccaaccugugccccuucggcgagguguucaacgccacccgguucgccagcgucuacgccuggaaccgcaagcggaucuccaacugcguggcggacuacagcgugcuguacaacuccgccagcuucuccacguucaagugcuacggcgucagccccaccaagcucaacgaccugugcuucaccaacguguacgccgacuccuucgugauccgcggggacgagguccggcagaucgcccccggccagaccgggaagaucgccgacuacaacuacaagcugccggacgacuucacgggcugcgugaucgcguggaacagcaacaaccucgacuccaaggucgggggcaacuacaacuaccuguaccgccuguuccgcaagagcaaccucaagcccuucgagcgggacaucuccaccgagaucuaccaggccggcagcacccccugcaacgggguggagggcuucaacugcuacuucccccugcaguccuacggguuccagccgaccaacggcgugggguaccagcccuaccggguggucgugcugagcuucgagcuccugcacgcccccgccacggugugcggccccaagaaguccaccaaccuggucaagaacaagugcgugaacuucaacuucaacggccucaccgggaccggcgugcugaccgagagcaacaagaaguuccugccguuccagcaguucgggcgcgacaucgccgacacgaccgacgcgguccgcgacccccagacccuggagauccucgacaucacccccugcagcuucggcgggguguccgugaucacgccgggcaccaacaccagcaaccaggucgccgugcuguaccagggcgugaacugcaccgagguccccguggccauccacgccgaccagcugacgcccaccuggcggguguacuccaccgggagcaacgucuuccagacccgcgccggcugccucaucggggcggagcacgugaacaacuccuacgagugcgacauccccaucggcgccggcaucugcgccagcuaccacacgcagaccaacuccccgcggcgcgcccggagcguggcgucccagagcaucaucgccuacaccaugucccugggggccgagaacagcgucgccuacuccaacaacagcaucgccauccccaccaacuucacgaucuccgugaccaccgagauccugcccgugagcaugaccaagacgagcgucgacugcaccauguacaucugcggcgacuccaccgagugcagcaaccuccugcugcaguacggguccuucugcacccagcucaaccgcgcgcugacgggcaucgccguggagcaggacaagaacacccaggagguguucgcccaggucaagcagaucuacaagacgcccccgaucaaggacuucgggggcuucaacuucagccagauccugcccgaccccuccaagcccagcaagcgguccuucaucgaggaccuccuguucaacaaggugacccuggccgacgccggcuucaucaagcaguacggggacugccucggcgacaucgcggcccgcgaccugaucugcgcccagaaguucaacgggcugaccgugcucccgccccugcugaccgacgagaugaucgcccaguacaccagcgcccuccuggcgggcaccaucacguccggguggaccuucggcgccggcgccgcccugcagauccccuucgcgaugcagauggccuaccgguucaacgggaucggcgucacccagaacgugcucuacgagaaccagaagcugaucgccaaccaguucaacagcgccaucgggaagauccaggacucccugagcuccaccgccagcgcgcucggcaagcugcaggacguggucaaccagaacgcccaggcccugaacacgcucgugaagcagcuguccagcaacuucggggccaucuccagcgugcugaacgacauccucucccgccuggacaaggucgaggccgaggugcagaucgaccggcugaucaccggccgccuccagagccugcagaccuacgugacccagcagcugauccgggcggccgagauccgcgccagcgccaaccucgccgcgaccaagauguccgagugcguccugggccagagcaagcggguggacuucugcgggaagggcuaccaccugauguccuucccccagagcgccccgcacgggguggucuuccuccacgugacguacguccccgcccaggagaagaacuucaccaccgcccccgcgaucugccacgacggcaaggcccacuucccccgcgaggggguguucguguccaacggcacccacugguucgucacgcagcggaacuucuacgagccgcagaucaucaccaccgacaacaccuucgugagcggcaacugcgacguggucaucgggaucgugaacaacacgguguacgacccccugcagcccgagcuggacuccuucaaggaggagcucgacaaguacuucaagaaccacaccagccccgacgucgaccugggcgacaucuccgggaucaacgccagcguggugaacauccagaaggagaucgaccgccugaacgaggucgccaagaaccucaacgagucccugaucgaccugcaggagcucggcaaguacgagcaguacaucaaguggccgugguacaucuggcugggcuucaucgccgggcugaucgcgaucgugauggugaccaucaugcucugcugcaugaccagcugcugcuccugccugaagggcugcugcagcugcggguccugcugcaaguucgacgaggacgacagcgagcccguccugaagggcgugaagcuccacuacacguga

SEQ ID NO: 11784 - RNA, 3822 nt, Artificial Sequence
  SARS-CoV-2/Iceland/247/2020__EPI_ISL_417575 spike protein CDS gc (1-1273)
auguucguguuccugguccuccugccccuggugagcucccagugcgugaaccucaccacccgcacgcagcugccgcccgccuacaccaacagcuucacccggggcgucuacuaccccgacaagguguuccgcuccagcgugcugcacuccacccaggaccucuuccugcccuucuucagcaacgucacgugguuccacgccauccacguguccgggaccaacggcaccaagcgguucgacaacccggugcugcccuucaacgacggggucuacuucgcgagcaccgagaaguccaacaucauccgcggcuggaucuucgggacgacccucgacagcaagacccagucccugcugaucgugaacaacgccaccaacguggucaucaaggugugcgaguuccaguucugcaacgaccccuuccucggcguguacuaccacaagaacaacaagagcuggauggaguccgaguuccgggucuacagcuccgccaacaacugcacguucgaguacgugagccagcccuuccugauggaccuggagggcaagcaggggaacuucaagaaccuccgcgaguucguguucaagaacaucgacggcuacuucaagaucuacuccaagcacaccccgaucaaccugguccgggaccugccccagggguucagcgcccucgagccccugguggaccugcccaucggcaucaacaucacccgcuuccagacccuccuggcccugcaccgguccuaccucacgccgggggacagcagcuccggcuggaccgcgggcgccgccgccuacuacgugggguaccugcagccccgcaccuuccugcucaaguacaacgagaacggcaccaucacggacgcggucgacugcgcccuggacccccugagcgagaccaagugcacccucaaguccuucaccguggagaaggggaucuaccagacgagcaacuuccgggugcagcccaccgaguccaucguccgcuucccgaacaucaccaaccugugccccuucggcgagguguucaacgccacccgguucgccagcgucuacgccuggaaccgcaagcggaucuccaacugcguggcggacuacagcgugcuguacaacuccgccagcuucuccacguucaagugcuacggcgucagccccaccaagcucaacgaccugugcuucaccaacguguacgccgacuccuucgugauccgcggggacgagguccggcagaucgcccccggccagaccgggaagaucgccgacuacaacuacaagcugccggacgacuucacgggcugcgugaucgcguggaacagcaacaaccucgacuccaaggucgggggcaacuacaacuaccuguaccgccuguuccgcaagagcaaccucaagcccuucgagcgggacaucuccaccgagaucuaccaggccggcagcacccccugcaacgggguggagggcuucaacugcuacuucccccugcaguccuacggguuccagccgaccaacggcgugggguaccagcccuaccggguggucgugcugagcuucgagcuccugcacgcccccgccacggugugcggccccaagaaguccaccaaccuggucaagaacaagugcgugaacuucaacuucaacggccucaccgggaccggcgugcugaccgagagcaacaagaaguuccugccguuccagcaguucgggcgcgacaucgccgacacgaccgacgcgguccgcgacccccagacccuggagauccucgacaucacccccugcagcuucggcgggguguccgugaucacgccgggcaccaacaccagcaaccaggucgccgugcuguaccagggcgugaacugcaccgagguccccguggccauccacgccgaccagcugacgcccaccuggcggguguacuccaccgggagcaacgucuuccagacccgcgccggcugccucaucggggcggagcacgugaacaacuccuacgagugcgacauccccaucggcgccggcaucugcgccagcuaccagacgcagaccaacuccccgcggcgcgcccggagcguggcgucccagagcaucaucgccuacaccaugucccugggggccgagaacagcgucgccuacuccaacaacagcaucgccauccccaccaacuucacgaucuccgugaccaccgagauccugcccgugagcaugaccaagacgagcgucgacugcaccauguacaucugcggcgacuccaccgagugcagcaaccuccugcugcaguacggguccuucugcacccagcucaaccgcgcgcugacgggcaucgccguggagcaggacaagaacacccaggagguguucgcccaggucaagcagaucuacaagacgcccccgaucaaggacuucgggggcuucaacuucagccagauccugcccgaccccuccaagcccagcaagcgguccuucaucgaggaccuccuguucaacaaggugacccuggccgacgccggcuucaucaagcaguacggggacugccucggcgacaucgcggcccgcgaccugaucugcgcccagaaguucaacgggcugaccgugcucccgccccugcugaccgacgagaugaucgcccaguacaccagcgcccuccuggcgggcaccaucacguccggguggaccuucggcgccggcgccgcccugcagauccccuucgcgaugcagauggccuaccgguucaacgggaucggcgucacccagaacgugcucuacgagaaccagaagcugaucgccaaccaguucaacagcgccaucgggaagauccaggacucccugagcuccaccgccagcgcgcucggcaagcugcaggacguggucaaccagaacgcccaggcccugaacacgcucgugaagcagcuguccagcaacuucggggccaucuccagcgugcugaacgacauccucucccgccuggacaaggucgaggccgaggugcagaucgaccggcugaucaccggccgccuccagagccugcagaccuacgugacccagcagcugauccgggcggccgagauccgcgccagcgccaaccucgccgcgaccaagauguccgagugcguccugggccagagcaagcggguggacuucugcgggaagggcuaccaccugauguccuucccccagagcgccccgcacgggguggucuuccuccacgugacguacguccccgcccaggagaagaacuucaccaccgcccccgcgaucugccacgacggcaaggcccacuucccccgcgaggggguguucguguccaacggcacccacugguucgucacgcagcggaacuucuacgagccgcagaucaucaccaccgacaacaccuucgugagcggcaacugcgacguggucaucgggaucgugaacaacacgguguacgacccccugcagcccgagcuggacuccuucaaggaggagcucgacaaguacuucaagaaccacaccagccccgacgucgaccugggcgacaucuccgggaucaacgccagcguggugaacauccagaaggagaucgaccgccugaacgaggucgccaagaaccucaacgagucccugaucgaccugcaggagcucggcaaguacgagcaguacaucaaguggccgugguacaucuggcugggcuucaucgccgggcugaucgcgaucgugaucgugaccaucaugcucugcugcaugaccagcugcugcuccugccugaagggcugcugcagcugcggguccugcugcaaguucgacgaggacgacagcgagcccguccugaagggcgugaagcuccacuacacguga

SEQ ID NO: 11785 - RNA, 3822 nt, Artificial Sequence
  SARS-CoV-2/Iceland/238/2020__EPI_ISL_417566 spike protein CDS gc (1-1273)
auguucguguuccugguccuccugccccuggugagcucccagugcgugaaccucaccacccgcacgcagcugccgcccgccuacaccaacagcuucacccggggcgucuacuaccccgacaagguguuccgcuccagcgugcugcacuccacccaggaccucuuccugcccuucuucagcaacgucacgugguuccacgccauccacguguccgggaccaacggcaccaagcgguucgacaacccggugcugcccuucaacgacggggucuacuucgcgagcaccgagaaguccaacaucauccgcggcuggaucuucgggacgacccucgacagcaagacccagucccugcugaucgugaacaacgccaccaacguggucaucaaggugugcgaguuccaguucugcaacgaccccuuccucggcguguacuaccacaagaacaacaagagcuggauggaguccgaguuccgggucuacagcuccgccaacaacugcacguucgaguacgugagccagcccuuccugauggaccuggagggcaagcaggggaacuucaagaaccuccgcgaguucguguucaagaacaucgacggcuacuucaagaucuacuccaagcacaccccgaucaaccugguccgggaccugccccagggguucagcgcccucgagccccugguggaccugcccaucggcaucaacaucacccgcuuccagacccuccuggcccugcaccgguccuaccucacgccgggggacagcagcuccggcuggaccgcgggcgccgccgccuacuacgugggguaccugcagccccgcaccuuccugcucaaguacaacgagaacggcaccaucacggacgcggucgacugcgcccuggacccccugagcgagaccaagugcacccucaaguccuucaccguggagaaggggaucuaccagacgagcaacuuccgggugcagcccaccgaguccaucguccgcuucccgaacaucaccaaccugugccccuucggcgagguguucaacgccacccgguucgccagcgucuacgccuggaaccgcaagcggaucuccaacugcguggcggacuacagcgugcuguacaacuccgccagcuucuccacguucaagugcuacggcgucagccccaccaagcucaacgaccugugcuucaccaacguguacgccgacuccuucgugauccgcggggacgagguccggcagaucgcccccggccagaccgggaagaucgccgacuacaacuacaagcugccggacgacuucacgggcugcgugaucgcguggaacagcaacaaccucgacuccaaggucgggggcaacuacaacuaccuguaccgccuguuccgcaagagcaaccucaagcccuucgagcgggacaucuccaccgagaucuaccaggccggcagcacccccugcaacgggguggagggcuucaacugcuacuucccccugcaguccuacggguuccagccgaccaacggcgugggguaccagcccuaccggguggucgugcugagcuucgagcuccugcacgcccccgccacggugugcggccccaagaaguccaccaaccuggucaagaacaagugcgugaacuucaacuucaacggccucaccgggaccggcgugcugaccgagagcaacaagaaguuccugccguuccagcaguucgggcgcgacaucgccgacacgaccgacgcgguccgcgacccccagacccuggagauccucgacaucacccccugcagcuucggcgggguguccgugaucacgccgggcaccaacaccagcaaccaggucgccgugcuguaccagggcgugaacugcaccgagguccccguggccauccacgccgaccagcugacgcccaccuggcggguguacuccaccgggagcaacgucuuccagacccgcgccggcugccucaucggggcggagcacgugaacaacuccuacgagugcgacauccccaucggcgccggcaucugcgccagcuaccagacgcagaccaacuccccgcggcgcgcccggagcguggcgucccagagcaucaucgccuacaccaugucccugggggccgagaacagcgucgccuacuccaacaacagcaucgccauccccaccaacuucacgaucuccgugaccaccgagauccugcccgugagcaugaccaagacgagcgucgacugcaccauguacaucugcggcgacuccaccgagugcagcaaccuccugcugcaguacggguccuucugcacccagcucaaccgcgcgcugacgggcaucgccguggagcaggacaagaacacccaggagguguucgcccaggucaagcagaucuacaagacgcccccgaucaaggacuucgggggcuucaacuucagccagauccugcccgaccccuccaagcccagcaagcgguccuucaucgaggaccuccuguucaacaaggugacccuggccgacgugggcuucaucaagcaguacggggacugccucggcgacaucgccgcgcgcgaccugaucugcgcccagaaguucaacgggcugaccguccucccgccccugcugaccgacgagaugaucgcccaguacaccagcgcccuccuggccggcaccaucacguccggguggaccuucggcgcgggcgccgcccugcagauccccuucgccaugcagauggcguaccgguucaacgggaucggcgugacccagaacgugcucuacgagaaccagaagcugaucgccaaccaguucaacagcgccaucgggaagauccaggacucccugagcuccaccgccagcgcccucggcaagcugcaggacgucgugaaccagaacgcgcaggcccugaacacgcucgugaagcagcuguccagcaacuucggggccaucuccagcguccugaacgacauccucucccgccuggacaagguggaggccgaggugcagaucgaccggcugaucaccggccgccuccagagccugcagaccuacgucacccagcagcugauccgggccgcggagauccgcgccagcgccaaccucgccgccaccaagauguccgagugcgugcugggccagagcaagcggguggacuucugcgggaagggcuaccaccugauguccuucccccagagcgcgccgcacggggucguguuccuccacgucacguacgugcccgcccaggagaagaacuucaccaccgcccccgccaucugccacgacggcaaggcgcacuucccccgcgaggggguguucgucuccaacggcacccacugguucgugacgcagcggaacuucuacgagccgcagaucaucaccaccgacaacaccuucgugagcggcaacugcgacgucgugaucgggaucgugaacaacacggucuacgacccccugcagcccgagcuggacuccuucaaggaggagcucgacaaguacuucaagaaccacaccagccccgacguggaccugggcgacaucuccgggaucaacgccagcguggucaacauccagaaggagaucgaccgccugaacgagguggccaagaaccucaacgagucccugaucgaccugcaggagcucggcaaguacgagcaguacaucaaguggccgugguacaucuggcugggcuucaucgccgggcugaucgccaucgugauggucaccaucaugcucugcugcaugaccagcugcugcuccugccugaagggcugcugcagcugcggguccugcugcaaguucgacgaggacgacagcgagcccgugcugaagggcgugaagcuccacuacacguga

SEQ ID NO: 11786 - RNA, 3822 nt, Artificial Sequence
  SARS-CoV-2/Greece/16/2020__EPI_ISL_418265 spike protein CDS gc (1-1273)
auguucguguuccugguccuccugccccuggugagcucccagugcgugaaccucaccacccgcacgcagcugccgcccgccuacaccaacagcuucacccggggcgucuacuaccccgacaagguguuccgcuccagcgugcugcacuccacccaggaccucuuccugcccuucuucagcaacgucacgugguuccacgccauccacguguccgggaccaacggcaccaagcgguucgacaacccggugcugcccuucaacgacggggucuacuucgcgagcaccgagaaguccaacaucauccgcggcuggaucuucgggacgacccucgacagcaagacccagucccugcugaucgugaacaacgccaccaacguggucaucaaggugugcgaguuccaguucugcaacgaccccuuccucggcguguacuaccacaagaacaacaagagcuggauggaguccgaguuccgggucuacagcuccgccaacaacugcacguucgaguacgugagccagcccuuccugauggaccuggagggcaagcaggggaacuucaagaaccuccgcgaguucguguucaagaacgucgacggcuacuucaagaucuacuccaagcacaccccgaucaaccuggugcgggaccugccccagggguucagcgcccucgagccccugguggaccugcccaucggcaucaacaucacccgcuuccagacccuccuggcccugcaccgguccuaccucacgccgggggacagcagcuccggcuggaccgcgggcgccgccgccuacuacgucggguaccugcagccccgcaccuuccugcucaaguacaacgagaacggcaccaucacggacgcgguggacugcgcccuggacccccugagcgagaccaagugcacccucaaguccuucaccguggagaaggggaucuaccagacgagcaacuuccggguccagcccaccgaguccaucgugcgcuucccgaacaucaccaaccugugccccuucggcgaggucuucaacgccacccgguucgccagcguguacgccuggaaccgcaagcggaucuccaacugcguggcggacuacagcguccuguacaacuccgccagcuucuccacguucaagugcuacggcgugagccccaccaagcucaacgaccugugcuucaccaacguguacgccgacuccuucgucauccgcggggacgaggugcggcagaucgcccccggccagaccgggaagaucgccgacuacaacuacaagcugccggacgacuucacgggcugcgugaucgcguggaacagcaacaaccucgacuccaaggucgggggcaacuacaacuaccuguaccgccuguuccgcaagagcaaccucaagcccuucgagcgggacaucuccaccgagaucuaccaggccggcagcacccccugcaacgggguggagggcuucaacugcuacuucccccugcaguccuacggguuccagccgaccaacggcgugggguaccagcccuaccgggucguggugcugagcuucgagcuccugcacgcccccgccacggucugcggccccaagaaguccaccaaccuggugaagaacaagugcgugaacuucaacuucaacggccucaccgggaccggcguccugaccgagagcaacaagaaguuccugccguuccagcaguucgggcgcgacaucgccgacacgaccgacgcggugcgcgacccccagacccuggagauccucgacaucacccccugcagcuucggcgggguguccgucaucacgccgggcaccaacaccagcaaccagguggccgugcuguaccaggacgucaacugcaccgaggugcccguggccauccacgccgaccagcugacgcccaccuggcgggucuacuccaccggcagcaacguguuccagacccgcgccgggugccucaucggcgcggagcacgugaacaacuccuacgagugcgacauccccaucggggccggcaucugcgccagcuaccagacgcagaccaacuccccgcggcgcgcccggagcgucgcgucccagagcaucaucgccuacaccaugucccugggcgccgagaacagcguggccuacuccaacaacagcaucgccauccccaccaacuucacgaucuccgugaccaccgagauccugcccgucagcaugaccaagacgagcguggacugcaccauguacaucugcggggacuccaccgagugcagcaaccuccugcugcaguacggcuccuucugcacccagcucaaccgcgcgcugacggggaucgccguggagcaggacaagaacacccaggaggucuucgcccaggugaagcagaucuacaagacgcccccgaucaaggacuucggcggguucaacuucagccagauccugcccgaccccuccaagcccagcaagcgguccuucaucgaggaccuccuguucaacaaggugacccuggccgacgccggcuucaucaagcaguacggcgacugccucggggacaucgcggcccgcgaccugaucugcgcccagaaguucaacggccugaccguccucccgccccugcugaccgacgagaugaucgcccaguacaccagcgcccuccuggcggggaccaucacguccggcuggaccuucggggccggcgccgcccugcagauccccuucgcgaugcagauggccuaccgguucaacggcaucggggugacccagaacgugcucuacgagaaccagaagcugaucgccaaccaguucaacagcgccaucggcaagauccaggacucccugagcuccaccgccagcgcgcucgggaagcugcaggacgucgugaaccagaacgcccaggcccugaacacgcucgugaagcagcuguccagcaacuucggcgccaucuccagcguccugaacgacauccucucccgccuggacaagguggaggccgaggugcagaucgaccggcugaucaccgggcgccuccagagccugcagaccuacgucacccagcagcugauccgggcggccgagauccgcgccagcgccaaccucgccgcgaccaagauguccgagugcgugcugggccagagcaagcggguggacuucugcggcaagggguaccaccugauguccuucccccagagcgccccgcacggcgucguguuccuccacgucacguacgugcccgcccaggagaagaacuucaccaccgcccccgcgaucugccacgacgggaaggcccacuucccccgcgagggcguguucgucuccaacgggacccacugguucgugacgcagcggaacuucuacgagccgcagaucaucaccaccgacaacaccuucgugagcggcaacugcgacgucgugaucggcaucgugaacaacacggucuacgacccccugcagcccgagcuggacuccuucaaggaggagcucgacaaguacuucaagaaccacaccagccccgacguggaccugggggacaucuccggcaucaacgccagcguggucaacauccagaaggagaucgaccgccugaacgagguggccaagaaccucaacgagucccugaucgaccugcaggagcucgggaaguacgagcaguacaucaaguggccgugguacaucuggcugggcuucaucgccggccugaucgcgaucgugauggucaccaucaugcucugcugcaugaccagcugcugcuccugccugaaggggugcugcagcugcggcuccugcugcaaguucgacgaggacgacagcgagcccgugcugaagggggugaagcuccacuacacguga

SEQ ID NO: 11787 - RNA, 3822 nt, Artificial Sequence
  SARS-CoV-2/Iceland/319/2020__EPI_ISL_417648 spike protein CDS gc (1-1273)
auguucguguuccugguccuccugccccuggugagcucccagugcgugaaccucaccacccgcacgcagcugccgcccgccuacaccaacagcuucacccggggcgucuacuaccccgacaagguguuccgcuccagcgugcugcacuccacccaggaccucuuccugcccuucuucagcaacgucacgugguuccacgccauccacguguccgggaccaacggcaccaagcgguucgacaacccggugcugcccuucaacgacggggucuacuucgcgagcaccgagaaguccaacaucauccgcggcuggaucuucgggacgacccucgacagcaagacccagucccugcugaucgugaacaacgccaccaacguggucaucaaggugugcgaguuccaguucugcaacgaccccuuccucggcguguacuaccacaagaacaacaagagcuggauggaguccgaguuccgggucuacagcuccgccaacaacugcacguucgaguacgugagccagcccuuccugaucgaccuggagggcaagcaggggaacuucaagaaccuccgcgaguucguguucaagaacaucgacggcuacuucaagaucuacuccaagcacaccccgaucaaccugguccgggaccugccccagggguucagcgcccucgagccccugguggaccugcccaucggcaucaacaucacccgcuuccagacccuccuggcccugcaccgguccuaccucacgccgggggacagcagcuccggcuggaccgcgggcgccgccgccuacuacgugggguaccugcagccccgcaccuuccugcucaaguacaacgagaacggcaccaucacggacgcggucgacugcgcccuggacccccugagcgagaccaagugcacccucaaguccuucaccguggagaaggggaucuaccagacgagcaacuuccgggugcagcccaccgaguccaucguccgcuucccgaacaucaccaaccugugccccuucggcgagguguucaacgccacccgguucgccagcgucuacgccuggaaccgcaagcggaucuccaacugcguggcggacuacagcgugcuguacaacuccgccagcuucuccacguucaagugcuacggcgucagccccaccaagcucaacgaccugugcuucaccaacguguacgccgacuccuucgugauccgcggggacgagguccggcagaucgcccccggccagaccgggaagaucgccgacuacaacuacaagcugccggacgacuucacgggcugcgugaucgcguggaacagcaacaaccucgacuccaaggucgggggcaacuacaacuaccuguaccgccuguuccgcaagagcaaccucaagcccuucgagcgggacaucuccaccgagaucuaccaggccggcagcacccccugcaacgggguggagggcuucaacugcuacuucccccugcaguccuacggguuccagccgaccaacggcgugggguaccagcccuaccggguggucgugcugagcuucgagcuccugcacgcccccgccacggugugcggccccaagaaguccaccaaccuggucaagaacaagugcgugaacuucaacuucaacggccucaccgggaccggcgugcugaccgagagcaacaagaaguuccugccguuccagcaguucgggcgcgacaucgccgacacgaccgacgcgguccgcgacccccagacccuggagauccucgacaucacccccugcagcuucggcgggguguccgugaucacgccgggcaccaacaccagcaaccaggucgccgugcuguaccagggcgugaacugcaccgagguccccguggccauccacgccgaccagcugacgcccaccuggcggguguacuccaccgggagcaacgucuuccagacccgcgccggcugccucaucggggcggagcacgugaacaacuccuacgagugcgacauccccaucggcgccggcaucugcgccagcuaccagacgcagaccaacuccccgcggcgcgcccggagcguggcgucccagagcaucaucgccuacaccaugucccugggggccgagaacagcgucgccuacuccaacaacagcaucgccauccccaccaacuucacgaucuccgugaccaccgagauccugcccgugagcaugaccaagacgagcgucgacugcaccauguacaucugcggcgacuccaccgagugcagcaaccuccugcugcaguacggguccuucugcacccagcucaaccgcgcgcugacgggcaucgccguggagcaggacaagaacacccaggagguguucgcccaggucaagcagaucuacaagacgcccccgaucaaggacuucgggggcuucaacuucagccagauccugcccgaccccuccaagcccagcaagcgguccuucaucgaggaccuccuguucaacaaggugacccuggccgacgccggcuucaucaagcaguacggggacugccucggcgacaucgcggcccgcgaccugaucugcgcccagaaguucaacgggcugaccgugcucccgccccugcugaccgacgagaugaucgcccaguacaccagcgcccuccuggcgggcaccaucacguccggguggaccuucggcgccggcgccgcccugcagauccccuucgcgaugcagauggccuaccgguucaacgggaucggcgucacccagaacgugcucuacgagaaccagaagcugaucgccaaccaguucaacagcgccaucgggaagauccaggacucccugagcuccaccgccagcgcgcucggcaagcugcaggacguggucaaccagaacgcccaggcccugaacacgcucgugaagcagcuguccagcaacuucggggccaucuccagcgugcugaacgacauccucucccgccuggacaaggucgaggccgaggugcagaucgaccggcugaucaccggccgccuccagagccugcagaccuacgugacccagcagcugauccgggcggccgagauccgcgccagcgccaaccucgccgcgaccaagauguccgagugcguccugggccagagcaagcggguggacuucugcgggaagggcuaccaccugauguccuucccccagagcgccccgcacgggguggucuuccuccacgugacguacguccccgcccaggagaagaacuucaccaccgcccccgcgaucugccacgacggcaaggcccacuucccccgcgaggggguguucguguccaacggcacccacugguucgucacgcagcggaacuucuacgagccgcagaucaucaccaccgacaacaccuucgugagcggcaacugcgacguggucaucgggaucgugaacaacacgguguacgacccccugcagcccgagcuggacuccuucaaggaggagcucgacaaguacuucaagaaccacaccagccccgacgucgaccugggcgacaucuccgggaucaacgccagcguggugaacauccagaaggagaucgaccgccugaacgaggucgccaagaaccucaacgagucccugaucgaccugcaggagcucggcaaguacgagcaguacaucaaguggccgugguacaucuggcugggcuucaucgccgggcugaucgcgaucgugauggugaccaucaugcucugcugcaugaccagcugcugcuccugccugaagggcugcugcagcugcggguccugcugcaaguucgacgaggacgacagcgagcccguccugaagggcgugaagcuccacuacacguga

SEQ ID NO: 11788 - RNA, 3822 nt, Artificial Sequence
  SARS-CoV-2/Congo/94/2020__EPI_ISL_417947 spike protein CDS gc (1-1273)
auguucguguuccugguccuccugccccuggugagcucccagugcgugaaccucaccacccgcacgcagcugccgcccgccuacaccaacagcuucacccggggcgucuacuaccccgacaagguguuccgcuccagcgugcugcacuccacccaggaccucuuccugcccuucuucagcaacgucacgugguuccacgccauccacguguccgggaccaacggcaccaagcgguucgacaacccggugcugcccuucaacgacggggucuacuucgcgagcaccgagaaguccaacaucauccgcggcuggaucuucgggacgacccucgacagcaagacccagucccugcugaucgugaacaacgccaccaacguggucaucaaggugugcgaguuccaguucugcaacgaccccuuccucggcguguacuaccacaagaacaacaagagcuggauggaguccgaguuccgggucuacagcuccgccaacaacugcacguucgaguacgugagccagcccuuccugauggaccuggagggcaagcaggggaacuucaagaaccuccgcgaguucguguucaagaacaucgacggcuacuucaagaucuacuccaagcacaccccgaucaaccugguccgggaccugccccagggguucagcgcccucgagccccugguggaccugcccaucggcaucaacaucacccgcuuccagacccuccuggcccugcaccgguccuaccucacgccgggggacagcagcuccggcuggaccgcgggcgccgccgccuacuacgugggguaccugcagccccgcaccuuccugcucaaguacaacgagaacggcaccaucacggacgcggucgacugcgcccuggacccccugagcgagaccaagugcacccucaaguccuucaccguggagaaggggaucuaccagacgagcaacuuccgggugcagcccaccgaguccaucguccgcuucccgaacaucaccaaccugugccccuucggcgagguguucaacgccacccgguucgccagcgucuacgccuggaaccgcaagcggaucuccaacugcguggcggacuacagcgugcuguacaacuccgccagcuucuccacguucaagugcuacggcgucagccccaccaagcucaacgaccugugcuucaccaacguguacgccgacuccuucgugauccgcggggacgagguccggcagaucgcccccggccagaccgggaagaucgccgacuacaacuacaagcugccggacgacuucacgggcugcgugaucgcguggaacagcaacaaccucgacuccaaggucgggggcaacuacaacuaccuguaccgccuguuccgcaagagcaaccucaagcccuucgagcgggacaucuccaccgagaucuaccaggccggcagcacccccugcaacgggguggagggcuucaacugcuacuucccccugcaguccuacggguuccagccgaccaacggcgugggguaccagcccuaccggguggucgugcugagcuucgagcuccugcacgcccccgccacggugugcggccccaagaaguccaccaaccuggucaagaacaagugcgugaacuucaacuucaacggccucaccgggaccggcgugcugaccgagagcaacaagaaguuccugccguuccagcaguucgggcgcgacaucgccgacacgaccgacgcgguccgcgacccccagacccuggagauccucgacaucacccccugcagcuucggcgggguguccgugaucacgccgggcaccaacaccagcaaccaggucgccgugcuguaccagggcgugaacugcaccgagguccccguggccauccacgccgaccagcugacgcccaccuggcggguguacuccaccgggagcaacgucuuccagacccgcgccggcugccucaucggggcggagcacgugaacaacuccuacgagugcgacauccccaucggcgccggcaucugcgccagcuaccagacgcagaccaacuccccgcggcgcgcccggagcguggcgucccagagcaucaucgccuacaccaugucccugggggccgagaacagcgucgccuacuccaacaacagcaucgccauccccaccaacuucacgaucuccgugaccaccgagauccugcccgugagcaugaccaagacgagcgucgacugcaccauguacaucugcggcgacuccaccgagugcagcaaccuccugcugcaguacggguccuucugcacccagcucaaccgcgcgcugacgggcaucgccguggagcaggacaagaacacccaggagguguucgcccaggucaagcagaucuacaagacgcccccgaucaaggacuucgggggcuucaacuucagccagauccugcccgaccccuccaagcccagcaagcgguccuucaucgaggacauccucuucaacaaggugacccuggccgacgccggcuucaucaagcaguacggggacugccugggcgacaucgcggcccgcgaccucaucugcgcccagaaguucaacgggcugaccgugcugccgccccuccugaccgacgagaugaucgcccaguacaccagcgcccugcucgcgggcaccaucacguccggguggaccuucggcgccggcgccgcccugcagauccccuucgcgaugcagauggccuaccgguucaacgggaucggcgucacccagaacgugcuguacgagaaccagaagcucaucgccaaccaguucaacagcgccaucgggaagauccaggacucccugagcuccaccgccagcgcgcugggcaagcuccaggacguggucaaccagaacgcccaggcccugaacacgcuggugaagcagcucuccagcaacuucggggccaucuccagcgugcugaacgacauccugucccgccucgacaaggucgaggccgaggugcagaucgaccggcugaucaccggccgccugcagagccuccagaccuacgugacccagcagcugauccgggcggccgagauccgcgccagcgccaaccuggccgcgaccaagauguccgagugcguccucggccagagcaagcggguggacuucugcgggaagggcuaccaccugauguccuucccccagagcgccccgcacgggguggucuuccugcacgugacguacguccccgcccaggagaagaacuucaccaccgcccccgcgaucugccacgacggcaaggcccacuucccccgcgaggggguguucguguccaacggcacccacugguucgucacgcagcggaacuucuacgagccgcagaucaucaccaccgacaacaccuucgugagcggcaacugcgacguggucaucgggaucgugaacaacacgguguacgacccccuccagcccgagcuggacuccuucaaggaggagcuggacaaguacuucaagaaccacaccagccccgacgucgaccucggcgacaucuccgggaucaacgccagcguggugaacauccagaaggagaucgaccgccugaacgaggucgccaagaaccugaacgagucccucaucgaccugcaggagcugggcaaguacgagcaguacaucaaguggccgugguacaucuggcucggcuucaucgccgggcugaucgcgaucgugauggugaccaucaugcugugcugcaugaccagcugcugcuccugccucaagggcugcugcagcugcggguccugcugcaaguucgacgaggacgacagcgagcccguccugaagggcgugaagcugcacuacacguga

SEQ ID NO: 11789 - RNA, 3822 nt, Artificial Sequence
  SARS-CoV-2/Congo/158/2020__EPI_ISL_417950 spike protein CDS gc (1-1273)
auguucguguuccugguccuccugccccuggugagcucccagugcgugaaccucaccacccgcacgcagcugccgcccgccuacaccaacagcuucacccggggcgucuacuaccccgacaagguguuccgcuccagcgugcugcacuccacccaggaccucuuccugcccuucuucagcaacgucacgugguuccacgccauccacguguccgggaccaacggcaccaagcgguucgacaacccggugcugcccuucaacgacggggucuacuucgcgagcaccgagaaguccaacaucauccgcggcuggaucuucgggacgacccucgacagcaagacccagucccugcugaucgugaacaacgccaccaacguggucaucaaggugugcgaguuccaguucugcaacgaccccuuccucggcguguacuaccacaagaacaacaagagcuggauggaguccgaguuccgggucuacagcuccgccaacaacugcacguucgaguacgugagccagcccuuccugauggaccuggagggcaagcaggggaacuucaagaaccuccgcgaguucguguucaagaacaucgacggcuacuucaagaucuacuccaagcacaccccgaucaaccugguccgggaccugccccagggguucagcgcccucgagccccugguggaccugcccaucggcaucaacaucacccgcuuccagacccuccuggcccugcaccgguccuaccucacgccgggggacagcagcuccggcuggaccgcgggcgccgccgccuacuacgugggguaccugcagccccgcaccuuccugcucaaguacaacgagaacggcaccaucacggacgcggucgacugcgcccuggacccccugagcgagaccaagugcacccucaaguccuucaccguggagaaggggaucuaccagacgagcaacuuccgggugcagcccaccgaguccaucguccgcuucccgaacaucaccaaccugugccccuucggcgagguguucaacgccacccgguucgccagcgucuacgccuggaaccgcaagcggaucuccaacugcguggcggacuacagcgugcuguacaacuccgccagcuucuccacguucaagugcuacggcgucagccccaccaagcucaacgaccugugcuucaccaacguguacgccgacuccuucgugauccgcggggacgagguccggcagaucgcccccggccagaccgggaagaucgccgacuacaacuacaagcugccggacgacuucacgggcugcgugaucgcguggaacagcaacaaccucgacuccaaggucgggggcaacuacaacuaccuguaccgccuguuccgcaagagcaaccucaagcccuucgagcgggacaucuccaccgagaucuaccaggccggcagcacccccugcaacgggguggagggcuucaacugcuacuucccccugcaguccuacggguuccagccgaccaacggcgugggguaccagcccuaccggguggucgugcugagcuucgagcuccugcacgcccccgccacggugugcggccccaagaaguccaccaaccuggucaagaacaagugcgugaacuucaacuucaacggccucaccgggaccggcgugcugaccgagagcaacaagaaguuccugccguuccagcaguucgggcgcgacaucgccgacacgaccgacgcgguccgcgacccccagacccuggagauccucgacaucacccccugcagcuucggcgggguguccgugaucacgccgggcaccaacaccagcaaccaggucgccgugcuguaccaggacgugaacugcaccgagguccccguggccauccacgccgaccagcugacgcccaccuggcggguguacuccaccggcagcaacgucuuccagacccgcgccgggugccucaucggcgcggagcacgugaacaacuccuacgagugcgacauccccaucggggccggcaucugcgccagcuaccagacgcagaccaacuccccgcggcgcgcccggagcguggcgucccagagcaucaucgccuacaccaugucccugggcgccgagaacagcgucgccuacuccaacaacagcaucgccauccccaccaacuucacgaucuccgugaccaccgagauccugcccgugagcaugaccaagacgagcgucgacugcaccauguacaucugcggggacuccaccgagugcagcaaccuccugcugcaguacggcuccuucugcacccagcucaaccgcgcgcugacggggaucgccguggagcaggacaagaacacccaggagguguucgcccaggucaagcagaucuacaagacgcccccgaucaaggacuucggcggguucaacuucagccagauccugcccgaccccuccaagcccagcaagcgguccuucaucgaggaccuccuguucaacaaggugacccuggccgacgccggcuucaucaagcaguacggcgacugccucggggacaucgcggcccgcgaccugaucugcgcccagaaguucaacggccugaccgugcucccgccccugcugaccgacgagaugaucgcccaguacaccagcgcccuccuggcggggaccaucacguccggcuggaccuucggggccggcgccgcccugcagauccccuucgcgaugcagauggccuaccgguucaacggcaucggggucacccagaacgugcucuacgagaaccagaagcugaucgccaaccaguucaacagcgccaucggcaagauccaggacucccugagcuccaccgccagcgcgcucgggaagcugcaggacguggucaaccagaacgcccaggcccugaacacgcucgugaagcagcuguccagcaacuucggcgccaucuccagcgugcugaacgacauccucucccgccuggacaaggucgaggccgaggugcagaucgaccggcugaucaccgggcgccuccagagccugcagaccuacgugacccagcagcugauccgggcggccgagauccgcgccagcgccaaccucgccgcgaccaagauguccgagugcguccugggccagagcaagcggguggacuucugcggcaagggguaccaccugauguccuucccccagagcgccccgcacggcguggucuuccuccacgugacguacguccccgcccaggagaagaacuucaccaccgcccccgcgaucugccacgacgggaaggcccacuucccccgcgagggcguguucguguccaacgggacccacugguucgucacgcagcggaacuucuacgagccgcagaucaucaccaccgacaacaccuuccugagcggcaacugcgacguggugaucggcaucgucaacaacacgguguacgacccccugcagcccgagcucgacuccuucaaggaggagcuggacaaguacuucaagaaccacaccagccccgacguggaccugggggacaucuccggcaucaacgccagcgucgugaacauccagaaggagaucgaccgccucaacgagguggccaagaaccugaacgagucccugaucgaccuccaggagcuggggaaguacgagcaguacaucaaguggccgugguacaucuggcugggcuucaucgccggccucaucgcgaucgucauggugaccaucaugcugugcugcaugaccagcugcugcuccugccugaaggggugcugcagcugcggcuccugcugcaaguucgacgaggacgacagcgagcccgugcucaagggggucaagcugcacuacacguga

SEQ ID NO: 11790 - RNA, 3822 nt, Artificial Sequence
  SARS-CoV-2/USA/UT-00034/2020__EPI_ISL_417977 spike protein CDS gc (1-1273)
auguucguguuccugguccuccugccccuggugagcucccagugcgugaaccucaccacccgcacgcagcugccgcccgccuacaccaacagcuucacccggggcgucuacuaccccgacaagguguuccgcuccagcgugcugcacuccacccaggaccucuuccugcccuucuucagcaacgucacgugguuccacgccauccacguguccgggaccaacggcaccaagcgguucgacaacccggugcugcccuucaacgacggggucuacuucgcgagcaccgagaaguccaacaucauccgcggcuggaucuucgggacgacccucgacagcaagacccagucccugcugaucgugaacaacgccaccaacguggucaucaaggugugcgaguuccaguucugcaacgaccccuuccucggcguguacuacuacaagaacaacaagagcuggauggaguccgaguuccgggucuacagcuccgccaacaacugcacguucgaguacgugagccagcccuuccugauggaccuggagggcaagcaggggaacuucaagaaccuccgcgaguucguguucaagaacaucgacggcuacuucaagaucuacuccaagcacaccccgaucaaccugguccgggaccugccccagggguucagcgcccucgagccccugguggaccugcccaucggcaucaacaucacccgcuuccagacccuccuggcccugcaccgguccuaccucacgccgggggacagcagcuccggcuggaccgcgggcgccgccgccuacuacgugggguaccugcagccccgcaccuuccugcucaaguacaacgagaacggcaccaucacggacgcggucgacugcgcccuggacccccugagcgagaccaagugcacccucaaguccuucaccguggagaaggggaucuaccagacgagcaacuuccgggugcagcccaccgaguccaucguccgcuucccgaacaucaccaaccugugccccuucggcgagguguucaacgccacccgguucgccagcgucuacgccuggaaccgcaagcggaucuccaacugcguggcggacuacagcgugcuguacaacuccgccagcuucuccacguucaagugcuacggcgucagccccaccaagcucaacgaccugugcuucaccaacguguacgccgacuccuucgugauccgcggggacgagguccggcagaucgcccccggccagaccgggaagaucgccgacuacaacuacaagcugccggacgacuucacgggcugcgugaucgcguggaacagcaacaaccucgacuccaaggucgggggcaacuacaacuaccuguaccgccuguuccgcaagagcaaccucaagcccuucgagcgggacaucuccaccgagaucuaccaggccggcagcacccccugcaacgggguggagggcuucaacugcuacuucccccugcaguccuacggguuccagccgaccaacggcgugggguaccagcccuaccggguggucgugcugagcuucgagcuccugcacgcccccgccacggugugcggccccaagaaguccaccaaccuggucaagaacaagugcgugaacuucaacuucaacggccucaccgggaccggcgugcugaccgagagcaacaagaaguuccugccguuccagcaguucgggcgcgacaucgccgacacgaccgacgcgguccgcgacccccagacccuggagauccucgacaucacccccugcagcuucggcgggguguccgugaucacgccgggcaccaacaccagcaaccaggucgccgugcuguaccagggcgugaacugcaccgagguccccguggccauccacgccgaccagcugacgcccaccuggcggguguacuccaccgggagcaacgucuuccagacccgcgccggcugccucaucggggcggagcacgugaacaacuccuacgagugcgacauccccaucggcgccggcaucugcgccagcuaccagacgcagaccaacuccccgcggcgcgcccggagcguggcgucccagagcaucaucgccuacaccaugucccugggggccgagaacagcgucgccuacuccaacaacagcaucgccauccccaccaacuucacgaucuccgugaccaccgagauccugcccgugagcaugaccaagacgagcgucgacugcaccauguacaucugcggcgacuccaccgagugcagcaaccuccugcugcaguacggguccuucugcacccagcucaaccgcgcgcugacgggcaucgccguggagcaggacaagaacacccaggagguguucgcccaggucaagcagaucuacaagacgcccccgaucaaggacuucgggggcuucaacuucagccagauccugcccgaccccuccaagcccagcaagcgguccuucaucgaggaccuccuguucaacaaggugacccuggccgacgccggcuucaucaagcaguacggggacugccucggcgacaucgcggcccgcgaccugaucugcgcccagaaguucaacgggcugaccgugcucccgccccugcugaccgacgagaugaucgcccaguacaccagcgcccuccuggcgggcaccaucacguccggguggaccuucggcgccggcgccgcccugcagauccccuucgcgaugcagauggccuaccgguucaacgggaucggcgucacccagaacgugcucuacgagaaccagaagcugaucgccaaccaguucaacagcgccaucgggaagauccaggacucccugagcuccaccgccagcgcgcucggcaagcugcaggacguggucaaccagaacgcccaggcccugaacacgcucgugaagcagcuguccagcaacuucggggccaucuccagcgugcugaacgacauccucucccgccuggacaaggucgaggccgaggugcagaucgaccggcugaucaccggccgccuccagagccugcagaccuacgugacccagcagcugauccgggcggccgagauccgcgccagcgccaaccucgccgcgaccaagauguccgagugcguccugggccagagcaagcggguggacuucugcgggaagggcuaccaccugauguccuucccccagagcgccccgcacgggguggucuuccuccacgugacguacguccccgcccaggagaagaacuucaccaccgcccccgcgaucugccacgacggcaaggcccacuucccccgcgaggggguguucguguccaacggcacccacugguucgucacgcagcggaacuucuacgagccgcagaucaucaccaccgacaacaccuucgugagcggcaacugcgacguggucaucgggaucgugaacaacacgguguacgacccccugcagcccgagcuggacuccuucaaggaggagcucgacaaguacuucaagaaccacaccagccccgacgucgaccugggcgacaucuccgggaucaacgccagcguggugaacauccagaaggagaucgaccgccugaacgaggucgccaagaaccucaacgagucccugaucgaccugcaggagcucggcaaguacgagcaguacaucaaguggccgugguacaucuggcugggcuucaucgccgggcugaucgcgaucgugauggugaccaucaugcucugcugcaugaccagcugcugcuccugccugaagggcugcugcagcugcggguccugcugcaaguucgacgaggacgacagcgagcccguccugaagggcgugaagcuccacuacacguga

SEQ ID NO: 11791 - RNA, 3822 nt, Artificial Sequence
  SARS-CoV-2/USA/UT-00033/2020__EPI_ISL_417976 spike protein CDS gc (1-1273)
auguucguguuccugguccuccugccccuggugagcucccagugcgugaaccucaccacccgcacgcagcugccgcccgccuacaccaacagcuucacccggggcgucuacuaccccgacaagguguuccgcuccagcgugcugcacuccacccaggaccucuuccugcccuucuucagcaacgucacgugguuccacgccauccacguguccgggaccaacggcaccaagcgguucgacaacccggugcugcccuucaacgacggggucuacuucgcgagcaccgagaaguccaacaucauccgcggcuggaucuucgggacgacccucgacagcaagacccagucccugcugaucgugaacaacgccaccaacguggucaucaaggugugcgaguuccaguucugcaacgaccccuuccucggcguguacuaccacaagaacaacaagagcuggauggaguccgaguuccgggucuacagcuccgccaacaacugcacguucgaguacgugagccagcccuuccugauggaccuggagggcaagcaggggaacuucaagaaccuccgcgaguucguguucaagaacaucgacggcuacuucaagaucuacuccaagcacaccccgaucaaccugguccgggaccugccccagggguucagcgcccucgagccccugguggaccugcccaucggcaucaacaucacccgcuuccagacccuccuggcccugcaccgguccuaccucacgccgggggacagcagcuccggccugaccgcgggcgccgccgccuacuacgugggguaccugcagccccgcaccuuccuccugaaguacaacgagaacggcaccaucacggacgcggucgacugcgcccuggacccccucagcgagaccaagugcacccugaaguccuucaccguggagaaggggaucuaccagacgagcaacuuccgggugcagcccaccgaguccaucguccgcuucccgaacaucaccaaccugugccccuucggcgagguguucaacgccacccgguucgccagcgucuacgccuggaaccgcaagcggaucuccaacugcguggcggacuacagcgugcucuacaacuccgccagcuucuccacguucaagugcuacggcgucagccccaccaagcugaacgaccugugcuucaccaacguguacgccgacuccuucgugauccgcggggacgagguccggcagaucgcccccggccagaccgggaagaucgccgacuacaacuacaagcucccggacgacuucacgggcugcgugaucgcguggaacagcaacaaccuggacuccaaggucgggggcaacuacaacuaccuguaccgccucuuccgcaagagcaaccugaagcccuucgagcgggacaucuccaccgagaucuaccaggccggcagcacccccugcaacgggguggagggcuucaacugcuacuucccccugcaguccuacggguuccagccgaccaacggcgugggguaccagcccuaccggguggucgugcucagcuucgagcugcugcacgcccccgccacggugugcggccccaagaaguccaccaaccucgucaagaacaagugcgugaacuucaacuucaacggccugaccgggaccggcgugcugaccgagagcaacaagaaguuccugccguuccagcaguucgggcgcgacaucgccgacacgaccgacgcgguccgcgacccccagacccucgagauccuggacaucacccccugcagcuucggcgggguguccgugaucacgccgggcaccaacaccagcaaccaggucgccgugcuguaccagggcgugaacugcaccgagguccccguggccauccacgccgaccagcucacgcccaccuggcggguguacuccaccgggagcaacgucuuccagacccgcgccggcugccugaucggggcggagcacgugaacaacuccuacgagugcgacauccccaucggcgccggcaucugcgccagcuaccagacgcagaccaacuccccgcggcgcgcccggagcguggcgucccagagcaucaucgccuacaccaugucccugggggccgagaacagcgucgccuacuccaacaacagcaucgccauccccaccaacuucacgaucuccgugaccaccgagauccuccccgugagcaugaccaagacgagcgucgacugcaccauguacaucugcggcgacuccaccgagugcagcaaccugcugcuccaguacggguccuucugcacccagcugaaccgcgcgcugacgggcaucgccguggagcaggacaagaacacccaggagguguucgcccaggucaagcagaucuacaagacgcccccgaucaaggacuucgggggcuucaacuucagccagauccuccccgaccccuccaagcccagcaagcgguccuucaucgaggaccugcuguucaacaaggugacccucgccgacgccggcuucaucaagcaguacggggacugccugggcgacaucgcggcccgcgaccugaucugcgcccagaaguucaacgggcucaccgugcugccgccccugcucaccgacgagaugaucgcccaguacaccagcgcccugcuggcgggcaccaucacguccggguggaccuucggcgccggcgccgcccuccagauccccuucgcgaugcagauggccuaccgguucaacgggaucggcgucacccagaacgugcuguacgagaaccagaagcugaucgccaaccaguucaacagcgccaucgggaagauccaggacucccucagcuccaccgccagcgcgcugggcaagcugcaggacguggucaaccagaacgcccaggcccucaacacgcuggugaagcagcuguccagcaacuucggggccaucuccagcgugcucaacgacauccugucccgccuggacaaggucgaggccgaggugcagaucgaccggcucaucaccggccgccugcagagccugcagaccuacgugacccagcagcucauccgggcggccgagauccgcgccagcgccaaccuggccgcgaccaagauguccgagugcguccugggccagagcaagcggguggacuucugcgggaagggcuaccaccucauguccuucccccagagcgccccgcacgggguggucuuccugcacgugacguacguccccgcccaggagaagaacuucaccaccgcccccgcgaucugccacgacggcaaggcccacuucccccgcgaggggguguucguguccaacggcacccacugguucgucacgcagcggaacuucuacgagccgcagaucaucaccaccgacaacaccuucgugagcggcaacugcgacguggucaucgggaucgugaacaacacgguguacgacccccugcagcccgagcucgacuccuucaaggaggagcuggacaaguacuucaagaaccacaccagccccgacgucgaccugggcgacaucuccgggaucaacgccagcguggugaacauccagaaggagaucgaccgccucaacgaggucgccaagaaccugaacgagucccugaucgaccuccaggagcugggcaaguacgagcaguacaucaaguggccgugguacaucuggcugggcuucaucgccgggcucaucgcgaucgugauggugaccaucaugcugugcugcaugaccagcugcugcuccugccugaagggcugcugcagcugcggguccugcugcaaguucgacgaggacgacagcgagcccguccucaagggcgugaagcugcacuacacguga

SEQ ID NO: 11792 - RNA, 3822 nt, Artificial Sequence
  SARS-CoV-2/USA/WI-13/2020__EPI_ISL_417516 spike protein CDS gc (1-1273)
auguucguguuccugguccuccugccccuggugagcucccagugcgugaaccucaccacccgcacgcagcugccgcccgccuacaccaacagcuucacccggggcgucuacuaccccgacaagguguuccgcuccagcgugcugcacuccacccaggaccucuuccugcccuucuucagcaacgucacgugguuccacgccauccacguguccgggaccaacggcaccaagcgguucgacaacccggugcugcccuucaacgacggggucuacuucgcgagcaccgagaaguccaacaucauccgcggcuggaucuucgggacgacccucgacagcaagacccagucccugcugaucgugaacaacgccaccaacguggucaucaaggugugcgaguuccaguucugcaacgaccccuuccucggcguguacuaccacaagaacaacaagagcuggauggaguccgaguuccgggucuacagcuccgccaacaacugcacguucgaguacgugagccagcccuuccugauggaccuggagggcaagcaggggaacuucaagaaccuccgcgaguucguguucaagaacaucgacggcuacuucaagaucuacuccaagcacaccccgaucaaccugguccgggaccugccccagggguucagcgcccucgagccccugguggaccugcccaucggcaucaacaucacccgcuuccagacccuccuggcccugcaccgguccuaccucacgccgggggacagcagcuccggcuggaccgcgggcgccgccgccuacuacgugggguaccugcagccccgcaccuuccugcucaaguacaacgagaacggcaccaucacggacgcggucgacugcgcccuggacccccugagcgagaccaagugcacccucaaguccuucaccguggagaaggggaucuaccagacgagcaacuuccgggugcugcccaccgaguccaucguccgcuucccgaacaucaccaaccugugccccuucggcgagguguucaacgccacccgguucgccagcgucuacgccuggaaccgcaagcggaucuccaacugcguggcggacuacagcgugcucuacaacuccgccagcuucuccacguucaagugcuacggcgucagccccaccaagcugaacgaccugugcuucaccaacguguacgccgacuccuucgugauccgcggggacgagguccggcagaucgcccccggccagaccgggaagaucgccgacuacaacuacaagcucccggacgacuucacgggcugcgugaucgcguggaacagcaacaaccuggacuccaaggucgggggcaacuacaacuaccuguaccgccucuuccgcaagagcaaccugaagcccuucgagcgggacaucuccaccgagaucuaccaggccggcagcacccccugcaacgggguggagggcuucaacugcuacuucccccugcaguccuacggguuccagccgaccaacggcgugggguaccagcccuaccggguggucgugcucagcuucgagcugcugcacgcccccgccacggugugcggccccaagaaguccaccaaccucgucaagaacaagugcgugaacuucaacuucaacggccugaccgggaccggcgugcugaccgagagcaacaagaaguuccugccguuccagcaguucgggcgcgacaucgccgacacgaccgacgcgguccgcgacccccagacccucgagauccuggacaucacccccugcagcuucggcgggguguccgugaucacgccgggcaccaacaccagcaaccaggucgccgugcuguaccagggcgugaacugcaccgagguccccguggccauccacgccgaccagcucacgcccaccuggcggguguacuccaccgggagcaacgucuuccagacccgcgccggcugccugaucggggcggagcacgugaacaacuccuacgagugcgacauccccaucggcgccggcaucugcgccagcuaccagacgcagaccaacuccccgcggcgcgcccggagcguggcgucccagagcaucaucgccuacaccaugucccugggggccgagaacagcgucgccuacuccaacaacagcaucgccauccccaccaacuucacgaucuccgugaccaccgagauccuccccgugagcaugaccaagacgagcgucgacugcaccauguacaucugcggcgacuccaccgagugcagcaaccugcugcuccaguacggguccuucugcacccagcugaaccgcgcgcugacgggcaucgccguggagcaggacaagaacacccaggagguguucgcccaggucaagcagaucuacaagacgcccccgaucaaggacuucgggggcuucaacuucagccagauccuccccgaccccuccaagcccagcaagcgguccuucaucgaggaccugcuguucaacaaggugacccucgccgacgccggcuucaucaagcaguacggggacugccugggcgacaucgcggcccgcgaccugaucugcgcccagaaguucaacgggcucaccgugcugccgccccugcucaccgacgagaugaucgcccaguacaccagcgcccugcuggcgggcaccaucacguccggguggaccuucggcgccggcgccgcccuccagauccccuucgcgaugcagauggccuaccgguucaacgggaucggcgucacccagaacgugcuguacgagaaccagaagcugaucgccaaccaguucaacagcgccaucgggaagauccaggacucccucagcuccaccgccagcgcgcugggcaagcugcaggacguggucaaccagaacgcccaggcccucaacacgcuggugaagcagcuguccagcaacuucggggccaucuccagcgugcucaacgacauccugucccgccuggacaaggucgaggccgaggugcagaucgaccggcucaucaccggccgccugcagagccugcagaccuacgugacccagcagcucauccgggcggccgagauccgcgccagcgccaaccuggccgcgaccaagauguccgagugcguccugggccagagcaagcggguggacuucugcgggaagggcuaccaccucauguccuucccccagagcgccccgcacgggguggucuuccugcacgugacguacguccccgcccaggagaagaacuucaccaccgcccccgcgaucugccacgacggcaaggcccacuucccccgcgaggggguguucguguccaacggcacccacugguucgucacgcagcggaacuucuacgagccgcagaucaucaccaccgacaacaccuucgugagcggcaacugcgacguggucaucgggaucgugaacaacacgguguacgacccccugcagcccgagcucgacuccuucaaggaggagcuggacaaguacuucaagaaccacaccagccccgacgucgaccugggcgacaucuccgggaucaacgccagcguggugaacauccagaaggagaucgaccgccucaacgaggucgccaagaaccugaacgagucccugaucgaccuccaggagcugggcaaguacgagcaguacaucaaguggccgugguacaucuggcugggcuucaucgccgggcucaucgcgaucgugauggugaccaucaugcugugcugcaugaccagcugcugcuccugccugaagggcugcugcagcugcggguccugcugcaaguucgacgaggacgacagcgagcccguccucaagggcgugaagcugcacuacacguga

SEQ ID NO: 11793 - RNA, 3819 nt, Artificial Sequence
  SARS-CoV-2/India/1-27/2020__EPI_ISL_413522 spike protein CDS gc (1-1272)
auguucguguuccugguccuccugccccuggugagcucccagugcgugaaccucaccacccgcacgcagcugccgcccgccuacaccaacagcuucacccggggcgucuacuaccccgacaagguguuccgcuccagcgugcugcacuccacccaggaccucuuccugcccuucuucagcaacgucacgugguuccacgccauccacguguccgggaccaacggcaccaagcgguucgacaacccggugcugcccuucaacgacggggucuacuucgcgagcaccgagaaguccaacaucauccgcggcuggaucuucgggacgacccucgacagcaagacccagucccugcugaucgugaacaacgccaccaacguggucaucaaggugugcgaguuccaguucugcaacgaccccuuccucggcguguaccacaagaacaacaagagcuggauggaguccgaguuccgggucuacagcuccgccaacaacugcacguucgaguacgugagccagcccuuccugauggaccuggagggcaagcaggggaacuucaagaaccuccgcgaguucguguucaagaacaucgacggcuacuucaagaucuacuccaagcacaccccgaucaaccugguccgggaccugccccagggguucagcgcccucgagccccugguggaccugcccaucggcaucaacaucacccgcuuccagacccuccuggcccugcaccgguccuaccucacgccgggggacagcagcuccggcuggaccgcgggcgccgccgccuacuacgugggguaccugcagccccgcaccuuccugcucaaguacaacgagaacggcaccaucacggacgcggucgacugcgcccuggacccccugagcgagaccaagugcacccucaaguccuucaccguggagaaggggaucuaccagacgagcaacuuccgggugcagcccaccgaguccaucguccgcuucccgaacaucaccaaccugugccccuucggcgagguguucaacgccacccgguucgccagcgucuacgccuggaaccgcaagcggaucuccaacugcguggcggacuacagcgugcuguacaacuccgccagcuucuccacguucaagugcuacggcgucagccccaccaagcucaacgaccugugcuucaccaacguguacgccgacuccuucgugauccgcggggacgaggucauccagaucgcccccggccagaccgggaagaucgccgacuacaacuacaagcugccggacgacuucacgggcugcgugaucgcguggaacagcaacaaccucgacuccaaggucgggggcaacuacaacuaccuguaccggcuguuccgcaagagcaaccucaagcccuucgagcgggacaucuccaccgagaucuaccaggccggcagcacccccugcaacgggguggagggcuucaacugcuacuucccccugcaguccuacggguuccagccgaccaacggcgugggguaccagcccuaccgcguggucgugcugagcuucgagcuccugcacgcccccgccacggugugcggccccaagaaguccaccaaccuggucaagaacaagugcgugaacuucaacuucaacggccucaccgggaccggcgugcugaccgagagcaacaagaaguuccugccguuccagcaguucgggcgggacaucgccgacacgaccgacgcgguccgcgacccccagacccuggagauccucgacaucacccccugcagcuucggcgggguguccgugaucacgccgggcaccaacaccagcaaccaggucgccgugcuguaccaggacgugaacugcaccgagguccccguggccauccacgccgaccagcugacgcccaccuggcgcguguacuccaccggcagcaacgucuuccagacccgggccgggugccucaucggcgcggagcacgugaacaacuccuacgagugcgacauccccaucggggccggcaucugcgccagcuaccagacgcagaccaacuccccgcgccgggcccgcagcguggcgucccagagcaucaucgccuacaccaugucccugggcgccgagaacagcgucgccuacuccaacaacagcaucgccauccccaccaacuucacgaucuccgugaccaccgagauccugcccgugagcaugaccaagacgagcgucgacugcaccauguacaucugcggggacuccaccgagugcagcaaccuccugcugcaguacggcuccuucugcacccagcucaaccgggcgcugacggggaucgccguggagcaggacaagaacacccaggagguguucgcccaggucaagcagaucuacaagacgcccccgaucaaggacuucggcggguucaacuucagccagauccugcccgaccccuccaagcccagcaagcgcuccuucaucgaggaccuccuguucaacaaggugacccuggccgacgccggcuucaucaagcaguacggcgacugccucggggacaucgcggcccgggaccugaucugcgcccagaaguucaacggccugaccgugcucccgccccugcugaccgacgagaugaucgcccaguacaccagcgcccuccuggcggggaccaucacguccggcuggaccuucggggccggcgccgcccugcagauccccuucgcgaugcagauggccuaccgcuucaacggcaucggggucacccagaacgugcucuacgagaaccagaagcugaucgccaaccaguucaacagcgccaucggcaagauccaggacucccugagcuccaccgccagcgcgcucgggaagcugcaggacguggucaaccagaacgcccaggcccugaacacgcucgugaagcagcuguccagcaacuucggcgccaucuccagcgugcugaacgacauccucucccggcuggacaaggucgaggccgaggugcagaucgaccgccugaucaccgggcggcuccagagccugcagaccuacgugacccagcagcugauccgcgcggccgagauccgggccagcgccaaccucgccgcgaccaagauguccgagugcguccugggccagagcaagcgcguggacuucugcggcaagggguaccaccugauguccuucccccagagcgccccgcacggcguggucuuccuccacgugacguacguccccgcccaggagaagaacuucaccaccgcccccgcgaucugccacgacgggaaggcccacuucccccgggagggcguguucguguccaacgggacccacugguucgucacgcagcgcaacuucuacgagccgcagaucaucaccaccgacaacaccuucgugagcggcaacugcgacguggucaucggcaucgugaacaacacgguguacgacccccugcagcccgagcuggacuccuucaaggaggagcucgacaaguacuucaagaaccacaccagccccgacgucgaccugggggacaucuccggcaucaacgccagcguggugaacauccagaaggagaucgaccggcugaacgaggucgccaagaaccucaacgagucccugaucgaccugcaggagcucgggaaguacgagcaguacaucaaguggccgugguacaucuggcugggcuucaucgccggccugaucgcgaucgugauggugaccaucaugcucugcugcaugaccagcugcugcuccugccugaaggggugcugcagcugcggcuccugcugcaaguucgacgaggacgacagcgagcccguccugaagggggugaagcuccacuacacguga

SEQ ID NO: 11794 - RNA, 3804 nt, Artificial Sequence
  SARS-CoV-2/pangolin/Guangxi/P4L/2017__EPI_ISL_410538 spike protein CDS gc (1-1267)
auguucguguuccuguucguccucccccuggugagcucccagugcgugaaccugaccacccgcacgggcaucccgcccggguacaccaacagcuccacccggggcgucuacuaccccgacaagguguuccgcagcuccauccuccaccugacccaggaccuguuccuccccuucuucagcaacgugacgugguucaacaccaucaacuaccagggcggguucaagaaguucgacaacccgguccugcccuucaacgacgggguguacuucgccuccaccgagaaguccaacaucauccggggcuggaucuucggcaccacgcuggacgcccgcacccagagccuccugaucgugaacaacgcgaccaacgucgugaucaaggugugcgaguuccaguucugcaccgaccccuuccugggggucuacuaccacaacaacaacaagacguggguggagaacgaguuccggguguacagcuccgccaacaacugcaccuucgaguacaucagccagcccuuccucauggaccuggagggcaagcaggggaacuucaagaaccugcgcgaguucgucuucaagaacguggacggcuacuucaagaucuacuccaagcacaccccgaucgaccucgugcgggaccugccccgcggguucgccgcccuggagccccucgucgaccugcccaucggcaucaacaucacccgguuccagacgcugcucgcccugcaccgcagcuaccugaccccgggcaaccucgaguccggguggaccaccggcgcggccgccuacuacgugggguaccugcagcagcggacguuccugcucagcuacaaccagaacggcaccaucaccgacgccguggacugcucccuggacccccugagcgagaccaagugcacgcucaagucccugaccgucgagaagggcaucuaccagaccagcaacuuccgcgugcagcccaccaucagcaucgugcgguuccccaacaucacgaaccugugcccguucggggaggucuucaacgcguccaaguucgccagcguguacgccuggaaccgcaagcggaucuccaacugcgucgccgacuacagcgugcucuacaacuccaccagcuucuccaccuucaagugcuacggcgugagccccaccaagcugaacgaccugugcuucacgaacgucuacgccgacuccuucguggugaagggggacgagguccgccagaucgcgcccggccagaccggggugaucgccgacuacaacuacaagcuccccgacgacuucaccggcugcgugaucgccuggaacagcgucaagcaggacgcccugaccggcgggaacuacggcuaccuguaccgccucuuccggaaguccaagcugaagccguucgagcgggacaucagcacggagaucuaccaggccggguccacccccugcaacggccagguggggcugaacugcuacuacccccucgagcgcuacggcuuccaccccaccaccggcgugaacuaccagccguuccgggucguggugcugagcuucgagcugcucaacgggcccgcgaccgucugcggccccaagcuguccacgacccuggugaaggacaagugcgugaacuucaacuucaacgggcugaccggcaccgggguccucacgaccagcaagaagcaguuccugcccuuccagcaguucggccgcgacaucuccgacaccaccgacgccgugcgcgacccgcagacgcuggagauccucgacaucacccccugcagcuucggcgggguguccgucaucacccccggcaccaacacgagcaaccagguggccgugcuguaccaggacgucaacugcaccgaggugccgauggccauccacgccgagcagcugacccccgcguggcggguguacagcgccggggccaacgucuuccagacccgcgccggcugccucgugggcgccgagcacgugaacaacuccuacgagugcgacauccccgucggggcgggcaucugcgccagcuaccacuccaugagcucccugcggagcgugaaccagcgcuccaucaucgccuacacgaugagccugggggccgagaacuccguggcguacagcaacaacuccaucgccauccccaccaacuucaccaucagcgucaccacggagauccucccgguguccaugaccaagaccagcguggacugcaccauguacaucugcggcgacuccaucgagugcagcaaccugcugcuccaguacggguccuucugcacgcagcugaaccgggcccugaccggcaucgccgucgagcaggacaagaacacccaggagguguucgcccaggugaagcagaucuacaagaccccgcccaucaaggacuucggcggguucaacuucagccagauccuccccgaccccagcaagcccuccaagcgcagcuucaucgaggaccugcuguucaacaaggucacgcucgcggacgccggcuucaucaagcaguacggggacugccugggcgacaucgccgcccgggaccugaucugcgcccagaaguucaacgggcucaccgugcugccgccccugcucaccgacgagaugaucgcgcaguacaccuccgcccugcuggccggcacgaucaccagcggcuggaccuucggggccggcgccgcgcuccagauccccuucgccaugcagauggccuaccgcuucaacgggaucggcgugacccagaacguccuguacgagaaccagaagcugaucgccaaccaguucaacuccgcgaucgggaagauccaggacagccucuccagcacggccuccgcccugggcaagcugcaggacguggugaaccagaacgcccaggcccucaacacccuggucaagcagcugagcuccaacuucggcgcgaucagcuccgugcucaacgacauccugagccggcuggacaagguggaggccgagguccagaucgaccgccucaucaccgggcggcugcagucccugcagaccuacgugacccagcagcucauccgcgccgccgagauccgggccagcgcgaaccuggccgccacgaagauguccgagugcgugcugggccagagcaagcgcgucgacuucugcgggaagggcuaccaccucauguccuucccccagagcgcgccccacgggguggucuuccugcacgugaccuacgugcccgcccaggagaagaacuucaccaccgccccggccaucugccacgagggcaaggcccacuucccccgggagggcgucuucgugagcaacgggacgcacugguucaucacccagcgcaacuucuacgagccccagaucaucaccaccgacaacacguucguguccggcagcugcgacgucgugaucgggaucgugaacaacaccgucuacgacccccugcagccggagcucgacuccuucaaggaggagcuggacaaguacuucaagaaccacaccagccccgacguggaccugggcgacaucuccggcaucaacgccagcguggucaacauccagaaggagaucgaccggcucaacgagguggcgaagaaccugaacgagucccccaucgaccugcaggagcucgggaaguacgagcaguacaucaaguggcccugguacaucuggcugggcuucaucgccgggcugaucgccaucaucauggugaccaucaugcucugcugcaugacgagcugcugcuccugccugaagggcugcugcagcugcggguccugcugcaaguucgacgaggacgacagcgagccgguccugaagggcgugaagcuccacuacaccuga

SEQ ID NO: 11795 - RNA, 3804 nt, Artificial Sequence
  SARS-CoV-2/pangolin/Guangxi/P5L/2017__EPI_ISL_410540 spike protein CDS gc (1-1267)
auguucguguuccuguucguccucccccuggugagcucccagugcgugaaccugaccacccgcacgggcaucccgcccggguacaccaacagcuccacccggggcgucuacuaccccgacaagguguuccgcagcuccauccuccaccugacccaggaccuguuccuccccuucuucagcaacgugacgugguucaacaccaucaacuaccagggcggguucaagaaguucgacaacccgguccugcccuucaacgacgggguguacuucgccuccaccgagaaguccaacaucauccggggcuggaucuucggcaccacgcuggacgcccgcacccagagccuccugaucgugaacaacgcgaccaacgucgugaucaaggugugcgaguuccaguucugcaccgaccccuuccugggggucuacuaccacaacaacaacaagacguggguggagaacgaguuccggguguacagcuccgccaacaacugcaccuucgaguacaucagccagcccuuccucauggaccuggagggcaagcaggggaacuucaagaaccugcgcgaguucgucuucaagaacguggacggcuacuucaagaucuacuccaagcacaccccgaucgaccucgugcgggaccugccccgcggguucgccgcccuggagccccucgucgaccugcccaucggcaucaacaucacccgguuccagacgcugcucgcccugcaccgcagcuaccugaccccgggcaagcucgaguccggguggaccaccggcgcggccgccuacuacgugggguaccugcagcagcggacguuccugcucagcuacaaccagaacggcaccaucaccgacgccguggacugcucccuggacccccugagcgagaccaagugcacgcucaagucccugaccgucgagaagggcaucuaccagaccagcaacuuccgcgugcagcccaccaucagcaucgugcgguuccccaacaucacgaaccugugcccguucggggaggucuucaacgcguccaaguucgccagcguguacgccuggaaccgcaagcggaucuccaacugcgucgccgacuacagcgugcucuacaacuccaccagcuucuccaccuucaagugcuacggcgugagccccaccaagcugaacgaccugugcuucacgaacgucuacgccgacuccuucguggugaagggggacgagguccgccagaucgcgcccggccagaccggggugaucgccgacuacaacuacaagcuccccgacgacuucaccggcugcgugaucgccuggaacagcgucaagcaggacgcccugaccggcgggaacuacggcuaccuguaccgccucuuccggaaguccaagcugaagccguucgagcgggacaucagcacggagaucuaccaggccggguccacccccugcaacggccagguggggcugaacugcuacuacccccucgagcgcuacggcuuccaccccaccaccggcgugaacuaccagccguuccgggucguggugcugagcuucgagcugcucaacgggcccgcgaccgucugcggccccaagcuguccacgacccuggugaaggacaagugcgugaacuucaacuucaacgggcugaccggcaccgggguccucacgaccagcaagaagcaguuccugcccuuccagcaguucggccgcgacaucuccgacaccaccgacgccgugcgcgacccgcagacgcuggagauccucgacaucacccccugcagcuucggcgggguguccgucaucacccccggcaccaacacgagcaaccagguggccgugcuguaccaggacgucaacugcaccgaggugccgauggccauccacgccgagcagcugacccccgcguggcggguguacagcgccggggccaacgucuuccagacccgcgccggcugccucgugggcgccgagcacgugaacaacuccuacgagugcgacauccccgucggggcgggcaucugcgccagcuaccacuccaugagcuccuuccggagcgugaaccagcgcuccaucaucgccuacacgaugagccugggggccgagaacuccguggcguacagcaacaacuccaucgccauccccaccaacuucaccaucagcgucaccacggagauccugccgguguccaugaccaagaccagcguggacugcaccauguacaucugcggcgacuccaucgagugcagcaaccuccugcugcaguacggguccuucugcacgcagcucaaccgggcccugaccggcaucgccgucgagcaggacaagaacacccaggagguguucgcccaggugaagcagaucuacaagaccccgcccaucaaggacuucggcggguucaacuucagccagauccugcccgaccccagcaagcccuccaagcgcagcuucaucgaggaccuccuguucaacaaggucacgcuggcggacgccggcuucaucaagcaguacggggacugccucggcgacaucgccgcccgggaccugaucugcgcccagaaguucaacgggcugaccgugcucccgccccugcugaccgacgagaugaucgcgcaguacaccuccgcccuccuggccggcacgaucaccagcggcuggaccuucggggccggcgccgcgcugcagauccccuucgccaugcagauggccuaccgcuucaacgggaucggcgugacccagaacguccucuacgagaaccagaagcugaucgccaaccaguucaacuccgcgaucgggaagauccaggacagccuguccagcacggccuccgcccucggcaagcugcaggacguggugaaccagaacgcccaggcccugaacacccucgucaagcagcugagcuccaacuucggcgcgaucagcuccgugcugaacgacauccucagccggcuggacaagguggaggccgagguccagaucgaccgccugaucaccgggcggcuccagucccugcagaccuacgugacccagcagcugauccgcgccgccgagauccgggccagcgcgaaccucgccgccacgaagauguccgagugcgugcugggccagagcaagcgcgucgacuucugcgggaagggcuaccaccugauguccuucccccagagcgcgccccacgggguggucuuccuccacgugaccuacgugcccgcccaggagaagaacuucaccaccgccccggccaucugccacgagggcaaggcccacuucccccgggagggcgucuucgugagcaacgggacgcacugguucaucacccagcgcaacuucuacgagccccagaucaucaccaccgacaacacguucguguccggcagcugcgacgucgugaucgggaucgugaacaacaccgucuacgacccccugcagccggagcuggacuccuucaaggaggagcucgacaaguacuucaagaaccacaccagccccgacguggaccugggcgacaucuccggcaucaacgccagcguggucaacauccagaaggagaucgaccggcugaacgagguggcgaagaaccucaacgagucccugaucgaccugcaggagcucgggaaguacgagcaguacaucaaguggcccugguacaucuggcugggcuucaucgccgggcugaucgccaucaucauggugaccaucaugcucugcugcaugacgagcugcugcuccugccugaagggcugcugcagcugcggguccugcugcaaguucgacgaggacgacagcgagcccguccugaagggcgugaagcuccacuacaccuga

SEQ ID NO: 11796 - RNA, 3804 nt, Artificial Sequence
  SARS-CoV-2/pangolin/Guangxi/P5E/2017__EPI_ISL_410541 spike protein CDS gc (1-1267)
auguucguguuccuguucguccucccccuggugagcucccagugcgugaaccugaccacccgcacgggcaucccgcccggguacaccaacagcuccacccggggcgucuacuaccccgacaagguguuccgcagcuccauccuccaccugacccaggaccuguuccuccccuucuucagcaacgugacgugguucaacaccaucaccuaccagggcggguccaagaaguucgacaacccgguccugcccuucaacgacgggguguacuucgccagcaccgagaaguccaacaucauccggggcuggaucuucggcacgacccuggacgcccgcacccagagccuccugaucgugaacaacgcgaccaacgucgugaucaaggugugcgaguuccaguucugcacggaccccuuccugggggucuacuaccacaacaacaacaagaccuggguggagaacgaguuccggguguacuccagcgccaacaacugcaccuucgaguacaucucccagcccuuccucauggaccuggagggcaagcaggggaacuucaagaaccugcgcgaguucgucuucaagaacguggacggcuacuucaagaucuacagcaagcacaccccgaucgaccucgugcgggaccugccccgcggguucgccgcccuggagccccucgucgaccugcccaucggcaucaacaucacgcgguuccagacccugcucgcccugcaccgcuccuaccugaccccgggcaagcucgagagcggguggaccacgggcgcggccgccuacuacgugggguaccugcagcagcggaccuuccugcucuccuacaaccagaacggcaccaucaccgacgccguggacugcagccuggacccccuguccgagacgaagugcacccucaagagccugaccgucgagaagggcaucuaccagaccagcaacuuccgcgugcagcccacgaucuccaucgugcgguuccccaacaucaccaaccugugcccguucggggaggucuucaacgcgagcaaguucgccuccguguacgccuggaaccgcaagcggaucagcaacugcgucgccgacuacuccgugcucuacaacagcaccuccuucagcaccuucaagugcuacggcgugucccccacgaagcugaacgaccugugcuucaccaacgucuacgccgacagcuucguggugaagggggacgagguccgccagaucgcgcccggccagaccggggugaucgccgacuacaacuacaagcuccccgacgacuucaccggcugcgugaucgccuggaacuccgucaagcaggacgcccugacgggcgacaacuacggguaccuguaccggcuguuccgcaagagcaagcucaagccguucgagcgggacaucuccaccgagaucuaccaggccggcagcacccccugcaacggccagguggggcugaacugcuacuacccccucgagcgcuacggguuccaccccaccaccggcgugaacuaccagccguuccgggucguggugcuguccuucgagcugcucaacggccccgcgacggucugcgggcccaagcugagcaccacccuggugaaggacaagugcgugaacuucaacuucaacggccugaccgggacgggcguccucaccaccuccaagaagcaguuccugcccuuccagcaguucgggcgcgacaucagcgacaccacggacgccgugcgcgacccgcagacccuggagauccucgacaucacccccugcuccuucggcggcgugagcgucaucacccccgggacgaacaccagcaaccagguggccgugcuguaccaggacgucaacugcaccgaggugccgauggccauccacgccgagcagcugacccccgcguggcggguguacuccgccggcgccaacgucuuccagacgcgcgccgggugccucgugggcgccgagcacgugaacaacagcuacgagugcgacauccccgucggcgcggggaucugcgccuccuaccacagcauguccagcuuccgguccgugaaccagcgcagcaucaucgccuacaccaugucccugggcgccgagaacagcguggcguacuccaacaacagcaucgccauccccaccaacuucaccaucuccgucacgaccgagauccugccggugagcaugaccaagaccuccguggacugcacgauguacaucugcggggacagcaucgagugcuccaaccuccugcugcaguacggcagcuucugcacccagcucaaccgggcccugaccgggaucgccgucgagcaggacaagaacacccaggagguguucgcccaggugaagcagaucuacaagacgccgcccaucaaggacuucggcggcuucaacuucagccagauccugcccgaccccuccaagcccagcaagcgcuccuucaucgaggaccuccuguucaacaaggucacccuggcggacgccggguucaucaagcaguacggcgacugccucggggacaucgccgcccgggaccugaucugcgcccagaaguucaacggccugaccgugcucccgccccugcugaccgacgagaugaucgcgcaguacacgagcgcccuccuggccgggaccaucaccuccggcuggaccuucggcgccggggccgcgcugcagauccccuucgccaugcagauggccuaccgcuucaacggcaucggggugacgcagaacguccucuacgagaaccagaagcugaucgccaaccaguucaacagcgcgaucggcaagauccaggacucccugagcuccaccgccagcgcccucgggaagcugcaggacguggugaaccagaacgcccaggcccugaacacccucgucaagcagcuguccagcaacuucggcgcgaucuccagcgugcugaacgacauccucucccggcuggacaagguggaggccgagguccagaucgaccgccugaucaccggccggcuccagagccugcagaccuacgugacgcagcagcugauccgcgccgccgagauccgggccuccgcgaaccucgccgccaccaagaugagcgagugcgugcuggggcaguccaagcgcgucgacuucugcggcaagggguaccaccugaugagcuucccccagagcgcgccccacggcguggucuuccuccacgugaccuacgugcccgcccaggagaagaacuucaccacggccccggccaucugccacgaggggaaggcccacuucccccgggagggcgucuucguguccaacggcacccacugguucaucacccagcgcaacuucuacgagccccagaucaucaccacggacaacaccuucgugagcggguccugcgacgucgugaucggcaucgugaacaacaccgucuacgacccccugcagccggagcuggacagcuucaaggaggagcucgacaaguacuucaagaaccacaccucccccgacguggaccugggggacaucagcggcaucaacgccuccguggucaacauccagaaggagaucgaccggcugaacgagguggcgaagaaccucaacgagagccugaucgaccugcaggagcucggcaaguacgagcaguacaucaaguggcccugguacaucuggcugggguucaucgccggccugaucgccaucaucauggugacgaucaugcucugcugcaugaccuccugcugcagcugccugaaggggugcugcuccugcggcagcugcugcaaguucgacgaggacgacuccgagcccguccugaagggggugaagcuccacuacaccuga

SEQ ID NO: 11797 - RNA, 3798 nt, Artificial Sequence
  SARS-CoV-2/pangolin/Guangxi/P1E/2017__EPI_ISL_410539 spike protein CDS gc (1-1265)
auguucguguuccuguucguccucccccuggugagcucccagugcgugaaccugaccacccgcacgggcauccagccgggguacaccaacagcuccacccggggcgucuacuaccccgacaagguguuccgcagcuccauccuccaccugacccaggaccuguuccuccccuucuucagcaacgugacgugguucaacaccaucaacuaccagggcggguucaagaaguucgacaaccccguccugccguucaacgacgggguguacuucgccuccaccgagaaguccaacaucauccggggcuggaucuucggcaccacgcuggacgcccgcacccagagccuccugaucgugaacaacgcgaccaacgucgugaucaaggugugcgaguuccaguucugcaccgaccccuuccugggggucuacuaccacaacaacaacaagacguggguggagaacgaguuccggguguacagcuccgccaacaacugcaccuucgaguacaucagccagcccuuccucauggaccuggagggcaagcaggggaacuucaagaaccugcgcgaguucgucuucaagaacguggacggcuacuucaagaucuacuccaagcacacccccaucgaccucgugcgggaccugccgcgcggguucgccgcccuggagccccucgucgaccugcccaucggcaucaacaucacccgguuccagacgcugcucgcccugcaccgcagcuaccugacccccggcaagcucgaguccggguggaccaccggcgcggccgccuacuacgugggguaccugcagcagcggacguuccugcucagcuacaaccagaacggcaccaucaccgacgccguggacugcucccuggacccgcugagcgagaccaagugcacgcucaagucccugaccgucgagaagggcaucuaccagaccagcaacuuccgcgugcagcccaccaucagcaucgugcgguuccccaacaucacgaaccugugccccuucggggaggucuucaacgcguccaaguucgccagcguguacgccuggaaccgcaagcggaucuccaacugcgucgccgacuacagcgugcucuacaacuccaccagcuucuccaccuucaagugcuacggcgugagcccgaccaagcugaacgaccugugcuucacgaacgucuacgccgacuccuucguggugaagggggacgagguccgccagaucgcgcccggccagaccggggugaucgccgacuacaacuacaagcuccccgacgacuucaccggcugcgugaucgccuggaacagcgucaagcaggacgcccugaccggcgggaacuaccuguaccgccucuuccggaaguccaagcugaagcccuucgagcgggacaucagcacggagaucuaccaggccggcuccaccccgugcaacggccagguggggcugaacugcuacuacccccucgagcgcuacggguuccaccccaccaccggcgugaacuaccagcccuuccgggucguggugcugagcuucgagcugcucaacggcccggcgaccgucugcgggcccaagcuguccacgacccuggugaaggacaagugcgugaacuucaacuucaacggccugaccgggaccggcguccucacgaccagcaagaagcaguuccugcccuuccagcaguucgggcgcgacaucuccgacaccaccgacgccgugcgcgacccccagacgcuggagauccucgacaucaccccgugcagcuucggcggcguguccgucaucacccccgggaccaacacgagcaaccagguggccgugcuguaccaggacgucaacugcaccgaggugcccauggccauccacgccgagcagcugaccccggcguggcggguguacagcgccggcgccaacgucuuccagacccgcgccgggugccucgugggcgccgagcacgugaacaacuccuacgagugcgacauccccgucggcgcggggaucugcgccagcuaccacuccaugagcucccugcggagcgugaaccagcgcuccaucaucgccuacacgaugagccugggcgccgagaacuccguggcguacagcaacaacuccaucgccauccccaccaacuucaccaucagcgucaccacggagauccuccccguguccaugaccaagaccagcguggacugcaccauguacaucugcggggacuccaucgagugcagcaaccugcugcuccaguacggcuccuucugcacgcagcugaaccgggcccugaccgggaucgccgucgagcaggacaagaacacccaggagguguucgcccaggugaagcagaucuacaagaccccgcccaucaaggacuucggcggcuucaacuucagccagauccuccccgaccccagcaagccguccaagcgcagcuucaucgaggaccugcuguucaacaaggucacgcucgcggacgccggguucaucaagcaguacggcgacugccugggggacaucgccgcccgggaccugaucugcgcccagaaguucaacggccucaccgugcugccgccccugcucaccgacgagaugaucgcgcaguacaccuccgcccugcuggccgggacgaucaccagcggcuggaccuucggcgccggggccgcgcuccagauccccuucgccaugcagauggccuaccgcuucaacggcaucggggugacccagaacguccuguacgagaaccagaagcugaucgccaaccaguucaacuccgcgaucggcaagauccaggacagccucuccagcacggccuccgcccuggggaagcugcaggacguggugaaccagaacgcccaggcccucaacacccuggucaagcagcugagcuccaacuucggcgcgaucagcuccgugcucaacgacauccugagccggcuggacaagguggaggccgagguccagaucgaccgccucaucaccggccggcugcagucccugcagaccuacgugacccagcagcucauccgcgccgccgagauccgggccagcgcgaaccuggccgccacgaagauguccgagugcgugcuggggcagagcaagcgcgucgacuucugcggcaagggguaccaccucauguccuucccccagagcgcgccccacggcguggucuuccugcacgugaccuacgugcccgcccaggagaagaacuucaccaccgcccccgccaucugccacgaggggaaggcccacuucccgcgggagggcgucuucgugagcaacggcacgcacugguucaucacccagcgcaacuucuacgagccccagaucaucaccaccgacaacacguucguguccgggagcugcgacgucgugaucggcaucgugaacaacaccgucuacgacccccugcagcccgagcucgacuccuucaaggaggagcuggacaaguacuucaagaaccacaccagcccggacguggaccugggggacaucuccggcaucaacgccagcguggucaacauccagaaggagaucgaccggcucaacgagguggcgaagaaccugaacgagucccugaucgaccuccaggagcugggcaaguacgagcaguacaucaaguggcccugguacaucuggcugggguucaucgccggccucaucgccaucaucauggugaccaucaugcugugcugcaugacgagcugcugcuccugccugaaggggugcugcagcugcggcuccugcugcaaguucgacgaggacgacagcgagcccguccucaagggggugaagcugcacuacaccuga

SEQ ID NO: 11798 - RNA, 3822 nt, Artificial Sequence; identical to SEQ ID NO: 137
  SARS-CoV-2/Wuhan/WIV05/2019__EPI_ISL_402128 spike protein CDS gc (1-1273)(K986P_V987P)

SEQ ID NO: 11799 - RNA, 3822 nt, Artificial Sequence
  SARS-CoV-2/Wuhan/WIV05/2019__EPI_ISL_402128 spike protein CDS gc (1-1273)(K986P_V987P_T887WN_A1020W)
auguucguguuccugguccuccugccccuggugagcucccagugcgugaaccucaccacccgcacgcagcugccgcccgccuacaccaacagcuucacccggggcgucuacuaccccgacaagguguuccgcuccagcgugcugcacuccacccaggaccucuuccugcccuucuucagcaacgucacgugguuccacgccauccacguguccgggaccaacggcaccaagcgguucgacaacccggugcugcccuucaacgacggggucuacuucgcgagcaccgagaaguccaacaucauccgcggcuggaucuucgggacgacccucgacagcaagacccagucccugcugaucgugaacaacgccaccaacguggucaucaaggugugcgaguuccaguucugcaacgaccccuuccucggcguguacuaccacaagaacaacaagagcuggauggaguccgaguuccgggucuacagcuccgccaacaacugcacguucgaguacgugagccagcccuuccugauggaccuggagggcaagcaggggaacuucaagaaccuccgcgaguucguguucaagaacaucgacggcuacuucaagaucuacuccaagcacaccccgaucaaccugguccgggaccugccccagggguucagcgcccucgagccccugguggaccugcccaucggcaucaacaucacccgcuuccagacccuccuggcccugcaccgguccuaccucacgccgggggacagcagcuccggcuggaccgcgggcgccgccgccuacuacgugggguaccugcagccccgcaccuuccugcucaaguacaacgagaacggcaccaucacggacgcggucgacugcgcccuggacccccugagcgagaccaagugcacccucaaguccuucaccguggagaaggggaucuaccagacgagcaacuuccgggugcagcccaccgaguccaucguccgcuucccgaacaucaccaaccugugccccuucggcgagguguucaacgccacccgguucgccagcgucuacgccuggaaccgcaagcggaucuccaacugcguggcggacuacagcgugcuguacaacuccgccagcuucuccacguucaagugcuacggcgucagccccaccaagcucaacgaccugugcuucaccaacguguacgccgacuccuucgugauccgcggggacgagguccggcagaucgcccccggccagaccgggaagaucgccgacuacaacuacaagcugccggacgacuucacgggcugcgugaucgcguggaacagcaacaaccucgacuccaaggucgggggcaacuacaacuaccuguaccgccuguuccgcaagagcaaccucaagcccuucgagcgggacaucuccaccgagaucuaccaggccggcagcacccccugcaacgggguggagggcuucaacugcuacuucccccugcaguccuacggguuccagccgaccaacggcgugggguaccagcccuaccggguggucgugcugagcuucgagcuccugcacgcccccgccacggugugcggccccaagaaguccaccaaccuggucaagaacaagugcgugaacuucaacuucaacggccucaccgggaccggcgugcugaccgagagcaacaagaaguuccugccguuccagcaguucgggcgcgacaucgccgacacgaccgacgcgguccgcgacccccagacccuggagauccucgacaucacccccugcagcuucggcgggguguccgugaucacgccgggcaccaacaccagcaaccaggucgccgugcuguaccaggacgugaacugcaccgagguccccguggccauccacgccgaccagcugacgcccaccuggcggguguacuccaccggcagcaacgucuuccagacccgcgccgggugccucaucggcgcggagcacgugaacaacuccuacgagugcgacauccccaucggggccggcaucugcgccagcuaccagacgcagaccaacuccccgcggcgcgcccggagcguggcgucccagagcaucaucgccuacaccaugucccugggcgccgagaacagcgucgccuacuccaacaacagcaucgccauccccaccaacuucacgaucuccgugaccaccgagauccugcccgugagcaugaccaagacgagcgucgacugcaccauguacaucugcggggacuccaccgagugcagcaaccuccugcugcaguacggcuccuucugcacccagcucaaccgcgcgcugacggggaucgccguggagcaggacaagaacacccaggagguguucgcccaggucaagcagaucuacaagacgcccccgaucaaggacuucggcggguucaacuucagccagauccugcccgaccccuccaagcccagcaagcgguccuucaucgaggaccuccuguucaacaaggugacccuggccgacgccggcuucaucaagcaguacggcgacugccucggggacaucgcggcccgcgaccugaucugcgcccagaaguucaacggccugaccgugcucccgccccugcugaccgacgagaugaucgcccaguacaccagcgcccuccuggcggggaccaucacguccggcuggugguucggggccggcgccgcccugcagauccccuucgcgaugcagauggccuaccgguucaacggcaucggggucacccagaacgugcucuacgagaaccagaagcugaucgccaaccaguucaacagcgccaucggcaagauccaggacucccugagcuccaccgccagcgcgcucgggaagcugcaggacguggucaaccagaacgcccaggcccugaacacgcucgugaagcagcuguccagcaacuucggcgccaucuccagcgugcugaacgacauccucucccgccuggacccgcccgaggccgaggugcagaucgaccggcugaucaccgggcgccuccagagccugcagaccuacgugacccagcagcugauccgggcggccgagauccgcuggagcgccaaccucgccgcgaccaagauguccgagugcguccugggccagagcaagcggguggacuucugcggcaagggguaccaccugauguccuucccccagagcgccccgcacggcguggucuuccuccacgugacguacguccccgcccaggagaagaacuucaccaccgcccccgcgaucugccacgacgggaaggcccacuucccccgcgagggcguguucguguccaacgggacccacugguucgucacgcagcggaacuucuacgagccgcagaucaucaccaccgacaacaccuucgugagcggcaacugcgacguggucaucggcaucgugaacaacacgguguacgacccccugcagcccgagcuggacuccuucaaggaggagcucgacaaguacuucaagaaccacaccagccccgacgucgaccugggggacaucuccggcaucaacgccagcguggugaacauccagaaggagaucgaccgccugaacgaggucgccaagaaccucaacgagucccugaucgaccugcaggagcucgggaaguacgagcaguacaucaaguggccgugguacaucuggcugggcuucaucgccggccugaucgcgaucgugauggugaccaucaugcucugcugcaugaccagcugcugcuccugccugaaggggugcugcagcugcggcuccugcugcaaguucgacgaggacgacagcgagcccguccugaagggggugaagcuccacuacacguga

SEQ ID NO: 11800 - RNA, 3822 nt, Artificial Sequence
  SARS-CoV-2/Wuhan/WIV05/2019__EPI_ISL_402128 spike protein CDS gc (1-1273)(K986P_V987P_P1069F)
auguucguguuccugguccuccugccccuggugagcucccagugcgugaaccucaccacccgcacgcagcugccgcccgccuacaccaacagcuucacccggggcgucuacuaccccgacaagguguuccgcuccagcgugcugcacuccacccaggaccucuuccugcccuucuucagcaacgucacgugguuccacgccauccacguguccgggaccaacggcaccaagcgguucgacaacccggugcugcccuucaacgacggggucuacuucgcgagcaccgagaaguccaacaucauccgcggcuggaucuucgggacgacccucgacagcaagacccagucccugcugaucgugaacaacgccaccaacguggucaucaaggugugcgaguuccaguucugcaacgaccccuuccucggcguguacuaccacaagaacaacaagagcuggauggaguccgaguuccgggucuacagcuccgccaacaacugcacguucgaguacgugagccagcccuuccugauggaccuggagggcaagcaggggaacuucaagaaccuccgcgaguucguguucaagaacaucgacggcuacuucaagaucuacuccaagcacaccccgaucaaccugguccgggaccugccccagggguucagcgcccucgagccccugguggaccugcccaucggcaucaacaucacccgcuuccagacccuccuggcccugcaccgguccuaccucacgccgggggacagcagcuccggcuggaccgcgggcgccgccgccuacuacgugggguaccugcagccccgcaccuuccugcucaaguacaacgagaacggcaccaucacggacgcggucgacugcgcccuggacccccugagcgagaccaagugcacccucaaguccuucaccguggagaaggggaucuaccagacgagcaacuuccgggugcagcccaccgaguccaucguccgcuucccgaacaucaccaaccugugccccuucggcgagguguucaacgccacccgguucgccagcgucuacgccuggaaccgcaagcggaucuccaacugcguggcggacuacagcgugcuguacaacuccgccagcuucuccacguucaagugcuacggcgucagccccaccaagcucaacgaccugugcuucaccaacguguacgccgacuccuucgugauccgcggggacgagguccggcagaucgcccccggccagaccgggaagaucgccgacuacaacuacaagcugccggacgacuucacgggcugcgugaucgcguggaacagcaacaaccucgacuccaaggucgggggcaacuacaacuaccuguaccgccuguuccgcaagagcaaccucaagcccuucgagcgggacaucuccaccgagaucuaccaggccggcagcacccccugcaacgggguggagggcuucaacugcuacuucccccugcaguccuacggguuccagccgaccaacggcgugggguaccagcccuaccggguggucgugcugagcuucgagcuccugcacgcccccgccacggugugcggccccaagaaguccaccaaccuggucaagaacaagugcgugaacuucaacuucaacggccucaccgggaccggcgugcugaccgagagcaacaagaaguuccugccguuccagcaguucgggcgcgacaucgccgacacgaccgacgcgguccgcgacccccagacccuggagauccucgacaucacccccugcagcuucggcgggguguccgugaucacgccgggcaccaacaccagcaaccaggucgccgugcuguaccaggacgugaacugcaccgagguccccguggccauccacgccgaccagcugacgcccaccuggcggguguacuccaccggcagcaacgucuuccagacccgcgccgggugccucaucggcgcggagcacgugaacaacuccuacgagugcgacauccccaucggggccggcaucugcgccagcuaccagacgcagaccaacuccccgcggcgcgcccggagcguggcgucccagagcaucaucgccuacaccaugucccugggcgccgagaacagcgucgccuacuccaacaacagcaucgccauccccaccaacuucacgaucuccgugaccaccgagauccugcccgugagcaugaccaagacgagcgucgacugcaccauguacaucugcggggacuccaccgagugcagcaaccuccugcugcaguacggcuccuucugcacccagcucaaccgcgcgcugacggggaucgccguggagcaggacaagaacacccaggagguguucgcccaggucaagcagaucuacaagacgcccccgaucaaggacuucggcggguucaacuucagccagauccugcccgaccccuccaagcccagcaagcgguccuucaucgaggaccuccuguucaacaaggugacccuggccgacgccggcuucaucaagcaguacggcgacugccucggggacaucgcggcccgcgaccugaucugcgcccagaaguucaacggccugaccgugcucccgccccugcugaccgacgagaugaucgcccaguacaccagcgcccuccuggcggggaccaucacguccggcuggaccuucggggccggcgccgcccugcagauccccuucgcgaugcagauggccuaccgguucaacggcaucggggucacccagaacgugcucuacgagaaccagaagcugaucgccaaccaguucaacagcgccaucggcaagauccaggacucccugagcuccaccgccagcgcgcucgggaagcugcaggacguggucaaccagaacgcccaggcccugaacacgcucgugaagcagcuguccagcaacuucggcgccaucuccagcgugcugaacgacauccucucccgccuggacccgcccgaggccgaggugcagaucgaccggcugaucaccgggcgccuccagagccugcagaccuacgugacccagcagcugauccgggcggccgagauccgcgccagcgccaaccucgccgcgaccaagauguccgagugcguccugggccagagcaagcggguggacuucugcggcaagggguaccaccugauguccuucccccagagcgccccgcacggcguggucuuccuccacgugacguacgucuucgcccaggagaagaacuucaccaccgcccccgcgaucugccacgacgggaaggcccacuucccccgcgagggcguguucguguccaacgggacccacugguucgucacgcagcggaacuucuacgagccgcagaucaucaccaccgacaacaccuucgugagcggcaacugcgacguggucaucggcaucgugaacaacacgguguacgacccccugcagcccgagcuggacuccuucaaggaggagcucgacaaguacuucaagaaccacaccagccccgacgucgaccugggggacaucuccggcaucaacgccagcguggugaacauccagaaggagaucgaccgccugaacgaggucgccaagaaccucaacgagucccugaucgaccugcaggagcucgggaaguacgagcaguacaucaaguggccgugguacaucuggcugggcuucaucgccggccugaucgcgaucgugauggugaccaucaugcucugcugcaugaccagcugcugcuccugccugaaggggugcugcagcugcggcuccugcugcaaguucgacgaggacgacagcgagcccguccugaagggggugaagcuccacuacacguga

SEQ ID NO: 11801 - RNA, 3822 nt, Artificial Sequence
  SARS-CoV-2/Wuhan/WIV05/2019__EPI_ISL_402128 spike protein CDS gc (1-1273)(K986P_V987P_ H1048Q_H1064N_ H1083N_H1101N)
auguucguguuccugguccuccugccccuggugagcucccagugcgugaaccucaccacccgcacgcagcugccgcccgccuacaccaacagcuucacccggggcgucuacuaccccgacaagguguuccgcuccagcgugcugcacuccacccaggaccucuuccugcccuucuucagcaacgucacgugguuccacgccauccacguguccgggaccaacggcaccaagcgguucgacaacccggugcugcccuucaacgacggggucuacuucgcgagcaccgagaaguccaacaucauccgcggcuggaucuucgggacgacccucgacagcaagacccagucccugcugaucgugaacaacgccaccaacguggucaucaaggugugcgaguuccaguucugcaacgaccccuuccucggcguguacuaccacaagaacaacaagagcuggauggaguccgaguuccgggucuacagcuccgccaacaacugcacguucgaguacgugagccagcccuuccugauggaccuggagggcaagcaggggaacuucaagaaccuccgcgaguucguguucaagaacaucgacggcuacuucaagaucuacuccaagcacaccccgaucaaccugguccgggaccugccccagggguucagcgcccucgagccccugguggaccugcccaucggcaucaacaucacccgcuuccagacccuccuggcccugcaccgguccuaccucacgccgggggacagcagcuccggcuggaccgcgggcgccgccgccuacuacgugggguaccugcagccccgcaccuuccugcucaaguacaacgagaacggcaccaucacggacgcggucgacugcgcccuggacccccugagcgagaccaagugcacccucaaguccuucaccguggagaaggggaucuaccagacgagcaacuuccgggugcagcccaccgaguccaucguccgcuucccgaacaucaccaaccugugccccuucggcgagguguucaacgccacccgguucgccagcgucuacgccuggaaccgcaagcggaucuccaacugcguggcggacuacagcgugcuguacaacuccgccagcuucuccacguucaagugcuacggcgucagccccaccaagcucaacgaccugugcuucaccaacguguacgccgacuccuucgugauccgcggggacgagguccggcagaucgcccccggccagaccgggaagaucgccgacuacaacuacaagcugccggacgacuucacgggcugcgugaucgcguggaacagcaacaaccucgacuccaaggucgggggcaacuacaacuaccuguaccgccuguuccgcaagagcaaccucaagcccuucgagcgggacaucuccaccgagaucuaccaggccggcagcacccccugcaacgggguggagggcuucaacugcuacuucccccugcaguccuacggguuccagccgaccaacggcgugggguaccagcccuaccggguggucgugcugagcuucgagcuccugcacgcccccgccacggugugcggccccaagaaguccaccaaccuggucaagaacaagugcgugaacuucaacuucaacggccucaccgggaccggcgugcugaccgagagcaacaagaaguuccugccguuccagcaguucgggcgcgacaucgccgacacgaccgacgcgguccgcgacccccagacccuggagauccucgacaucacccccugcagcuucggcgggguguccgugaucacgccgggcaccaacaccagcaaccaggucgccgugcuguaccaggacgugaacugcaccgagguccccguggccauccacgccgaccagcugacgcccaccuggcggguguacuccaccggcagcaacgucuuccagacccgcgccgggugccucaucggcgcggagcacgugaacaacuccuacgagugcgacauccccaucggggccggcaucugcgccagcuaccagacgcagaccaacuccccgcggcgcgcccggagcguggcgucccagagcaucaucgccuacaccaugucccugggcgccgagaacagcgucgccuacuccaacaacagcaucgccauccccaccaacuucacgaucuccgugaccaccgagauccugcccgugagcaugaccaagacgagcgucgacugcaccauguacaucugcggggacuccaccgagugcagcaaccuccugcugcaguacggcuccuucugcacccagcucaaccgcgcgcugacggggaucgccguggagcaggacaagaacacccaggagguguucgcccaggucaagcagaucuacaagacgcccccgaucaaggacuucggcggguucaacuucagccagauccugcccgaccccuccaagcccagcaagcgguccuucaucgaggaccuccuguucaacaaggugacccuggccgacgccggcuucaucaagcaguacggcgacugccucggggacaucgcggcccgcgaccugaucugcgcccagaaguucaacggccugaccgugcucccgccccugcugaccgacgagaugaucgcccaguacaccagcgcccuccuggcggggaccaucacguccggcuggaccuucggggccggcgccgcccugcagauccccuucgcgaugcagauggccuaccgguucaacggcaucggggucacccagaacgugcucuacgagaaccagaagcugaucgccaaccaguucaacagcgccaucggcaagauccaggacucccugagcuccaccgccagcgcgcucgggaagcugcaggacguggucaaccagaacgcccaggcccugaacacgcucgugaagcagcuguccagcaacuucggcgccaucuccagcgugcugaacgacauccucucccgccuggacccgcccgaggccgaggugcagaucgaccggcugaucaccgggcgccuccagagccugcagaccuacgugacccagcagcugauccgggcggccgagauccgcgccagcgccaaccucgccgcgaccaagauguccgagugcguccugggccagagcaagcggguggacuucugcggcaagggguaccagcugauguccuucccccagagcgccccgcacggcguggucuuccucaacgugacguacguccccgcccaggagaagaacuucaccaccgcccccgcgaucugcaacgacgggaaggcccacuucccccgcgagggcguguucguguccaacgggaccaacugguucgucacgcagcggaacuucuacgagccgcagaucaucaccaccgacaacaccuucgugagcggcaacugcgacguggucaucggcaucgugaacaacacgguguacgacccccugcagcccgagcuggacuccuucaaggaggagcucgacaaguacuucaagaaccacaccagccccgacgucgaccugggggacaucuccggcaucaacgccagcguggugaacauccagaaggagaucgaccgccugaacgaggucgccaagaaccucaacgagucccugaucgaccugcaggagcucgggaaguacgagcaguacaucaaguggccgugguacaucuggcugggcuucaucgccggccugaucgcgaucgugauggugaccaucaugcucugcugcaugaccagcugcugcuccugccugaaggggugcugcagcugcggcuccugcugcaaguucgacgaggacgacagcgagcccguccugaagggggugaagcuccacuacacguga

SEQ ID NO: 11802 - RNA, 3822 nt, Artificial Sequence
  SARS-CoV-2/Wuhan/WIV05/2019__EPI_ISL_402128 spike protein CDS gc (1-1273)(I712C_T1077C)
auguucguguuccugguccuccugccccuggugagcucccagugcgugaaccucaccacccgcacgcagcugccgcccgccuacaccaacagcuucacccggggcgucuacuaccccgacaagguguuccgcuccagcgugcugcacuccacccaggaccucuuccugcccuucuucagcaacgucacgugguuccacgccauccacguguccgggaccaacggcaccaagcgguucgacaacccggugcugcccuucaacgacggggucuacuucgcgagcaccgagaaguccaacaucauccgcggcuggaucuucgggacgacccucgacagcaagacccagucccugcugaucgugaacaacgccaccaacguggucaucaaggugugcgaguuccaguucugcaacgaccccuuccucggcguguacuaccacaagaacaacaagagcuggauggaguccgaguuccgggucuacagcuccgccaacaacugcacguucgaguacgugagccagcccuuccugauggaccuggagggcaagcaggggaacuucaagaaccuccgcgaguucguguucaagaacaucgacggcuacuucaagaucuacuccaagcacaccccgaucaaccugguccgggaccugccccagggguucagcgcccucgagccccugguggaccugcccaucggcaucaacaucacccgcuuccagacccuccuggcccugcaccgguccuaccucacgccgggggacagcagcuccggcuggaccgcgggcgccgccgccuacuacgugggguaccugcagccccgcaccuuccugcucaaguacaacgagaacggcaccaucacggacgcggucgacugcgcccuggacccccugagcgagaccaagugcacccucaaguccuucaccguggagaaggggaucuaccagacgagcaacuuccgggugcagcccaccgaguccaucguccgcuucccgaacaucaccaaccugugccccuucggcgagguguucaacgccacccgguucgccagcgucuacgccuggaaccgcaagcggaucuccaacugcguggcggacuacagcgugcuguacaacuccgccagcuucuccacguucaagugcuacggcgucagccccaccaagcucaacgaccugugcuucaccaacguguacgccgacuccuucgugauccgcggggacgagguccggcagaucgcccccggccagaccgggaagaucgccgacuacaacuacaagcugccggacgacuucacgggcugcgugaucgcguggaacagcaacaaccucgacuccaaggucgggggcaacuacaacuaccuguaccgccuguuccgcaagagcaaccucaagcccuucgagcgggacaucuccaccgagaucuaccaggccggcagcacccccugcaacgggguggagggcuucaacugcuacuucccccugcaguccuacggguuccagccgaccaacggcgugggguaccagcccuaccggguggucgugcugagcuucgagcuccugcacgcccccgccacggugugcggccccaagaaguccaccaaccuggucaagaacaagugcgugaacuucaacuucaacggccucaccgggaccggcgugcugaccgagagcaacaagaaguuccugccguuccagcaguucgggcgcgacaucgccgacacgaccgacgcgguccgcgacccccagacccuggagauccucgacaucacccccugcagcuucggcgggguguccgugaucacgccgggcaccaacaccagcaaccaggucgccgugcuguaccaggacgugaacugcaccgagguccccguggccauccacgccgaccagcugacgcccaccuggcggguguacuccaccggcagcaacgucuuccagacccgcgccgggugccucaucggcgcggagcacgugaacaacuccuacgagugcgacauccccaucggggccggcaucugcgccagcuaccagacgcagaccaacuccccgcggcgcgcccggagcguggcgucccagagcaucaucgccuacaccaugucccugggcgccgagaacagcgucgccuacuccaacaacagcugcgccauccccaccaacuucacgaucuccgugaccaccgagauccugcccgugagcaugaccaagacgagcgucgacugcaccauguacaucugcggggacuccaccgagugcagcaaccuccugcugcaguacggcuccuucugcacccagcucaaccgcgcgcugacggggaucgccguggagcaggacaagaacacccaggagguguucgcccaggucaagcagaucuacaagacgcccccgaucaaggacuucggcggguucaacuucagccagauccugcccgaccccuccaagcccagcaagcgguccuucaucgaggaccuccuguucaacaaggugacccuggccgacgccggcuucaucaagcaguacggcgacugccucggggacaucgcggcccgcgaccugaucugcgcccagaaguucaacggccugaccgugcucccgccccugcugaccgacgagaugaucgcccaguacaccagcgcccuccuggcggggaccaucacguccggcuggaccuucggggccggcgccgcccugcagauccccuucgcgaugcagauggccuaccgguucaacggcaucggggucacccagaacgugcucuacgagaaccagaagcugaucgccaaccaguucaacagcgccaucggcaagauccaggacucccugagcuccaccgccagcgcgcucgggaagcugcaggacguggucaaccagaacgcccaggcccugaacacgcucgugaagcagcuguccagcaacuucggcgccaucuccagcgugcugaacgacauccucucccgccuggacaaggucgaggccgaggugcagaucgaccggcugaucaccgggcgccuccagagccugcagaccuacgugacccagcagcugauccgggcggccgagauccgcgccagcgccaaccucgccgcgaccaagauguccgagugcguccugggccagagcaagcggguggacuucugcggcaagggguaccaccugauguccuucccccagagcgccccgcacggcguggucuuccuccacgugacguacguccccgcccaggagaagaacuucaccugcgcccccgcgaucugccacgacgggaaggcccacuucccccgcgagggcguguucguguccaacgggacccacugguucgucacgcagcggaacuucuacgagccgcagaucaucaccaccgacaacaccuucgugagcggcaacugcgacguggucaucggcaucgugaacaacacgguguacgacccccugcagcccgagcuggacuccuucaaggaggagcucgacaaguacuucaagaaccacaccagccccgacgucgaccugggggacaucuccggcaucaacgccagcguggugaacauccagaaggagaucgaccgccugaacgaggucgccaagaaccucaacgagucccugaucgaccugcaggagcucgggaaguacgagcaguacaucaaguggccgugguacaucuggcugggcuucaucgccggccugaucgcgaucgugauggugaccaucaugcucugcugcaugaccagcugcugcuccugccugaaggggugcugcagcugcggcuccugcugcaaguucgacgaggacgacagcgagcccguccugaagggggugaagcuccacuacacguga

SEQ ID NO: 11803 - RNA, 3822 nt, Artificial Sequence
  SARS-CoV-2/Wuhan/WIV05/2019__EPI_ISL_402128 spike protein CDS gc (1-1273)(I714C_Y1110C)
auguucguguuccugguccuccugccccuggugagcucccagugcgugaaccucaccacccgcacgcagcugccgcccgccuacaccaacagcuucacccggggcgucuacuaccccgacaagguguuccgcuccagcgugcugcacuccacccaggaccucuuccugcccuucuucagcaacgucacgugguuccacgccauccacguguccgggaccaacggcaccaagcgguucgacaacccggugcugcccuucaacgacggggucuacuucgcgagcaccgagaaguccaacaucauccgcggcuggaucuucgggacgacccucgacagcaagacccagucccugcugaucgugaacaacgccaccaacguggucaucaaggugugcgaguuccaguucugcaacgaccccuuccucggcguguacuaccacaagaacaacaagagcuggauggaguccgaguuccgggucuacagcuccgccaacaacugcacguucgaguacgugagccagcccuuccugauggaccuggagggcaagcaggggaacuucaagaaccuccgcgaguucguguucaagaacaucgacggcuacuucaagaucuacuccaagcacaccccgaucaaccugguccgggaccugccccagggguucagcgcccucgagccccugguggaccugcccaucggcaucaacaucacccgcuuccagacccuccuggcccugcaccgguccuaccucacgccgggggacagcagcuccggcuggaccgcgggcgccgccgccuacuacgugggguaccugcagccccgcaccuuccugcucaaguacaacgagaacggcaccaucacggacgcggucgacugcgcccuggacccccugagcgagaccaagugcacccucaaguccuucaccguggagaaggggaucuaccagacgagcaacuuccgggugcagcccaccgaguccaucguccgcuucccgaacaucaccaaccugugccccuucggcgagguguucaacgccacccgguucgccagcgucuacgccuggaaccgcaagcggaucuccaacugcguggcggacuacagcgugcuguacaacuccgccagcuucuccacguucaagugcuacggcgucagccccaccaagcucaacgaccugugcuucaccaacguguacgccgacuccuucgugauccgcggggacgagguccggcagaucgcccccggccagaccgggaagaucgccgacuacaacuacaagcugccggacgacuucacgggcugcgugaucgcguggaacagcaacaaccucgacuccaaggucgggggcaacuacaacuaccuguaccgccuguuccgcaagagcaaccucaagcccuucgagcgggacaucuccaccgagaucuaccaggccggcagcacccccugcaacgggguggagggcuucaacugcuacuucccccugcaguccuacggguuccagccgaccaacggcgugggguaccagcccuaccggguggucgugcugagcuucgagcuccugcacgcccccgccacggugugcggccccaagaaguccaccaaccuggucaagaacaagugcgugaacuucaacuucaacggccucaccgggaccggcgugcugaccgagagcaacaagaaguuccugccguuccagcaguucgggcgcgacaucgccgacacgaccgacgcgguccgcgacccccagacccuggagauccucgacaucacccccugcagcuucggcgggguguccgugaucacgccgggcaccaacaccagcaaccaggucgccgugcuguaccaggacgugaacugcaccgagguccccguggccauccacgccgaccagcugacgcccaccuggcggguguacuccaccggcagcaacgucuuccagacccgcgccgggugccucaucggcgcggagcacgugaacaacuccuacgagugcgacauccccaucggggccggcaucugcgccagcuaccagacgcagaccaacuccccgcggcgcgcccggagcguggcgucccagagcaucaucgccuacaccaugucccugggcgccgagaacagcgucgccuacuccaacaacagcaucgccugccccaccaacuucacgaucuccgugaccaccgagauccugcccgugagcaugaccaagacgagcgucgacugcaccauguacaucugcggggacuccaccgagugcagcaaccuccugcugcaguacggcuccuucugcacccagcucaaccgcgcgcugacggggaucgccguggagcaggacaagaacacccaggagguguucgcccaggucaagcagaucuacaagacgcccccgaucaaggacuucggcggguucaacuucagccagauccugcccgaccccuccaagcccagcaagcgguccuucaucgaggaccuccuguucaacaaggugacccuggccgacgccggcuucaucaagcaguacggcgacugccucggggacaucgcggcccgcgaccugaucugcgcccagaaguucaacggccugaccgugcucccgccccugcugaccgacgagaugaucgcccaguacaccagcgcccuccuggcggggaccaucacguccggcuggaccuucggggccggcgccgcccugcagauccccuucgcgaugcagauggccuaccgguucaacggcaucggggucacccagaacgugcucuacgagaaccagaagcugaucgccaaccaguucaacagcgccaucggcaagauccaggacucccugagcuccaccgccagcgcgcucgggaagcugcaggacguggucaaccagaacgcccaggcccugaacacgcucgugaagcagcuguccagcaacuucggcgccaucuccagcgugcugaacgacauccucucccgccuggacaaggucgaggccgaggugcagaucgaccggcugaucaccgggcgccuccagagccugcagaccuacgugacccagcagcugauccgggcggccgagauccgcgccagcgccaaccucgccgcgaccaagauguccgagugcguccugggccagagcaagcggguggacuucugcggcaagggguaccaccugauguccuucccccagagcgccccgcacggcguggucuuccuccacgugacguacguccccgcccaggagaagaacuucaccaccgcccccgcgaucugccacgacgggaaggcccacuucccccgcgagggcguguucguguccaacgggacccacugguucgucacgcagcggaacuucugcgagccgcagaucaucaccaccgacaacaccuucgugagcggcaacugcgacguggucaucggcaucgugaacaacacgguguacgacccccugcagcccgagcuggacuccuucaaggaggagcucgacaaguacuucaagaaccacaccagccccgacgucgaccugggggacaucuccggcaucaacgccagcguggugaacauccagaaggagaucgaccgccugaacgaggucgccaagaaccucaacgagucccugaucgaccugcaggagcucgggaaguacgagcaguacaucaaguggccgugguacaucuggcugggcuucaucgccggccugaucgcgaucgugauggugaccaucaugcucugcugcaugaccagcugcugcuccugccugaaggggugcugcagcugcggcuccugcugcaaguucgacgaggacgacagcgagcccguccugaagggggugaagcuccacuacacguga

SEQ ID NO: 11804 - RNA, 3822 nt, Artificial Sequence
  SARS-CoV-2/Wuhan/WIV05/2019__EPI_ISL_402128 spike protein CDS gc (1-1273)(P715C_P1069C)
auguucguguuccugguccuccugccccuggugagcucccagugcgugaaccucaccacccgcacgcagcugccgcccgccuacaccaacagcuucacccggggcgucuacuaccccgacaagguguuccgcuccagcgugcugcacuccacccaggaccucuuccugcccuucuucagcaacgucacgugguuccacgccauccacguguccgggaccaacggcaccaagcgguucgacaacccggugcugcccuucaacgacggggucuacuucgcgagcaccgagaaguccaacaucauccgcggcuggaucuucgggacgacccucgacagcaagacccagucccugcugaucgugaacaacgccaccaacguggucaucaaggugugcgaguuccaguucugcaacgaccccuuccucggcguguacuaccacaagaacaacaagagcuggauggaguccgaguuccgggucuacagcuccgccaacaacugcacguucgaguacgugagccagcccuuccugauggaccuggagggcaagcaggggaacuucaagaaccuccgcgaguucguguucaagaacaucgacggcuacuucaagaucuacuccaagcacaccccgaucaaccugguccgggaccugccccagggguucagcgcccucgagccccugguggaccugcccaucggcaucaacaucacccgcuuccagacccuccuggcccugcaccgguccuaccucacgccgggggacagcagcuccggcuggaccgcgggcgccgccgccuacuacgugggguaccugcagccccgcaccuuccugcucaaguacaacgagaacggcaccaucacggacgcggucgacugcgcccuggacccccugagcgagaccaagugcacccucaaguccuucaccguggagaaggggaucuaccagacgagcaacuuccgggugcagcccaccgaguccaucguccgcuucccgaacaucaccaaccugugccccuucggcgagguguucaacgccacccgguucgccagcgucuacgccuggaaccgcaagcggaucuccaacugcguggcggacuacagcgugcuguacaacuccgccagcuucuccacguucaagugcuacggcgucagccccaccaagcucaacgaccugugcuucaccaacguguacgccgacuccuucgugauccgcggggacgagguccggcagaucgcccccggccagaccgggaagaucgccgacuacaacuacaagcugccggacgacuucacgggcugcgugaucgcguggaacagcaacaaccucgacuccaaggucgggggcaacuacaacuaccuguaccgccuguuccgcaagagcaaccucaagcccuucgagcgggacaucuccaccgagaucuaccaggccggcagcacccccugcaacgggguggagggcuucaacugcuacuucccccugcaguccuacggguuccagccgaccaacggcgugggguaccagcccuaccggguggucgugcugagcuucgagcuccugcacgcccccgccacggugugcggccccaagaaguccaccaaccuggucaagaacaagugcgugaacuucaacuucaacggccucaccgggaccggcgugcugaccgagagcaacaagaaguuccugccguuccagcaguucgggcgcgacaucgccgacacgaccgacgcgguccgcgacccccagacccuggagauccucgacaucacccccugcagcuucggcgggguguccgugaucacgccgggcaccaacaccagcaaccaggucgccgugcuguaccaggacgugaacugcaccgagguccccguggccauccacgccgaccagcugacgcccaccuggcggguguacuccaccggcagcaacgucuuccagacccgcgccgggugccucaucggcgcggagcacgugaacaacuccuacgagugcgacauccccaucggggccggcaucugcgccagcuaccagacgcagaccaacuccccgcggcgcgcccggagcguggcgucccagagcaucaucgccuacaccaugucccugggcgccgagaacagcgucgccuacuccaacaacagcaucgccaucugcaccaacuucacgaucuccgugaccaccgagauccugcccgugagcaugaccaagacgagcgucgacugcaccauguacaucugcggggacuccaccgagugcagcaaccuccugcugcaguacggcuccuucugcacccagcucaaccgcgcgcugacggggaucgccguggagcaggacaagaacacccaggagguguucgcccaggucaagcagaucuacaagacgcccccgaucaaggacuucggcggguucaacuucagccagauccugcccgaccccuccaagcccagcaagcgguccuucaucgaggaccuccuguucaacaaggugacccuggccgacgccggcuucaucaagcaguacggcgacugccucggggacaucgcggcccgcgaccugaucugcgcccagaaguucaacggccugaccgugcucccgccccugcugaccgacgagaugaucgcccaguacaccagcgcccuccuggcggggaccaucacguccggcuggaccuucggggccggcgccgcccugcagauccccuucgcgaugcagauggccuaccgguucaacggcaucggggucacccagaacgugcucuacgagaaccagaagcugaucgccaaccaguucaacagcgccaucggcaagauccaggacucccugagcuccaccgccagcgcgcucgggaagcugcaggacguggucaaccagaacgcccaggcccugaacacgcucgugaagcagcuguccagcaacuucggcgccaucuccagcgugcugaacgacauccucucccgccuggacaaggucgaggccgaggugcagaucgaccggcugaucaccgggcgccuccagagccugcagaccuacgugacccagcagcugauccgggcggccgagauccgcgccagcgccaaccucgccgcgaccaagauguccgagugcguccugggccagagcaagcggguggacuucugcggcaagggguaccaccugauguccuucccccagagcgccccgcacggcguggucuuccuccacgugacguacgucugcgcccaggagaagaacuucaccaccgcccccgcgaucugccacgacgggaaggcccacuucccccgcgagggcguguucguguccaacgggacccacugguucgucacgcagcggaacuucuacgagccgcagaucaucaccaccgacaacaccuucgugagcggcaacugcgacguggucaucggcaucgugaacaacacgguguacgacccccugcagcccgagcuggacuccuucaaggaggagcucgacaaguacuucaagaaccacaccagccccgacgucgaccugggggacaucuccggcaucaacgccagcguggugaacauccagaaggagaucgaccgccugaacgaggucgccaagaaccucaacgagucccugaucgaccugcaggagcucgggaaguacgagcaguacaucaaguggccgugguacaucuggcugggcuucaucgccggccugaucgcgaucgugauggugaccaucaugcucugcugcaugaccagcugcugcuccugccugaaggggugcugcagcugcggcuccugcugcaaguucgacgaggacgacagcgagcccguccugaagggggugaagcuccacuacacguga

SEQ ID NO: 11805 - RNA, 3822 nt, Artificial Sequence
  SARS-CoV-2/Wuhan/WIV05/2019__EPI_ISL_402128 spike protein CDS gc (1-1273)(G889C_L1034C)
auguucguguuccugguccuccugccccuggugagcucccagugcgugaaccucaccacccgcacgcagcugccgcccgccuacaccaacagcuucacccggggcgucuacuaccccgacaagguguuccgcuccagcgugcugcacuccacccaggaccucuuccugcccuucuucagcaacgucacgugguuccacgccauccacguguccgggaccaacggcaccaagcgguucgacaacccggugcugcccuucaacgacggggucuacuucgcgagcaccgagaaguccaacaucauccgcggcuggaucuucgggacgacccucgacagcaagacccagucccugcugaucgugaacaacgccaccaacguggucaucaaggugugcgaguuccaguucugcaacgaccccuuccucggcguguacuaccacaagaacaacaagagcuggauggaguccgaguuccgggucuacagcuccgccaacaacugcacguucgaguacgugagccagcccuuccugauggaccuggagggcaagcaggggaacuucaagaaccuccgcgaguucguguucaagaacaucgacggcuacuucaagaucuacuccaagcacaccccgaucaaccugguccgggaccugccccagggguucagcgcccucgagccccugguggaccugcccaucggcaucaacaucacccgcuuccagacccuccuggcccugcaccgguccuaccucacgccgggggacagcagcuccggcuggaccgcgggcgccgccgccuacuacgugggguaccugcagccccgcaccuuccugcucaaguacaacgagaacggcaccaucacggacgcggucgacugcgcccuggacccccugagcgagaccaagugcacccucaaguccuucaccguggagaaggggaucuaccagacgagcaacuuccgggugcagcccaccgaguccaucguccgcuucccgaacaucaccaaccugugccccuucggcgagguguucaacgccacccgguucgccagcgucuacgccuggaaccgcaagcggaucuccaacugcguggcggacuacagcgugcuguacaacuccgccagcuucuccacguucaagugcuacggcgucagccccaccaagcucaacgaccugugcuucaccaacguguacgccgacuccuucgugauccgcggggacgagguccggcagaucgcccccggccagaccgggaagaucgccgacuacaacuacaagcugccggacgacuucacgggcugcgugaucgcguggaacagcaacaaccucgacuccaaggucgggggcaacuacaacuaccuguaccgccuguuccgcaagagcaaccucaagcccuucgagcgggacaucuccaccgagaucuaccaggccggcagcacccccugcaacgggguggagggcuucaacugcuacuucccccugcaguccuacggguuccagccgaccaacggcgugggguaccagcccuaccggguggucgugcugagcuucgagcuccugcacgcccccgccacggugugcggccccaagaaguccaccaaccuggucaagaacaagugcgugaacuucaacuucaacggccucaccgggaccggcgugcugaccgagagcaacaagaaguuccugccguuccagcaguucgggcgcgacaucgccgacacgaccgacgcgguccgcgacccccagacccuggagauccucgacaucacccccugcagcuucggcgggguguccgugaucacgccgggcaccaacaccagcaaccaggucgccgugcuguaccaggacgugaacugcaccgagguccccguggccauccacgccgaccagcugacgcccaccuggcggguguacuccaccggcagcaacgucuuccagacccgcgccgggugccucaucggcgcggagcacgugaacaacuccuacgagugcgacauccccaucggggccggcaucugcgccagcuaccagacgcagaccaacuccccgcggcgcgcccggagcguggcgucccagagcaucaucgccuacaccaugucccugggcgccgagaacagcgucgccuacuccaacaacagcaucgccauccccaccaacuucacgaucuccgugaccaccgagauccugcccgugagcaugaccaagacgagcgucgacugcaccauguacaucugcggggacuccaccgagugcagcaaccuccugcugcaguacggcuccuucugcacccagcucaaccgcgcgcugacggggaucgccguggagcaggacaagaacacccaggagguguucgcccaggucaagcagaucuacaagacgcccccgaucaaggacuucggcggguucaacuucagccagauccugcccgaccccuccaagcccagcaagcgguccuucaucgaggaccuccuguucaacaaggugacccuggccgacgccggcuucaucaagcaguacggcgacugccucggggacaucgcggcccgcgaccugaucugcgcccagaaguucaacggccugaccgugcucccgccccugcugaccgacgagaugaucgcccaguacaccagcgcccuccuggcggggaccaucacguccggcuggaccuucugcgccggcgccgcccugcagauccccuucgcgaugcagauggccuaccgguucaacggcaucggggucacccagaacgugcucuacgagaaccagaagcugaucgccaaccaguucaacagcgccaucggcaagauccaggacucccugagcuccaccgccagcgcgcucgggaagcugcaggacguggucaaccagaacgcccaggcccugaacacgcucgugaagcagcuguccagcaacuucggcgccaucuccagcgugcugaacgacauccucucccgccuggacaaggucgaggccgaggugcagaucgaccggcugaucaccgggcgccuccagagccugcagaccuacgugacccagcagcugauccgggcggccgagauccgcgccagcgccaaccucgccgcgaccaagauguccgagugcgucugcggccagagcaagcggguggacuucugcggcaagggguaccaccugauguccuucccccagagcgccccgcacggcguggucuuccuccacgugacguacguccccgcccaggagaagaacuucaccaccgcccccgcgaucugccacgacgggaaggcccacuucccccgcgagggcguguucguguccaacgggacccacugguucgucacgcagcggaacuucuacgagccgcagaucaucaccaccgacaacaccuucgugagcggcaacugcgacguggucaucggcaucgugaacaacacgguguacgacccccugcagcccgagcuggacuccuucaaggaggagcucgacaaguacuucaagaaccacaccagccccgacgucgaccugggggacaucuccggcaucaacgccagcguggugaacauccagaaggagaucgaccgccugaacgaggucgccaagaaccucaacgagucccugaucgaccugcaggagcucgggaaguacgagcaguacaucaaguggccgugguacaucuggcugggcuucaucgccggccugaucgcgaucgugauggugaccaucaugcucugcugcaugaccagcugcugcuccugccugaaggggugcugcagcugcggcuccugcugcaaguucgacgaggacgacagcgagcccguccugaagggggugaagcuccacuacacguga

SEQ ID NO: 11806 - RNA, 3822 nt, Artificial Sequence
  SARS-CoV-2/Wuhan/WIV05/2019__EPI_ISL_402128 spike protein CDS gc (1-1273)(I909C_Y1047C)
auguucguguuccugguccuccugccccuggugagcucccagugcgugaaccucaccacccgcacgcagcugccgcccgccuacaccaacagcuucacccggggcgucuacuaccccgacaagguguuccgcuccagcgugcugcacuccacccaggaccucuuccugcccuucuucagcaacgucacgugguuccacgccauccacguguccgggaccaacggcaccaagcgguucgacaacccggugcugcccuucaacgacggggucuacuucgcgagcaccgagaaguccaacaucauccgcggcuggaucuucgggacgacccucgacagcaagacccagucccugcugaucgugaacaacgccaccaacguggucaucaaggugugcgaguuccaguucugcaacgaccccuuccucggcguguacuaccacaagaacaacaagagcuggauggaguccgaguuccgggucuacagcuccgccaacaacugcacguucgaguacgugagccagcccuuccugauggaccuggagggcaagcaggggaacuucaagaaccuccgcgaguucguguucaagaacaucgacggcuacuucaagaucuacuccaagcacaccccgaucaaccugguccgggaccugccccagggguucagcgcccucgagccccugguggaccugcccaucggcaucaacaucacccgcuuccagacccuccuggcccugcaccgguccuaccucacgccgggggacagcagcuccggcuggaccgcgggcgccgccgccuacuacgugggguaccugcagccccgcaccuuccugcucaaguacaacgagaacggcaccaucacggacgcggucgacugcgcccuggacccccugagcgagaccaagugcacccucaaguccuucaccguggagaaggggaucuaccagacgagcaacuuccgggugcagcccaccgaguccaucguccgcuucccgaacaucaccaaccugugccccuucggcgagguguucaacgccacccgguucgccagcgucuacgccuggaaccgcaagcggaucuccaacugcguggcggacuacagcgugcuguacaacuccgccagcuucuccacguucaagugcuacggcgucagccccaccaagcucaacgaccugugcuucaccaacguguacgccgacuccuucgugauccgcggggacgagguccggcagaucgcccccggccagaccgggaagaucgccgacuacaacuacaagcugccggacgacuucacgggcugcgugaucgcguggaacagcaacaaccucgacuccaaggucgggggcaacuacaacuaccuguaccgccuguuccgcaagagcaaccucaagcccuucgagcgggacaucuccaccgagaucuaccaggccggcagcacccccugcaacgggguggagggcuucaacugcuacuucccccugcaguccuacggguuccagccgaccaacggcgugggguaccagcccuaccggguggucgugcugagcuucgagcuccugcacgcccccgccacggugugcggccccaagaaguccaccaaccuggucaagaacaagugcgugaacuucaacuucaacggccucaccgggaccggcgugcugaccgagagcaacaagaaguuccugccguuccagcaguucgggcgcgacaucgccgacacgaccgacgcgguccgcgacccccagacccuggagauccucgacaucacccccugcagcuucggcgggguguccgugaucacgccgggcaccaacaccagcaaccaggucgccgugcuguaccaggacgugaacugcaccgagguccccguggccauccacgccgaccagcugacgcccaccuggcggguguacuccaccggcagcaacgucuuccagacccgcgccgggugccucaucggcgcggagcacgugaacaacuccuacgagugcgacauccccaucggggccggcaucugcgccagcuaccagacgcagaccaacuccccgcggcgcgcccggagcguggcgucccagagcaucaucgccuacaccaugucccugggcgccgagaacagcgucgccuacuccaacaacagcaucgccauccccaccaacuucacgaucuccgugaccaccgagauccugcccgugagcaugaccaagacgagcgucgacugcaccauguacaucugcggggacuccaccgagugcagcaaccuccugcugcaguacggcuccuucugcacccagcucaaccgcgcgcugacggggaucgccguggagcaggacaagaacacccaggagguguucgcccaggucaagcagaucuacaagacgcccccgaucaaggacuucggcggguucaacuucagccagauccugcccgaccccuccaagcccagcaagcgguccuucaucgaggaccuccuguucaacaaggugacccuggccgacgccggcuucaucaagcaguacggcgacugccucggggacaucgcggcccgcgaccugaucugcgcccagaaguucaacggccugaccgugcucccgccccugcugaccgacgagaugaucgcccaguacaccagcgcccuccuggcggggaccaucacguccggcuggaccuucggggccggcgccgcccugcagauccccuucgcgaugcagauggccuaccgguucaacggcugcggggucacccagaacgugcucuacgagaaccagaagcugaucgccaaccaguucaacagcgccaucggcaagauccaggacucccugagcuccaccgccagcgcgcucgggaagcugcaggacguggucaaccagaacgcccaggcccugaacacgcucgugaagcagcuguccagcaacuucggcgccaucuccagcgugcugaacgacauccucucccgccuggacaaggucgaggccgaggugcagaucgaccggcugaucaccgggcgccuccagagccugcagaccuacgugacccagcagcugauccgggcggccgagauccgcgccagcgccaaccucgccgcgaccaagauguccgagugcguccugggccagagcaagcggguggacuucugcggcaaggggugccaccugauguccuucccccagagcgccccgcacggcguggucuuccuccacgugacguacguccccgcccaggagaagaacuucaccaccgcccccgcgaucugccacgacgggaaggcccacuucccccgcgagggcguguucguguccaacgggacccacugguucgucacgcagcggaacuucuacgagccgcagaucaucaccaccgacaacaccuucgugagcggcaacugcgacguggucaucggcaucgugaacaacacgguguacgacccccugcagcccgagcuggacuccuucaaggaggagcucgacaaguacuucaagaaccacaccagccccgacgucgaccugggggacaucuccggcaucaacgccagcguggugaacauccagaaggagaucgaccgccugaacgaggucgccaagaaccucaacgagucccugaucgaccugcaggagcucgggaaguacgagcaguacaucaaguggccgugguacaucuggcugggcuucaucgccggccugaucgcgaucgugauggugaccaucaugcucugcugcaugaccagcugcugcuccugccugaaggggugcugcagcugcggcuccugcugcaaguucgacgaggacgacagcgagcccguccugaagggggugaagcuccacuacacguga

SEQ ID NO: 11807 - RNA, 3822 nt, Artificial Sequence
  SARS-CoV-2/Wuhan/WIV05/2019__EPI_ISL_402128 spike protein CDS gc (1-1273)(Q965C_S1003C)
auguucguguuccugguccuccugccccuggugagcucccagugcgugaaccucaccacccgcacgcagcugccgcccgccuacaccaacagcuucacccggggcgucuacuaccccgacaagguguuccgcuccagcgugcugcacuccacccaggaccucuuccugcccuucuucagcaacgucacgugguuccacgccauccacguguccgggaccaacggcaccaagcgguucgacaacccggugcugcccuucaacgacggggucuacuucgcgagcaccgagaaguccaacaucauccgcggcuggaucuucgggacgacccucgacagcaagacccagucccugcugaucgugaacaacgccaccaacguggucaucaaggugugcgaguuccaguucugcaacgaccccuuccucggcguguacuaccacaagaacaacaagagcuggauggaguccgaguuccgggucuacagcuccgccaacaacugcacguucgaguacgugagccagcccuuccugauggaccuggagggcaagcaggggaacuucaagaaccuccgcgaguucguguucaagaacaucgacggcuacuucaagaucuacuccaagcacaccccgaucaaccugguccgggaccugccccagggguucagcgcccucgagccccugguggaccugcccaucggcaucaacaucacccgcuuccagacccuccuggcccugcaccgguccuaccucacgccgggggacagcagcuccggcuggaccgcgggcgccgccgccuacuacgugggguaccugcagccccgcaccuuccugcucaaguacaacgagaacggcaccaucacggacgcggucgacugcgcccuggacccccugagcgagaccaagugcacccucaaguccuucaccguggagaaggggaucuaccagacgagcaacuuccgggugcagcccaccgaguccaucguccgcuucccgaacaucaccaaccugugccccuucggcgagguguucaacgccacccgguucgccagcgucuacgccuggaaccgcaagcggaucuccaacugcguggcggacuacagcgugcuguacaacuccgccagcuucuccacguucaagugcuacggcgucagccccaccaagcucaacgaccugugcuucaccaacguguacgccgacuccuucgugauccgcggggacgagguccggcagaucgcccccggccagaccgggaagaucgccgacuacaacuacaagcugccggacgacuucacgggcugcgugaucgcguggaacagcaacaaccucgacuccaaggucgggggcaacuacaacuaccuguaccgccuguuccgcaagagcaaccucaagcccuucgagcgggacaucuccaccgagaucuaccaggccggcagcacccccugcaacgggguggagggcuucaacugcuacuucccccugcaguccuacggguuccagccgaccaacggcgugggguaccagcccuaccggguggucgugcugagcuucgagcuccugcacgcccccgccacggugugcggccccaagaaguccaccaaccuggucaagaacaagugcgugaacuucaacuucaacggccucaccgggaccggcgugcugaccgagagcaacaagaaguuccugccguuccagcaguucgggcgcgacaucgccgacacgaccgacgcgguccgcgacccccagacccuggagauccucgacaucacccccugcagcuucggcgggguguccgugaucacgccgggcaccaacaccagcaaccaggucgccgugcuguaccaggacgugaacugcaccgagguccccguggccauccacgccgaccagcugacgcccaccuggcggguguacuccaccggcagcaacgucuuccagacccgcgccgggugccucaucggcgcggagcacgugaacaacuccuacgagugcgacauccccaucggggccggcaucugcgccagcuaccagacgcagaccaacuccccgcggcgcgcccggagcguggcgucccagagcaucaucgccuacaccaugucccugggcgccgagaacagcgucgccuacuccaacaacagcaucgccauccccaccaacuucacgaucuccgugaccaccgagauccugcccgugagcaugaccaagacgagcgucgacugcaccauguacaucugcggggacuccaccgagugcagcaaccuccugcugcaguacggcuccuucugcacccagcucaaccgcgcgcugacggggaucgccguggagcaggacaagaacacccaggagguguucgcccaggucaagcagaucuacaagacgcccccgaucaaggacuucggcggguucaacuucagccagauccugcccgaccccuccaagcccagcaagcgguccuucaucgaggaccuccuguucaacaaggugacccuggccgacgccggcuucaucaagcaguacggcgacugccucggggacaucgcggcccgcgaccugaucugcgcccagaaguucaacggccugaccgugcucccgccccugcugaccgacgagaugaucgcccaguacaccagcgcccuccuggcggggaccaucacguccggcuggaccuucggggccggcgccgcccugcagauccccuucgcgaugcagauggccuaccgguucaacggcaucggggucacccagaacgugcucuacgagaaccagaagcugaucgccaaccaguucaacagcgccaucggcaagauccaggacucccugagcuccaccgccagcgcgcucgggaagcugcaggacguggucaaccagaacgcccaggcccugaacacgcucgugaagugccuguccagcaacuucggcgccaucuccagcgugcugaacgacauccucucccgccuggacaaggucgaggccgaggugcagaucgaccggcugaucaccgggcgccuccagugccugcagaccuacgugacccagcagcugauccgggcggccgagauccgcgccagcgccaaccucgccgcgaccaagauguccgagugcguccugggccagagcaagcggguggacuucugcggcaagggguaccaccugauguccuucccccagagcgccccgcacggcguggucuuccuccacgugacguacguccccgcccaggagaagaacuucaccaccgcccccgcgaucugccacgacgggaaggcccacuucccccgcgagggcguguucguguccaacgggacccacugguucgucacgcagcggaacuucuacgagccgcagaucaucaccaccgacaacaccuucgugagcggcaacugcgacguggucaucggcaucgugaacaacacgguguacgacccccugcagcccgagcuggacuccuucaaggaggagcucgacaaguacuucaagaaccacaccagccccgacgucgaccugggggacaucuccggcaucaacgccagcguggugaacauccagaaggagaucgaccgccugaacgaggucgccaagaaccucaacgagucccugaucgaccugcaggagcucgggaaguacgagcaguacaucaaguggccgugguacaucuggcugggcuucaucgccggccugaucgcgaucgugauggugaccaucaugcucugcugcaugaccagcugcugcuccugccugaaggggugcugcagcugcggcuccugcugcaaguucgacgaggacgacagcgagcccguccugaagggggugaagcuccacuacacguga

SEQ ID NO: 11808 - RNA, 3822 nt, Artificial Sequence
  SARS-CoV-2/Wuhan/WIV05/2019__EPI_ISL_402128 spike protein CDS gc (1-1273)(F970C_G999C)
auguucguguuccugguccuccugccccuggugagcucccagugcgugaaccucaccacccgcacgcagcugccgcccgccuacaccaacagcuucacccggggcgucuacuaccccgacaagguguuccgcuccagcgugcugcacuccacccaggaccucuuccugcccuucuucagcaacgucacgugguuccacgccauccacguguccgggaccaacggcaccaagcgguucgacaacccggugcugcccuucaacgacggggucuacuucgcgagcaccgagaaguccaacaucauccgcggcuggaucuucgggacgacccucgacagcaagacccagucccugcugaucgugaacaacgccaccaacguggucaucaaggugugcgaguuccaguucugcaacgaccccuuccucggcguguacuaccacaagaacaacaagagcuggauggaguccgaguuccgggucuacagcuccgccaacaacugcacguucgaguacgugagccagcccuuccugauggaccuggagggcaagcaggggaacuucaagaaccuccgcgaguucguguucaagaacaucgacggcuacuucaagaucuacuccaagcacaccccgaucaaccugguccgggaccugccccagggguucagcgcccucgagccccugguggaccugcccaucggcaucaacaucacccgcuuccagacccuccuggcccugcaccgguccuaccucacgccgggggacagcagcuccggcuggaccgcgggcgccgccgccuacuacgugggguaccugcagccccgcaccuuccugcucaaguacaacgagaacggcaccaucacggacgcggucgacugcgcccuggacccccugagcgagaccaagugcacccucaaguccuucaccguggagaaggggaucuaccagacgagcaacuuccgggugcagcccaccgaguccaucguccgcuucccgaacaucaccaaccugugccccuucggcgagguguucaacgccacccgguucgccagcgucuacgccuggaaccgcaagcggaucuccaacugcguggcggacuacagcgugcuguacaacuccgccagcuucuccacguucaagugcuacggcgucagccccaccaagcucaacgaccugugcuucaccaacguguacgccgacuccuucgugauccgcggggacgagguccggcagaucgcccccggccagaccgggaagaucgccgacuacaacuacaagcugccggacgacuucacgggcugcgugaucgcguggaacagcaacaaccucgacuccaaggucgggggcaacuacaacuaccuguaccgccuguuccgcaagagcaaccucaagcccuucgagcgggacaucuccaccgagaucuaccaggccggcagcacccccugcaacgggguggagggcuucaacugcuacuucccccugcaguccuacggguuccagccgaccaacggcgugggguaccagcccuaccggguggucgugcugagcuucgagcuccugcacgcccccgccacggugugcggccccaagaaguccaccaaccuggucaagaacaagugcgugaacuucaacuucaacggccucaccgggaccggcgugcugaccgagagcaacaagaaguuccugccguuccagcaguucgggcgcgacaucgccgacacgaccgacgcgguccgcgacccccagacccuggagauccucgacaucacccccugcagcuucggcgggguguccgugaucacgccgggcaccaacaccagcaaccaggucgccgugcuguaccaggacgugaacugcaccgagguccccguggccauccacgccgaccagcugacgcccaccuggcggguguacuccaccggcagcaacgucuuccagacccgcgccgggugccucaucggcgcggagcacgugaacaacuccuacgagugcgacauccccaucggggccggcaucugcgccagcuaccagacgcagaccaacuccccgcggcgcgcccggagcguggcgucccagagcaucaucgccuacaccaugucccugggcgccgagaacagcgucgccuacuccaacaacagcaucgccauccccaccaacuucacgaucuccgugaccaccgagauccugcccgugagcaugaccaagacgagcgucgacugcaccauguacaucugcggggacuccaccgagugcagcaaccuccugcugcaguacggcuccuucugcacccagcucaaccgcgcgcugacggggaucgccguggagcaggacaagaacacccaggagguguucgcccaggucaagcagaucuacaagacgcccccgaucaaggacuucggcggguucaacuucagccagauccugcccgaccccuccaagcccagcaagcgguccuucaucgaggaccuccuguucaacaaggugacccuggccgacgccggcuucaucaagcaguacggcgacugccucggggacaucgcggcccgcgaccugaucugcgcccagaaguucaacggccugaccgugcucccgccccugcugaccgacgagaugaucgcccaguacaccagcgcccuccuggcggggaccaucacguccggcuggaccuucggggccggcgccgcccugcagauccccuucgcgaugcagauggccuaccgguucaacggcaucggggucacccagaacgugcucuacgagaaccagaagcugaucgccaaccaguucaacagcgccaucggcaagauccaggacucccugagcuccaccgccagcgcgcucgggaagcugcaggacguggucaaccagaacgcccaggcccugaacacgcucgugaagcagcuguccagcaacugcggcgccaucuccagcgugcugaacgacauccucucccgccuggacaaggucgaggccgaggugcagaucgaccggcugaucaccugucgccuccagagccugcagaccuacgugacccagcagcugauccgggcggccgagauccgcgccagcgccaaccucgccgcgaccaagauguccgagugcguccugggccagagcaagcggguggacuucugcggcaagggguaccaccugauguccuucccccagagcgccccgcacggcguggucuuccuccacgugacguacguccccgcccaggagaagaacuucaccaccgcccccgcgaucugccacgacgggaaggcccacuucccccgcgagggcguguucguguccaacgggacccacugguucgucacgcagcggaacuucuacgagccgcagaucaucaccaccgacaacaccuucgugagcggcaacugcgacguggucaucggcaucgugaacaacacgguguacgacccccugcagcccgagcuggacuccuucaaggaggagcucgacaaguacuucaagaaccacaccagccccgacgucgaccugggggacaucuccggcaucaacgccagcguggugaacauccagaaggagaucgaccgccugaacgaggucgccaagaaccucaacgagucccugaucgaccugcaggagcucgggaaguacgagcaguacaucaaguggccgugguacaucuggcugggcuucaucgccggccugaucgcgaucgugauggugaccaucaugcucugcugcaugaccagcugcugcuccugccugaaggggugcugcagcugcggcuccugcugcaaguucgacgaggacgacagcgagcccguccugaagggggugaagcuccacuacacguga

SEQ ID NO: 11809 - RNA, 3822 nt, Artificial Sequence
  SARS-CoV-2/Wuhan/WIV05/2019__EPI_ISL_402128 spike protein CDS gc (1-1273)(A972C_R995C)
auguucguguuccugguccuccugccccuggugagcucccagugcgugaaccucaccacccgcacgcagcugccgcccgccuacaccaacagcuucacccggggcgucuacuaccccgacaagguguuccgcuccagcgugcugcacuccacccaggaccucuuccugcccuucuucagcaacgucacgugguuccacgccauccacguguccgggaccaacggcaccaagcgguucgacaacccggugcugcccuucaacgacggggucuacuucgcgagcaccgagaaguccaacaucauccgcggcuggaucuucgggacgacccucgacagcaagacccagucccugcugaucgugaacaacgccaccaacguggucaucaaggugugcgaguuccaguucugcaacgaccccuuccucggcguguacuaccacaagaacaacaagagcuggauggaguccgaguuccgggucuacagcuccgccaacaacugcacguucgaguacgugagccagcccuuccugauggaccuggagggcaagcaggggaacuucaagaaccuccgcgaguucguguucaagaacaucgacggcuacuucaagaucuacuccaagcacaccccgaucaaccugguccgggaccugccccagggguucagcgcccucgagccccugguggaccugcccaucggcaucaacaucacccgcuuccagacccuccuggcccugcaccgguccuaccucacgccgggggacagcagcuccggcuggaccgcgggcgccgccgccuacuacgugggguaccugcagccccgcaccuuccugcucaaguacaacgagaacggcaccaucacggacgcggucgacugcgcccuggacccccugagcgagaccaagugcacccucaaguccuucaccguggagaaggggaucuaccagacgagcaacuuccgggugcagcccaccgaguccaucguccgcuucccgaacaucaccaaccugugccccuucggcgagguguucaacgccacccgguucgccagcgucuacgccuggaaccgcaagcggaucuccaacugcguggcggacuacagcgugcuguacaacuccgccagcuucuccacguucaagugcuacggcgucagccccaccaagcucaacgaccugugcuucaccaacguguacgccgacuccuucgugauccgcggggacgagguccggcagaucgcccccggccagaccgggaagaucgccgacuacaacuacaagcugccggacgacuucacgggcugcgugaucgcguggaacagcaacaaccucgacuccaaggucgggggcaacuacaacuaccuguaccgccuguuccgcaagagcaaccucaagcccuucgagcgggacaucuccaccgagaucuaccaggccggcagcacccccugcaacgggguggagggcuucaacugcuacuucccccugcaguccuacggguuccagccgaccaacggcgugggguaccagcccuaccggguggucgugcugagcuucgagcuccugcacgcccccgccacggugugcggccccaagaaguccaccaaccuggucaagaacaagugcgugaacuucaacuucaacggccucaccgggaccggcgugcugaccgagagcaacaagaaguuccugccguuccagcaguucgggcgcgacaucgccgacacgaccgacgcgguccgcgacccccagacccuggagauccucgacaucacccccugcagcuucggcgggguguccgugaucacgccgggcaccaacaccagcaaccaggucgccgugcuguaccaggacgugaacugcaccgagguccccguggccauccacgccgaccagcugacgcccaccuggcggguguacuccaccggcagcaacgucuuccagacccgcgccgggugccucaucggcgcggagcacgugaacaacuccuacgagugcgacauccccaucggggccggcaucugcgccagcuaccagacgcagaccaacuccccgcggcgcgcccggagcguggcgucccagagcaucaucgccuacaccaugucccugggcgccgagaacagcgucgccuacuccaacaacagcaucgccauccccaccaacuucacgaucuccgugaccaccgagauccugcccgugagcaugaccaagacgagcgucgacugcaccauguacaucugcggggacuccaccgagugcagcaaccuccugcugcaguacggcuccuucugcacccagcucaaccgcgcgcugacggggaucgccguggagcaggacaagaacacccaggagguguucgcccaggucaagcagaucuacaagacgcccccgaucaaggacuucggcggguucaacuucagccagauccugcccgaccccuccaagcccagcaagcgguccuucaucgaggaccuccuguucaacaaggugacccuggccgacgccggcuucaucaagcaguacggcgacugccucggggacaucgcggcccgcgaccugaucugcgcccagaaguucaacggccugaccgugcucccgccccugcugaccgacgagaugaucgcccaguacaccagcgcccuccuggcggggaccaucacguccggcuggaccuucggggccggcgccgcccugcagauccccuucgcgaugcagauggccuaccgguucaacggcaucggggucacccagaacgugcucuacgagaaccagaagcugaucgccaaccaguucaacagcgccaucggcaagauccaggacucccugagcuccaccgccagcgcgcucgggaagcugcaggacguggucaaccagaacgcccaggcccugaacacgcucgugaagcagcuguccagcaacuucggcugcaucuccagcgugcugaacgacauccucucccgccuggacaaggucgaggccgaggugcagaucgacugccugaucaccgggcgccuccagagccugcagaccuacgugacccagcagcugauccgggcggccgagauccgcgccagcgccaaccucgccgcgaccaagauguccgagugcguccugggccagagcaagcggguggacuucugcggcaagggguaccaccugauguccuucccccagagcgccccgcacggcguggucuuccuccacgugacguacguccccgcccaggagaagaacuucaccaccgcccccgcgaucugccacgacgggaaggcccacuucccccgcgagggcguguucguguccaacgggacccacugguucgucacgcagcggaacuucuacgagccgcagaucaucaccaccgacaacaccuucgugagcggcaacugcgacguggucaucggcaucgugaacaacacgguguacgacccccugcagcccgagcuggacuccuucaaggaggagcucgacaaguacuucaagaaccacaccagccccgacgucgaccugggggacaucuccggcaucaacgccagcguggugaacauccagaaggagaucgaccgccugaacgaggucgccaagaaccucaacgagucccugaucgaccugcaggagcucgggaaguacgagcaguacaucaaguggccgugguacaucuggcugggcuucaucgccggccugaucgcgaucgugauggugaccaucaugcucugcugcaugaccagcugcugcuccugccugaaggggugcugcagcugcggcuccugcugcaaguucgacgaggacgacagcgagcccguccugaagggggugaagcuccacuacacguga

SEQ ID NO: 11810 - RNA, 3822 nt, Artificial Sequence
  SARS-CoV-2/Wuhan/WIV05/2019__EPI_ISL_402128 spike protein CDS gc (1-1273)(A890C_V1040C)
auguucguguuccugguccuccugccccuggugagcucccagugcgugaaccucaccacccgcacgcagcugccgcccgccuacaccaacagcuucacccggggcgucuacuaccccgacaagguguuccgcuccagcgugcugcacuccacccaggaccucuuccugcccuucuucagcaacgucacgugguuccacgccauccacguguccgggaccaacggcaccaagcgguucgacaacccggugcugcccuucaacgacggggucuacuucgcgagcaccgagaaguccaacaucauccgcggcuggaucuucgggacgacccucgacagcaagacccagucccugcugaucgugaacaacgccaccaacguggucaucaaggugugcgaguuccaguucugcaacgaccccuuccucggcguguacuaccacaagaacaacaagagcuggauggaguccgaguuccgggucuacagcuccgccaacaacugcacguucgaguacgugagccagcccuuccugauggaccuggagggcaagcaggggaacuucaagaaccuccgcgaguucguguucaagaacaucgacggcuacuucaagaucuacuccaagcacaccccgaucaaccugguccgggaccugccccagggguucagcgcccucgagccccugguggaccugcccaucggcaucaacaucacccgcuuccagacccuccuggcccugcaccgguccuaccucacgccgggggacagcagcuccggcuggaccgcgggcgccgccgccuacuacgugggguaccugcagccccgcaccuuccugcucaaguacaacgagaacggcaccaucacggacgcggucgacugcgcccuggacccccugagcgagaccaagugcacccucaaguccuucaccguggagaaggggaucuaccagacgagcaacuuccgggugcagcccaccgaguccaucguccgcuucccgaacaucaccaaccugugccccuucggcgagguguucaacgccacccgguucgccagcgucuacgccuggaaccgcaagcggaucuccaacugcguggcggacuacagcgugcuguacaacuccgccagcuucuccacguucaagugcuacggcgucagccccaccaagcucaacgaccugugcuucaccaacguguacgccgacuccuucgugauccgcggggacgagguccggcagaucgcccccggccagaccgggaagaucgccgacuacaacuacaagcugccggacgacuucacgggcugcgugaucgcguggaacagcaacaaccucgacuccaaggucgggggcaacuacaacuaccuguaccgccuguuccgcaagagcaaccucaagcccuucgagcgggacaucuccaccgagaucuaccaggccggcagcacccccugcaacgggguggagggcuucaacugcuacuucccccugcaguccuacggguuccagccgaccaacggcgugggguaccagcccuaccggguggucgugcugagcuucgagcuccugcacgcccccgccacggugugcggccccaagaaguccaccaaccuggucaagaacaagugcgugaacuucaacuucaacggccucaccgggaccggcgugcugaccgagagcaacaagaaguuccugccguuccagcaguucgggcgcgacaucgccgacacgaccgacgcgguccgcgacccccagacccuggagauccucgacaucacccccugcagcuucggcgggguguccgugaucacgccgggcaccaacaccagcaaccaggucgccgugcuguaccaggacgugaacugcaccgagguccccguggccauccacgccgaccagcugacgcccaccuggcggguguacuccaccggcagcaacgucuuccagacccgcgccgggugccucaucggcgcggagcacgugaacaacuccuacgagugcgacauccccaucggggccggcaucugcgccagcuaccagacgcagaccaacuccccgcggcgcgcccggagcguggcgucccagagcaucaucgccuacaccaugucccugggcgccgagaacagcgucgccuacuccaacaacagcaucgccauccccaccaacuucacgaucuccgugaccaccgagauccugcccgugagcaugaccaagacgagcgucgacugcaccauguacaucugcggggacuccaccgagugcagcaaccuccugcugcaguacggcuccuucugcacccagcucaaccgcgcgcugacggggaucgccguggagcaggacaagaacacccaggagguguucgcccaggucaagcagaucuacaagacgcccccgaucaaggacuucggcggguucaacuucagccagauccugcccgaccccuccaagcccagcaagcgguccuucaucgaggaccuccuguucaacaaggugacccuggccgacgccggcuucaucaagcaguacggcgacugccucggggacaucgcggcccgcgaccugaucugcgcccagaaguucaacggccugaccgugcucccgccccugcugaccgacgagaugaucgcccaguacaccagcgcccuccuggcggggaccaucacguccggcuggaccuucgggugcggcgccgcccugcagauccccuucgcgaugcagauggccuaccgguucaacggcaucggggucacccagaacgugcucuacgagaaccagaagcugaucgccaaccaguucaacagcgccaucggcaagauccaggacucccugagcuccaccgccagcgcgcucgggaagcugcaggacguggucaaccagaacgcccaggcccugaacacgcucgugaagcagcuguccagcaacuucggcgccaucuccagcgugcugaacgacauccucucccgccuggacaaggucgaggccgaggugcagaucgaccggcugaucaccgggcgccuccagagccugcagaccuacgugacccagcagcugauccgggcggccgagauccgcgccagcgccaaccucgccgcgaccaagauguccgagugcguccugggccagagcaagcggugcgacuucugcggcaagggguaccaccugauguccuucccccagagcgccccgcacggcguggucuuccuccacgugacguacguccccgcccaggagaagaacuucaccaccgcccccgcgaucugccacgacgggaaggcccacuucccccgcgagggcguguucguguccaacgggacccacugguucgucacgcagcggaacuucuacgagccgcagaucaucaccaccgacaacaccuucgugagcggcaacugcgacguggucaucggcaucgugaacaacacgguguacgacccccugcagcccgagcuggacuccuucaaggaggagcucgacaaguacuucaagaaccacaccagccccgacgucgaccugggggacaucuccggcaucaacgccagcguggugaacauccagaaggagaucgaccgccugaacgaggucgccaagaaccucaacgagucccugaucgaccugcaggagcucgggaaguacgagcaguacaucaaguggccgugguacaucuggcugggcuucaucgccggccugaucgcgaucgugauggugaccaucaugcucugcugcaugaccagcugcugcuccugccugaaggggugcugcagcugcggcuccugcugcaaguucgacgaggacgacagcgagcccguccugaagggggugaagcuccacuacacguga

SEQ ID NO: 11811 - RNA, 3822 nt, Artificial Sequence
  SARS-CoV-2/Wuhan/WIV05/2019__EPI_ISL_402128 spike protein CDS gc (1-1273)(T874C_S1055C)
auguucguguuccugguccuccugccccuggugagcucccagugcgugaaccucaccacccgcacgcagcugccgcccgccuacaccaacagcuucacccggggcgucuacuaccccgacaagguguuccgcuccagcgugcugcacuccacccaggaccucuuccugcccuucuucagcaacgucacgugguuccacgccauccacguguccgggaccaacggcaccaagcgguucgacaacccggugcugcccuucaacgacggggucuacuucgcgagcaccgagaaguccaacaucauccgcggcuggaucuucgggacgacccucgacagcaagacccagucccugcugaucgugaacaacgccaccaacguggucaucaaggugugcgaguuccaguucugcaacgaccccuuccucggcguguacuaccacaagaacaacaagagcuggauggaguccgaguuccgggucuacagcuccgccaacaacugcacguucgaguacgugagccagcccuuccugauggaccuggagggcaagcaggggaacuucaagaaccuccgcgaguucguguucaagaacaucgacggcuacuucaagaucuacuccaagcacaccccgaucaaccugguccgggaccugccccagggguucagcgcccucgagccccugguggaccugcccaucggcaucaacaucacccgcuuccagacccuccuggcccugcaccgguccuaccucacgccgggggacagcagcuccggcuggaccgcgggcgccgccgccuacuacgugggguaccugcagccccgcaccuuccugcucaaguacaacgagaacggcaccaucacggacgcggucgacugcgcccuggacccccugagcgagaccaagugcacccucaaguccuucaccguggagaaggggaucuaccagacgagcaacuuccgggugcagcccaccgaguccaucguccgcuucccgaacaucaccaaccugugccccuucggcgagguguucaacgccacccgguucgccagcgucuacgccuggaaccgcaagcggaucuccaacugcguggcggacuacagcgugcuguacaacuccgccagcuucuccacguucaagugcuacggcgucagccccaccaagcucaacgaccugugcuucaccaacguguacgccgacuccuucgugauccgcggggacgagguccggcagaucgcccccggccagaccgggaagaucgccgacuacaacuacaagcugccggacgacuucacgggcugcgugaucgcguggaacagcaacaaccucgacuccaaggucgggggcaacuacaacuaccuguaccgccuguuccgcaagagcaaccucaagcccuucgagcgggacaucuccaccgagaucuaccaggccggcagcacccccugcaacgggguggagggcuucaacugcuacuucccccugcaguccuacggguuccagccgaccaacggcgugggguaccagcccuaccggguggucgugcugagcuucgagcuccugcacgcccccgccacggugugcggccccaagaaguccaccaaccuggucaagaacaagugcgugaacuucaacuucaacggccucaccgggaccggcgugcugaccgagagcaacaagaaguuccugccguuccagcaguucgggcgcgacaucgccgacacgaccgacgcgguccgcgacccccagacccuggagauccucgacaucacccccugcagcuucggcgggguguccgugaucacgccgggcaccaacaccagcaaccaggucgccgugcuguaccaggacgugaacugcaccgagguccccguggccauccacgccgaccagcugacgcccaccuggcggguguacuccaccggcagcaacgucuuccagacccgcgccgggugccucaucggcgcggagcacgugaacaacuccuacgagugcgacauccccaucggggccggcaucugcgccagcuaccagacgcagaccaacuccccgcggcgcgcccggagcguggcgucccagagcaucaucgccuacaccaugucccugggcgccgagaacagcgucgccuacuccaacaacagcaucgccauccccaccaacuucacgaucuccgugaccaccgagauccugcccgugagcaugaccaagacgagcgucgacugcaccauguacaucugcggggacuccaccgagugcagcaaccuccugcugcaguacggcuccuucugcacccagcucaaccgcgcgcugacggggaucgccguggagcaggacaagaacacccaggagguguucgcccaggucaagcagaucuacaagacgcccccgaucaaggacuucggcggguucaacuucagccagauccugcccgaccccuccaagcccagcaagcgguccuucaucgaggaccuccuguucaacaaggugacccuggccgacgccggcuucaucaagcaguacggcgacugccucggggacaucgcggcccgcgaccugaucugcgcccagaaguucaacggccugaccgugcucccgccccugcugaccgacgagaugaucgcccaguacugcagcgcccuccuggcggggaccaucacguccggcuggaccuucggggccggcgccgcccugcagauccccuucgcgaugcagauggccuaccgguucaacggcaucggggucacccagaacgugcucuacgagaaccagaagcugaucgccaaccaguucaacagcgccaucggcaagauccaggacucccugagcuccaccgccagcgcgcucgggaagcugcaggacguggucaaccagaacgcccaggcccugaacacgcucgugaagcagcuguccagcaacuucggcgccaucuccagcgugcugaacgacauccucucccgccuggacaaggucgaggccgaggugcagaucgaccggcugaucaccgggcgccuccagagccugcagaccuacgugacccagcagcugauccgggcggccgagauccgcgccagcgccaaccucgccgcgaccaagauguccgagugcguccugggccagagcaagcggguggacuucugcggcaagggguaccaccugauguccuucccccagugcgccccgcacggcguggucuuccuccacgugacguacguccccgcccaggagaagaacuucaccaccgcccccgcgaucugccacgacgggaaggcccacuucccccgcgagggcguguucguguccaacgggacccacugguucgucacgcagcggaacuucuacgagccgcagaucaucaccaccgacaacaccuucgugagcggcaacugcgacguggucaucggcaucgugaacaacacgguguacgacccccugcagcccgagcuggacuccuucaaggaggagcucgacaaguacuucaagaaccacaccagccccgacgucgaccugggggacaucuccggcaucaacgccagcguggugaacauccagaaggagaucgaccgccugaacgaggucgccaagaaccucaacgagucccugaucgaccugcaggagcucgggaaguacgagcaguacaucaaguggccgugguacaucuggcugggcuucaucgccggccugaucgcgaucgugauggugaccaucaugcucugcugcaugaccagcugcugcuccugccugaaggggugcugcagcugcggcuccugcugcaaguucgacgaggacgacagcgagcccguccugaagggggugaagcuccacuacacguga

SEQ ID NO: 11812 - RNA, 2046 nt, Artificial Sequence; identical to SEQ ID NO: 138
  SARS-CoV-2/Wuhan/WIV05/2019__EPI_ISL_402128 spike protein CDS gc (1-681)

SEQ ID NO: 11813 - RNA, 1776 nt, Artificial Sequence; identical to SEQ ID NO: 141
  SARS-CoV-2/Wuhan/WIV05/2019__EPI_ISL_402128 spike protein CDS gc (682-1273)

SEQ ID NO: 11814 - RNA, 45 nt, Artificial Sequence; identical to SEQ ID NO: 139
  SARS-CoV-2/Wuhan/WIV05/2019__EPI_ISL_402128 spike protein CDS gc (1-15)

SEQ ID NO: 11815 - RNA, 1998 nt, Artificial Sequence; identical to SEQ ID NO: 140
  SARS-CoV-2/Wuhan/WIV05/2019__EPI_ISL_402128 spike protein CDS gc (16-681)

SEQ ID NO: 11816 - RNA, 189 nt, Artificial Sequence
  SARS-CoV-2/Wuhan/WIV05/2019__EPI_ISL_402128 spike protein CDS gc (1212-1273)
uggccgugguacaucuggcugggcuucaucgccggccugaucgcgaucgugauggugaccaucaugcucugcugcaugaccagcugcugcuccugccugaaggggugcugcagcugcggcuccugcugcaaguucgacgaggacgacagcgagcccguccugaagggggugaagcuccacuacacguga

SEQ ID NO: 11817 - RNA, 3633 nt, Artificial Sequence
  SARS-CoV-2/Wuhan/WIV05/2019__EPI_ISL_402128 spike protein CDS gc (1-1211)
auguucguguuccugguccuccugccccuggugagcucccagugcgugaaccucaccacccgcacgcagcugccgcccgccuacaccaacagcuucacccggggcgucuacuaccccgacaagguguuccgcuccagcgugcugcacuccacccaggaccucuuccugcccuucuucagcaacgucacgugguuccacgccauccacguguccgggaccaacggcaccaagcgguucgacaacccggugcugcccuucaacgacggggucuacuucgcgagcaccgagaaguccaacaucauccgcggcuggaucuucgggacgacccucgacagcaagacccagucccugcugaucgugaacaacgccaccaacguggucaucaaggugugcgaguuccaguucugcaacgaccccuuccucggcguguacuaccacaagaacaacaagagcuggauggaguccgaguuccgggucuacagcuccgccaacaacugcacguucgaguacgugagccagcccuuccugauggaccuggagggcaagcaggggaacuucaagaaccuccgcgaguucguguucaagaacaucgacggcuacuucaagaucuacuccaagcacaccccgaucaaccugguccgggaccugccccagggguucagcgcccucgagccccugguggaccugcccaucggcaucaacaucacccgcuuccagacccuccuggcccugcaccgguccuaccucacgccgggggacagcagcuccggcuggaccgcgggcgccgccgccuacuacgugggguaccugcagccccgcaccuuccugcucaaguacaacgagaacggcaccaucacggacgcggucgacugcgcccuggacccccugagcgagaccaagugcacccucaaguccuucaccguggagaaggggaucuaccagacgagcaacuuccgggugcagcccaccgaguccaucguccgcuucccgaacaucaccaaccugugccccuucggcgagguguucaacgccacccgguucgccagcgucuacgccuggaaccgcaagcggaucuccaacugcguggcggacuacagcgugcuguacaacuccgccagcuucuccacguucaagugcuacggcgucagccccaccaagcucaacgaccugugcuucaccaacguguacgccgacuccuucgugauccgcggggacgagguccggcagaucgcccccggccagaccgggaagaucgccgacuacaacuacaagcugccggacgacuucacgggcugcgugaucgcguggaacagcaacaaccucgacuccaaggucgggggcaacuacaacuaccuguaccgccuguuccgcaagagcaaccucaagcccuucgagcgggacaucuccaccgagaucuaccaggccggcagcacccccugcaacgggguggagggcuucaacugcuacuucccccugcaguccuacggguuccagccgaccaacggcgugggguaccagcccuaccggguggucgugcugagcuucgagcuccugcacgcccccgccacggugugcggccccaagaaguccaccaaccuggucaagaacaagugcgugaacuucaacuucaacggccucaccgggaccggcgugcugaccgagagcaacaagaaguuccugccguuccagcaguucgggcgcgacaucgccgacacgaccgacgcgguccgcgacccccagacccuggagauccucgacaucacccccugcagcuucggcgggguguccgugaucacgccgggcaccaacaccagcaaccaggucgccgugcuguaccaggacgugaacugcaccgagguccccguggccauccacgccgaccagcugacgcccaccuggcggguguacuccaccggcagcaacgucuuccagacccgcgccgggugccucaucggcgcggagcacgugaacaacuccuacgagugcgacauccccaucggggccggcaucugcgccagcuaccagacgcagaccaacuccccgcggcgcgcccggagcguggcgucccagagcaucaucgccuacaccaugucccugggcgccgagaacagcgucgccuacuccaacaacagcaucgccauccccaccaacuucacgaucuccgugaccaccgagauccugcccgugagcaugaccaagacgagcgucgacugcaccauguacaucugcggggacuccaccgagugcagcaaccuccugcugcaguacggcuccuucugcacccagcucaaccgcgcgcugacggggaucgccguggagcaggacaagaacacccaggagguguucgcccaggucaagcagaucuacaagacgcccccgaucaaggacuucggcggguucaacuucagccagauccugcccgaccccuccaagcccagcaagcgguccuucaucgaggaccuccuguucaacaaggugacccuggccgacgccggcuucaucaagcaguacggcgacugccucggggacaucgcggcccgcgaccugaucugcgcccagaaguucaacggccugaccgugcucccgccccugcugaccgacgagaugaucgcccaguacaccagcgcccuccuggcggggaccaucacguccggcuggaccuucggggccggcgccgcccugcagauccccuucgcgaugcagauggccuaccgguucaacggcaucggggucacccagaacgugcucuacgagaaccagaagcugaucgccaaccaguucaacagcgccaucggcaagauccaggacucccugagcuccaccgccagcgcgcucgggaagcugcaggacguggucaaccagaacgcccaggcccugaacacgcucgugaagcagcuguccagcaacuucggcgccaucuccagcgugcugaacgacauccucucccgccuggacaaggucgaggccgaggugcagaucgaccggcugaucaccgggcgccuccagagccugcagaccuacgugacccagcagcugauccgggcggccgagauccgcgccagcgccaaccucgccgcgaccaagauguccgagugcguccugggccagagcaagcggguggacuucugcggcaagggguaccaccugauguccuucccccagagcgccccgcacggcguggucuuccuccacgugacguacguccccgcccaggagaagaacuucaccaccgcccccgcgaucugccacgacgggaaggcccacuucccccgcgagggcguguucguguccaacgggacccacugguucgucacgcagcggaacuucuacgagccgcagaucaucaccaccgacaacaccuucgugagcggcaacugcgacguggucaucggcaucgugaacaacacgguguacgacccccugcagcccgagcuggacuccuucaaggaggagcucgacaaguacuucaagaaccacaccagccccgacgucgaccugggggacaucuccggcaucaacgccagcguggugaacauccagaaggagaucgaccgccugaacgaggucgccaagaaccucaacgagucccugaucgaccugcaggagcucgggaaguacgagcaguacaucaag

SEQ ID NO: 11818 - RNA, 3633 nt, Artificial Sequence
  SARS-CoV-2/Wuhan/WIV05/2019__EPI_ISL_402128 spike protein CDS gc (1-1211)(K986P_V987P)
auguucguguuccugguccuccugccccuggugagcucccagugcgugaaccucaccacccgcacgcagcugccgcccgccuacaccaacagcuucacccggggcgucuacuaccccgacaagguguuccgcuccagcgugcugcacuccacccaggaccucuuccugcccuucuucagcaacgucacgugguuccacgccauccacguguccgggaccaacggcaccaagcgguucgacaacccggugcugcccuucaacgacggggucuacuucgcgagcaccgagaaguccaacaucauccgcggcuggaucuucgggacgacccucgacagcaagacccagucccugcugaucgugaacaacgccaccaacguggucaucaaggugugcgaguuccaguucugcaacgaccccuuccucggcguguacuaccacaagaacaacaagagcuggauggaguccgaguuccgggucuacagcuccgccaacaacugcacguucgaguacgugagccagcccuuccugauggaccuggagggcaagcaggggaacuucaagaaccuccgcgaguucguguucaagaacaucgacggcuacuucaagaucuacuccaagcacaccccgaucaaccugguccgggaccugccccagggguucagcgcccucgagccccugguggaccugcccaucggcaucaacaucacccgcuuccagacccuccuggcccugcaccgguccuaccucacgccgggggacagcagcuccggcuggaccgcgggcgccgccgccuacuacgugggguaccugcagccccgcaccuuccugcucaaguacaacgagaacggcaccaucacggacgcggucgacugcgcccuggacccccugagcgagaccaagugcacccucaaguccuucaccguggagaaggggaucuaccagacgagcaacuuccgggugcagcccaccgaguccaucguccgcuucccgaacaucaccaaccugugccccuucggcgagguguucaacgccacccgguucgccagcgucuacgccuggaaccgcaagcggaucuccaacugcguggcggacuacagcgugcuguacaacuccgccagcuucuccacguucaagugcuacggcgucagccccaccaagcucaacgaccugugcuucaccaacguguacgccgacuccuucgugauccgcggggacgagguccggcagaucgcccccggccagaccgggaagaucgccgacuacaacuacaagcugccggacgacuucacgggcugcgugaucgcguggaacagcaacaaccucgacuccaaggucgggggcaacuacaacuaccuguaccgccuguuccgcaagagcaaccucaagcccuucgagcgggacaucuccaccgagaucuaccaggccggcagcacccccugcaacgggguggagggcuucaacugcuacuucccccugcaguccuacggguuccagccgaccaacggcgugggguaccagcccuaccggguggucgugcugagcuucgagcuccugcacgcccccgccacggugugcggccccaagaaguccaccaaccuggucaagaacaagugcgugaacuucaacuucaacggccucaccgggaccggcgugcugaccgagagcaacaagaaguuccugccguuccagcaguucgggcgcgacaucgccgacacgaccgacgcgguccgcgacccccagacccuggagauccucgacaucacccccugcagcuucggcgggguguccgugaucacgccgggcaccaacaccagcaaccaggucgccgugcuguaccaggacgugaacugcaccgagguccccguggccauccacgccgaccagcugacgcccaccuggcggguguacuccaccggcagcaacgucuuccagacccgcgccgggugccucaucggcgcggagcacgugaacaacuccuacgagugcgacauccccaucggggccggcaucugcgccagcuaccagacgcagaccaacuccccgcggcgcgcccggagcguggcgucccagagcaucaucgccuacaccaugucccugggcgccgagaacagcgucgccuacuccaacaacagcaucgccauccccaccaacuucacgaucuccgugaccaccgagauccugcccgugagcaugaccaagacgagcgucgacugcaccauguacaucugcggggacuccaccgagugcagcaaccuccugcugcaguacggcuccuucugcacccagcucaaccgcgcgcugacggggaucgccguggagcaggacaagaacacccaggagguguucgcccaggucaagcagaucuacaagacgcccccgaucaaggacuucggcggguucaacuucagccagauccugcccgaccccuccaagcccagcaagcgguccuucaucgaggaccuccuguucaacaaggugacccuggccgacgccggcuucaucaagcaguacggcgacugccucggggacaucgcggcccgcgaccugaucugcgcccagaaguucaacggccugaccgugcucccgccccugcugaccgacgagaugaucgcccaguacaccagcgcccuccuggcggggaccaucacguccggcuggaccuucggggccggcgccgcccugcagauccccuucgcgaugcagauggccuaccgguucaacggcaucggggucacccagaacgugcucuacgagaaccagaagcugaucgccaaccaguucaacagcgccaucggcaagauccaggacucccugagcuccaccgccagcgcgcucgggaagcugcaggacguggucaaccagaacgcccaggcccugaacacgcucgugaagcagcuguccagcaacuucggcgccaucuccagcgugcugaacgacauccucucccgccuggacccgcccgaggccgaggugcagaucgaccggcugaucaccgggcgccuccagagccugcagaccuacgugacccagcagcugauccgggcggccgagauccgcgccagcgccaaccucgccgcgaccaagauguccgagugcguccugggccagagcaagcggguggacuucugcggcaagggguaccaccugauguccuucccccagagcgccccgcacggcguggucuuccuccacgugacguacguccccgcccaggagaagaacuucaccaccgcccccgcgaucugccacgacgggaaggcccacuucccccgcgagggcguguucguguccaacgggacccacugguucgucacgcagcggaacuucuacgagccgcagaucaucaccaccgacaacaccuucgugagcggcaacugcgacguggucaucggcaucgugaacaacacgguguacgacccccugcagcccgagcuggacuccuucaaggaggagcucgacaaguacuucaagaaccacaccagccccgacgucgaccugggggacaucuccggcaucaacgccagcguggugaacauccagaaggagaucgaccgccugaacgaggucgccaagaaccucaacgagucccugaucgaccugcaggagcucgggaaguacgagcaguacaucaag

SEQ ID NO: 11819 - RNA, 3633 nt, Artificial Sequence
  SARS-CoV-2/Wuhan/WIV05/2019__EPI_ISL_402128 spike protein CDS gc (1-1211)(K986P_V987P_T887WN_A1020W)
auguucguguuccugguccuccugccccuggugagcucccagugcgugaaccucaccacccgcacgcagcugccgcccgccuacaccaacagcuucacccggggcgucuacuaccccgacaagguguuccgcuccagcgugcugcacuccacccaggaccucuuccugcccuucuucagcaacgucacgugguuccacgccauccacguguccgggaccaacggcaccaagcgguucgacaacccggugcugcccuucaacgacggggucuacuucgcgagcaccgagaaguccaacaucauccgcggcuggaucuucgggacgacccucgacagcaagacccagucccugcugaucgugaacaacgccaccaacguggucaucaaggugugcgaguuccaguucugcaacgaccccuuccucggcguguacuaccacaagaacaacaagagcuggauggaguccgaguuccgggucuacagcuccgccaacaacugcacguucgaguacgugagccagcccuuccugauggaccuggagggcaagcaggggaacuucaagaaccuccgcgaguucguguucaagaacaucgacggcuacuucaagaucuacuccaagcacaccccgaucaaccugguccgggaccugccccagggguucagcgcccucgagccccugguggaccugcccaucggcaucaacaucacccgcuuccagacccuccuggcccugcaccgguccuaccucacgccgggggacagcagcuccggcuggaccgcgggcgccgccgccuacuacgugggguaccugcagccccgcaccuuccugcucaaguacaacgagaacggcaccaucacggacgcggucgacugcgcccuggacccccugagcgagaccaagugcacccucaaguccuucaccguggagaaggggaucuaccagacgagcaacuuccgggugcagcccaccgaguccaucguccgcuucccgaacaucaccaaccugugccccuucggcgagguguucaacgccacccgguucgccagcgucuacgccuggaaccgcaagcggaucuccaacugcguggcggacuacagcgugcuguacaacuccgccagcuucuccacguucaagugcuacggcgucagccccaccaagcucaacgaccugugcuucaccaacguguacgccgacuccuucgugauccgcggggacgagguccggcagaucgcccccggccagaccgggaagaucgccgacuacaacuacaagcugccggacgacuucacgggcugcgugaucgcguggaacagcaacaaccucgacuccaaggucgggggcaacuacaacuaccuguaccgccuguuccgcaagagcaaccucaagcccuucgagcgggacaucuccaccgagaucuaccaggccggcagcacccccugcaacgggguggagggcuucaacugcuacuucccccugcaguccuacggguuccagccgaccaacggcgugggguaccagcccuaccggguggucgugcugagcuucgagcuccugcacgcccccgccacggugugcggccccaagaaguccaccaaccuggucaagaacaagugcgugaacuucaacuucaacggccucaccgggaccggcgugcugaccgagagcaacaagaaguuccugccguuccagcaguucgggcgcgacaucgccgacacgaccgacgcgguccgcgacccccagacccuggagauccucgacaucacccccugcagcuucggcgggguguccgugaucacgccgggcaccaacaccagcaaccaggucgccgugcuguaccaggacgugaacugcaccgagguccccguggccauccacgccgaccagcugacgcccaccuggcggguguacuccaccggcagcaacgucuuccagacccgcgccgggugccucaucggcgcggagcacgugaacaacuccuacgagugcgacauccccaucggggccggcaucugcgccagcuaccagacgcagaccaacuccccgcggcgcgcccggagcguggcgucccagagcaucaucgccuacaccaugucccugggcgccgagaacagcgucgccuacuccaacaacagcaucgccauccccaccaacuucacgaucuccgugaccaccgagauccugcccgugagcaugaccaagacgagcgucgacugcaccauguacaucugcggggacuccaccgagugcagcaaccuccugcugcaguacggcuccuucugcacccagcucaaccgcgcgcugacggggaucgccguggagcaggacaagaacacccaggagguguucgcccaggucaagcagaucuacaagacgcccccgaucaaggacuucggcggguucaacuucagccagauccugcccgaccccuccaagcccagcaagcgguccuucaucgaggaccuccuguucaacaaggugacccuggccgacgccggcuucaucaagcaguacggcgacugccucggggacaucgcggcccgcgaccugaucugcgcccagaaguucaacggccugaccgugcucccgccccugcugaccgacgagaugaucgcccaguacaccagcgcccuccuggcggggaccaucacguccggcuggugguucggggccggcgccgcccugcagauccccuucgcgaugcagauggccuaccgguucaacggcaucggggucacccagaacgugcucuacgagaaccagaagcugaucgccaaccaguucaacagcgccaucggcaagauccaggacucccugagcuccaccgccagcgcgcucgggaagcugcaggacguggucaaccagaacgcccaggcccugaacacgcucgugaagcagcuguccagcaacuucggcgccaucuccagcgugcugaacgacauccucucccgccuggacccgcccgaggccgaggugcagaucgaccggcugaucaccgggcgccuccagagccugcagaccuacgugacccagcagcugauccgggcggccgagauccgcuggagcgccaaccucgccgcgaccaagauguccgagugcguccugggccagagcaagcggguggacuucugcggcaagggguaccaccugauguccuucccccagagcgccccgcacggcguggucuuccuccacgugacguacguccccgcccaggagaagaacuucaccaccgcccccgcgaucugccacgacgggaaggcccacuucccccgcgagggcguguucguguccaacgggacccacugguucgucacgcagcggaacuucuacgagccgcagaucaucaccaccgacaacaccuucgugagcggcaacugcgacguggucaucggcaucgugaacaacacgguguacgacccccugcagcccgagcuggacuccuucaaggaggagcucgacaaguacuucaagaaccacaccagccccgacgucgaccugggggacaucuccggcaucaacgccagcguggugaacauccagaaggagaucgaccgccugaacgaggucgccaagaaccucaacgagucccugaucgaccugcaggagcucgggaaguacgagcaguacaucaag

SEQ ID NO: 11820 - RNA, 3633 nt, Artificial Sequence
  SARS-CoV-2/Wuhan/WIV05/2019__EPI_ISL_402128 spike protein CDS gc (1-1211)(K986P_V987P_P1069F)
auguucguguuccugguccuccugccccuggugagcucccagugcgugaaccucaccacccgcacgcagcugccgcccgccuacaccaacagcuucacccggggcgucuacuaccccgacaagguguuccgcuccagcgugcugcacuccacccaggaccucuuccugcccuucuucagcaacgucacgugguuccacgccauccacguguccgggaccaacggcaccaagcgguucgacaacccggugcugcccuucaacgacggggucuacuucgcgagcaccgagaaguccaacaucauccgcggcuggaucuucgggacgacccucgacagcaagacccagucccugcugaucgugaacaacgccaccaacguggucaucaaggugugcgaguuccaguucugcaacgaccccuuccucggcguguacuaccacaagaacaacaagagcuggauggaguccgaguuccgggucuacagcuccgccaacaacugcacguucgaguacgugagccagcccuuccugauggaccuggagggcaagcaggggaacuucaagaaccuccgcgaguucguguucaagaacaucgacggcuacuucaagaucuacuccaagcacaccccgaucaaccugguccgggaccugccccagggguucagcgcccucgagccccugguggaccugcccaucggcaucaacaucacccgcuuccagacccuccuggcccugcaccgguccuaccucacgccgggggacagcagcuccggcuggaccgcgggcgccgccgccuacuacgugggguaccugcagccccgcaccuuccugcucaaguacaacgagaacggcaccaucacggacgcggucgacugcgcccuggacccccugagcgagaccaagugcacccucaaguccuucaccguggagaaggggaucuaccagacgagcaacuuccgggugcagcccaccgaguccaucguccgcuucccgaacaucaccaaccugugccccuucggcgagguguucaacgccacccgguucgccagcgucuacgccuggaaccgcaagcggaucuccaacugcguggcggacuacagcgugcuguacaacuccgccagcuucuccacguucaagugcuacggcgucagccccaccaagcucaacgaccugugcuucaccaacguguacgccgacuccuucgugauccgcggggacgagguccggcagaucgcccccggccagaccgggaagaucgccgacuacaacuacaagcugccggacgacuucacgggcugcgugaucgcguggaacagcaacaaccucgacuccaaggucgggggcaacuacaacuaccuguaccgccuguuccgcaagagcaaccucaagcccuucgagcgggacaucuccaccgagaucuaccaggccggcagcacccccugcaacgggguggagggcuucaacugcuacuucccccugcaguccuacggguuccagccgaccaacggcgugggguaccagcccuaccggguggucgugcugagcuucgagcuccugcacgcccccgccacggugugcggccccaagaaguccaccaaccuggucaagaacaagugcgugaacuucaacuucaacggccucaccgggaccggcgugcugaccgagagcaacaagaaguuccugccguuccagcaguucgggcgcgacaucgccgacacgaccgacgcgguccgcgacccccagacccuggagauccucgacaucacccccugcagcuucggcgggguguccgugaucacgccgggcaccaacaccagcaaccaggucgccgugcuguaccaggacgugaacugcaccgagguccccguggccauccacgccgaccagcugacgcccaccuggcggguguacuccaccggcagcaacgucuuccagacccgcgccgggugccucaucggcgcggagcacgugaacaacuccuacgagugcgacauccccaucggggccggcaucugcgccagcuaccagacgcagaccaacuccccgcggcgcgcccggagcguggcgucccagagcaucaucgccuacaccaugucccugggcgccgagaacagcgucgccuacuccaacaacagcaucgccauccccaccaacuucacgaucuccgugaccaccgagauccugcccgugagcaugaccaagacgagcgucgacugcaccauguacaucugcggggacuccaccgagugcagcaaccuccugcugcaguacggcuccuucugcacccagcucaaccgcgcgcugacggggaucgccguggagcaggacaagaacacccaggagguguucgcccaggucaagcagaucuacaagacgcccccgaucaaggacuucggcggguucaacuucagccagauccugcccgaccccuccaagcccagcaagcgguccuucaucgaggaccuccuguucaacaaggugacccuggccgacgccggcuucaucaagcaguacggcgacugccucggggacaucgcggcccgcgaccugaucugcgcccagaaguucaacggccugaccgugcucccgccccugcugaccgacgagaugaucgcccaguacaccagcgcccuccuggcggggaccaucacguccggcuggaccuucggggccggcgccgcccugcagauccccuucgcgaugcagauggccuaccgguucaacggcaucggggucacccagaacgugcucuacgagaaccagaagcugaucgccaaccaguucaacagcgccaucggcaagauccaggacucccugagcuccaccgccagcgcgcucgggaagcugcaggacguggucaaccagaacgcccaggcccugaacacgcucgugaagcagcuguccagcaacuucggcgccaucuccagcgugcugaacgacauccucucccgccuggacccgcccgaggccgaggugcagaucgaccggcugaucaccgggcgccuccagagccugcagaccuacgugacccagcagcugauccgggcggccgagauccgcgccagcgccaaccucgccgcgaccaagauguccgagugcguccugggccagagcaagcggguggacuucugcggcaagggguaccaccugauguccuucccccagagcgccccgcacggcguggucuuccuccacgugacguacgucuucgcccaggagaagaacuucaccaccgcccccgcgaucugccacgacgggaaggcccacuucccccgcgagggcguguucguguccaacgggacccacugguucgucacgcagcggaacuucuacgagccgcagaucaucaccaccgacaacaccuucgugagcggcaacugcgacguggucaucggcaucgugaacaacacgguguacgacccccugcagcccgagcuggacuccuucaaggaggagcucgacaaguacuucaagaaccacaccagccccgacgucgaccugggggacaucuccggcaucaacgccagcguggugaacauccagaaggagaucgaccgccugaacgaggucgccaagaaccucaacgagucccugaucgaccugcaggagcucgggaaguacgagcaguacaucaag

SEQ ID NO: 11821 - RNA, 3633 nt, Artificial Sequence
  SARS-CoV-2/Wuhan/WIV05/2019__EPI_ISL_402128 spike protein CDS gc (1-1211)(K986P_V987P_ H1048Q_H1064N_ H1083N_H1101N)
auguucguguuccugguccuccugccccuggugagcucccagugcgugaaccucaccacccgcacgcagcugccgcccgccuacaccaacagcuucacccggggcgucuacuaccccgacaagguguuccgcuccagcgugcugcacuccacccaggaccucuuccugcccuucuucagcaacgucacgugguuccacgccauccacguguccgggaccaacggcaccaagcgguucgacaacccggugcugcccuucaacgacggggucuacuucgcgagcaccgagaaguccaacaucauccgcggcuggaucuucgggacgacccucgacagcaagacccagucccugcugaucgugaacaacgccaccaacguggucaucaaggugugcgaguuccaguucugcaacgaccccuuccucggcguguacuaccacaagaacaacaagagcuggauggaguccgaguuccgggucuacagcuccgccaacaacugcacguucgaguacgugagccagcccuuccugauggaccuggagggcaagcaggggaacuucaagaaccuccgcgaguucguguucaagaacaucgacggcuacuucaagaucuacuccaagcacaccccgaucaaccugguccgggaccugccccagggguucagcgcccucgagccccugguggaccugcccaucggcaucaacaucacccgcuuccagacccuccuggcccugcaccgguccuaccucacgccgggggacagcagcuccggcuggaccgcgggcgccgccgccuacuacgugggguaccugcagccccgcaccuuccugcucaaguacaacgagaacggcaccaucacggacgcggucgacugcgcccuggacccccugagcgagaccaagugcacccucaaguccuucaccguggagaaggggaucuaccagacgagcaacuuccgggugcagcccaccgaguccaucguccgcuucccgaacaucaccaaccugugccccuucggcgagguguucaacgccacccgguucgccagcgucuacgccuggaaccgcaagcggaucuccaacugcguggcggacuacagcgugcuguacaacuccgccagcuucuccacguucaagugcuacggcgucagccccaccaagcucaacgaccugugcuucaccaacguguacgccgacuccuucgugauccgcggggacgagguccggcagaucgcccccggccagaccgggaagaucgccgacuacaacuacaagcugccggacgacuucacgggcugcgugaucgcguggaacagcaacaaccucgacuccaaggucgggggcaacuacaacuaccuguaccgccuguuccgcaagagcaaccucaagcccuucgagcgggacaucuccaccgagaucuaccaggccggcagcacccccugcaacgggguggagggcuucaacugcuacuucccccugcaguccuacggguuccagccgaccaacggcgugggguaccagcccuaccggguggucgugcugagcuucgagcuccugcacgcccccgccacggugugcggccccaagaaguccaccaaccuggucaagaacaagugcgugaacuucaacuucaacggccucaccgggaccggcgugcugaccgagagcaacaagaaguuccugccguuccagcaguucgggcgcgacaucgccgacacgaccgacgcgguccgcgacccccagacccuggagauccucgacaucacccccugcagcuucggcgggguguccgugaucacgccgggcaccaacaccagcaaccaggucgccgugcuguaccaggacgugaacugcaccgagguccccguggccauccacgccgaccagcugacgcccaccuggcggguguacuccaccggcagcaacgucuuccagacccgcgccgggugccucaucggcgcggagcacgugaacaacuccuacgagugcgacauccccaucggggccggcaucugcgccagcuaccagacgcagaccaacuccccgcggcgcgcccggagcguggcgucccagagcaucaucgccuacaccaugucccugggcgccgagaacagcgucgccuacuccaacaacagcaucgccauccccaccaacuucacgaucuccgugaccaccgagauccugcccgugagcaugaccaagacgagcgucgacugcaccauguacaucugcggggacuccaccgagugcagcaaccuccugcugcaguacggcuccuucugcacccagcucaaccgcgcgcugacggggaucgccguggagcaggacaagaacacccaggagguguucgcccaggucaagcagaucuacaagacgcccccgaucaaggacuucggcggguucaacuucagccagauccugcccgaccccuccaagcccagcaagcgguccuucaucgaggaccuccuguucaacaaggugacccuggccgacgccggcuucaucaagcaguacggcgacugccucggggacaucgcggcccgcgaccugaucugcgcccagaaguucaacggccugaccgugcucccgccccugcugaccgacgagaugaucgcccaguacaccagcgcccuccuggcggggaccaucacguccggcuggaccuucggggccggcgccgcccugcagauccccuucgcgaugcagauggccuaccgguucaacggcaucggggucacccagaacgugcucuacgagaaccagaagcugaucgccaaccaguucaacagcgccaucggcaagauccaggacucccugagcuccaccgccagcgcgcucgggaagcugcaggacguggucaaccagaacgcccaggcccugaacacgcucgugaagcagcuguccagcaacuucggcgccaucuccagcgugcugaacgacauccucucccgccuggacccgcccgaggccgaggugcagaucgaccggcugaucaccgggcgccuccagagccugcagaccuacgugacccagcagcugauccgggcggccgagauccgcgccagcgccaaccucgccgcgaccaagauguccgagugcguccugggccagagcaagcggguggacuucugcggcaagggguaccagcugauguccuucccccagagcgccccgcacggcguggucuuccucaacgugacguacguccccgcccaggagaagaacuucaccaccgcccccgcgaucugcaacgacgggaaggcccacuucccccgcgagggcguguucguguccaacgggaccaacugguucgucacgcagcggaacuucuacgagccgcagaucaucaccaccgacaacaccuucgugagcggcaacugcgacguggucaucggcaucgugaacaacacgguguacgacccccugcagcccgagcuggacuccuucaaggaggagcucgacaaguacuucaagaaccacaccagccccgacgucgaccugggggacaucuccggcaucaacgccagcguggugaacauccagaaggagaucgaccgccugaacgaggucgccaagaaccucaacgagucccugaucgaccugcaggagcucgggaaguacgagcaguacaucaag

SEQ ID NO: 11822 - RNA, 3633 nt, Artificial Sequence
  SARS-CoV-2/Wuhan/WIV05/2019__EPI_ISL_402128 spike protein CDS gc (1-1211)(I712C_T1077C)
auguucguguuccugguccuccugccccuggugagcucccagugcgugaaccucaccacccgcacgcagcugccgcccgccuacaccaacagcuucacccggggcgucuacuaccccgacaagguguuccgcuccagcgugcugcacuccacccaggaccucuuccugcccuucuucagcaacgucacgugguuccacgccauccacguguccgggaccaacggcaccaagcgguucgacaacccggugcugcccuucaacgacggggucuacuucgcgagcaccgagaaguccaacaucauccgcggcuggaucuucgggacgacccucgacagcaagacccagucccugcugaucgugaacaacgccaccaacguggucaucaaggugugcgaguuccaguucugcaacgaccccuuccucggcguguacuaccacaagaacaacaagagcuggauggaguccgaguuccgggucuacagcuccgccaacaacugcacguucgaguacgugagccagcccuuccugauggaccuggagggcaagcaggggaacuucaagaaccuccgcgaguucguguucaagaacaucgacggcuacuucaagaucuacuccaagcacaccccgaucaaccugguccgggaccugccccagggguucagcgcccucgagccccugguggaccugcccaucggcaucaacaucacccgcuuccagacccuccuggcccugcaccgguccuaccucacgccgggggacagcagcuccggcuggaccgcgggcgccgccgccuacuacgugggguaccugcagccccgcaccuuccugcucaaguacaacgagaacggcaccaucacggacgcggucgacugcgcccuggacccccugagcgagaccaagugcacccucaaguccuucaccguggagaaggggaucuaccagacgagcaacuuccgggugcagcccaccgaguccaucguccgcuucccgaacaucaccaaccugugccccuucggcgagguguucaacgccacccgguucgccagcgucuacgccuggaaccgcaagcggaucuccaacugcguggcggacuacagcgugcuguacaacuccgccagcuucuccacguucaagugcuacggcgucagccccaccaagcucaacgaccugugcuucaccaacguguacgccgacuccuucgugauccgcggggacgagguccggcagaucgcccccggccagaccgggaagaucgccgacuacaacuacaagcugccggacgacuucacgggcugcgugaucgcguggaacagcaacaaccucgacuccaaggucgggggcaacuacaacuaccuguaccgccuguuccgcaagagcaaccucaagcccuucgagcgggacaucuccaccgagaucuaccaggccggcagcacccccugcaacgggguggagggcuucaacugcuacuucccccugcaguccuacggguuccagccgaccaacggcgugggguaccagcccuaccggguggucgugcugagcuucgagcuccugcacgcccccgccacggugugcggccccaagaaguccaccaaccuggucaagaacaagugcgugaacuucaacuucaacggccucaccgggaccggcgugcugaccgagagcaacaagaaguuccugccguuccagcaguucgggcgcgacaucgccgacacgaccgacgcgguccgcgacccccagacccuggagauccucgacaucacccccugcagcuucggcgggguguccgugaucacgccgggcaccaacaccagcaaccaggucgccgugcuguaccaggacgugaacugcaccgagguccccguggccauccacgccgaccagcugacgcccaccuggcggguguacuccaccggcagcaacgucuuccagacccgcgccgggugccucaucggcgcggagcacgugaacaacuccuacgagugcgacauccccaucggggccggcaucugcgccagcuaccagacgcagaccaacuccccgcggcgcgcccggagcguggcgucccagagcaucaucgccuacaccaugucccugggcgccgagaacagcgucgccuacuccaacaacagcugcgccauccccaccaacuucacgaucuccgugaccaccgagauccugcccgugagcaugaccaagacgagcgucgacugcaccauguacaucugcggggacuccaccgagugcagcaaccuccugcugcaguacggcuccuucugcacccagcucaaccgcgcgcugacggggaucgccguggagcaggacaagaacacccaggagguguucgcccaggucaagcagaucuacaagacgcccccgaucaaggacuucggcggguucaacuucagccagauccugcccgaccccuccaagcccagcaagcgguccuucaucgaggaccuccuguucaacaaggugacccuggccgacgccggcuucaucaagcaguacggcgacugccucggggacaucgcggcccgcgaccugaucugcgcccagaaguucaacggccugaccgugcucccgccccugcugaccgacgagaugaucgcccaguacaccagcgcccuccuggcggggaccaucacguccggcuggaccuucggggccggcgccgcccugcagauccccuucgcgaugcagauggccuaccgguucaacggcaucggggucacccagaacgugcucuacgagaaccagaagcugaucgccaaccaguucaacagcgccaucggcaagauccaggacucccugagcuccaccgccagcgcgcucgggaagcugcaggacguggucaaccagaacgcccaggcccugaacacgcucgugaagcagcuguccagcaacuucggcgccaucuccagcgugcugaacgacauccucucccgccuggacaaggucgaggccgaggugcagaucgaccggcugaucaccgggcgccuccagagccugcagaccuacgugacccagcagcugauccgggcggccgagauccgcgccagcgccaaccucgccgcgaccaagauguccgagugcguccugggccagagcaagcggguggacuucugcggcaagggguaccaccugauguccuucccccagagcgccccgcacggcguggucuuccuccacgugacguacguccccgcccaggagaagaacuucaccugcgcccccgcgaucugccacgacgggaaggcccacuucccccgcgagggcguguucguguccaacgggacccacugguucgucacgcagcggaacuucuacgagccgcagaucaucaccaccgacaacaccuucgugagcggcaacugcgacguggucaucggcaucgugaacaacacgguguacgacccccugcagcccgagcuggacuccuucaaggaggagcucgacaaguacuucaagaaccacaccagccccgacgucgaccugggggacaucuccggcaucaacgccagcguggugaacauccagaaggagaucgaccgccugaacgaggucgccaagaaccucaacgagucccugaucgaccugcaggagcucgggaaguacgagcaguacaucaag

SEQ ID NO: 11823 - RNA, 3633 nt, Artificial Sequence
  SARS-CoV-2/Wuhan/WIV05/2019__EPI_ISL_402128 spike protein CDS gc (1-1211)(I714C_Y1110C)
auguucguguuccugguccuccugccccuggugagcucccagugcgugaaccucaccacccgcacgcagcugccgcccgccuacaccaacagcuucacccggggcgucuacuaccccgacaagguguuccgcuccagcgugcugcacuccacccaggaccucuuccugcccuucuucagcaacgucacgugguuccacgccauccacguguccgggaccaacggcaccaagcgguucgacaacccggugcugcccuucaacgacggggucuacuucgcgagcaccgagaaguccaacaucauccgcggcuggaucuucgggacgacccucgacagcaagacccagucccugcugaucgugaacaacgccaccaacguggucaucaaggugugcgaguuccaguucugcaacgaccccuuccucggcguguacuaccacaagaacaacaagagcuggauggaguccgaguuccgggucuacagcuccgccaacaacugcacguucgaguacgugagccagcccuuccugauggaccuggagggcaagcaggggaacuucaagaaccuccgcgaguucguguucaagaacaucgacggcuacuucaagaucuacuccaagcacaccccgaucaaccugguccgggaccugccccagggguucagcgcccucgagccccugguggaccugcccaucggcaucaacaucacccgcuuccagacccuccuggcccugcaccgguccuaccucacgccgggggacagcagcuccggcuggaccgcgggcgccgccgccuacuacgugggguaccugcagccccgcaccuuccugcucaaguacaacgagaacggcaccaucacggacgcggucgacugcgcccuggacccccugagcgagaccaagugcacccucaaguccuucaccguggagaaggggaucuaccagacgagcaacuuccgggugcagcccaccgaguccaucguccgcuucccgaacaucaccaaccugugccccuucggcgagguguucaacgccacccgguucgccagcgucuacgccuggaaccgcaagcggaucuccaacugcguggcggacuacagcgugcuguacaacuccgccagcuucuccacguucaagugcuacggcgucagccccaccaagcucaacgaccugugcuucaccaacguguacgccgacuccuucgugauccgcggggacgagguccggcagaucgcccccggccagaccgggaagaucgccgacuacaacuacaagcugccggacgacuucacgggcugcgugaucgcguggaacagcaacaaccucgacuccaaggucgggggcaacuacaacuaccuguaccgccuguuccgcaagagcaaccucaagcccuucgagcgggacaucuccaccgagaucuaccaggccggcagcacccccugcaacgggguggagggcuucaacugcuacuucccccugcaguccuacggguuccagccgaccaacggcgugggguaccagcccuaccggguggucgugcugagcuucgagcuccugcacgcccccgccacggugugcggccccaagaaguccaccaaccuggucaagaacaagugcgugaacuucaacuucaacggccucaccgggaccggcgugcugaccgagagcaacaagaaguuccugccguuccagcaguucgggcgcgacaucgccgacacgaccgacgcgguccgcgacccccagacccuggagauccucgacaucacccccugcagcuucggcgggguguccgugaucacgccgggcaccaacaccagcaaccaggucgccgugcuguaccaggacgugaacugcaccgagguccccguggccauccacgccgaccagcugacgcccaccuggcggguguacuccaccggcagcaacgucuuccagacccgcgccgggugccucaucggcgcggagcacgugaacaacuccuacgagugcgacauccccaucggggccggcaucugcgccagcuaccagacgcagaccaacuccccgcggcgcgcccggagcguggcgucccagagcaucaucgccuacaccaugucccugggcgccgagaacagcgucgccuacuccaacaacagcaucgccugccccaccaacuucacgaucuccgugaccaccgagauccugcccgugagcaugaccaagacgagcgucgacugcaccauguacaucugcggggacuccaccgagugcagcaaccuccugcugcaguacggcuccuucugcacccagcucaaccgcgcgcugacggggaucgccguggagcaggacaagaacacccaggagguguucgcccaggucaagcagaucuacaagacgcccccgaucaaggacuucggcggguucaacuucagccagauccugcccgaccccuccaagcccagcaagcgguccuucaucgaggaccuccuguucaacaaggugacccuggccgacgccggcuucaucaagcaguacggcgacugccucggggacaucgcggcccgcgaccugaucugcgcccagaaguucaacggccugaccgugcucccgccccugcugaccgacgagaugaucgcccaguacaccagcgcccuccuggcggggaccaucacguccggcuggaccuucggggccggcgccgcccugcagauccccuucgcgaugcagauggccuaccgguucaacggcaucggggucacccagaacgugcucuacgagaaccagaagcugaucgccaaccaguucaacagcgccaucggcaagauccaggacucccugagcuccaccgccagcgcgcucgggaagcugcaggacguggucaaccagaacgcccaggcccugaacacgcucgugaagcagcuguccagcaacuucggcgccaucuccagcgugcugaacgacauccucucccgccuggacaaggucgaggccgaggugcagaucgaccggcugaucaccgggcgccuccagagccugcagaccuacgugacccagcagcugauccgggcggccgagauccgcgccagcgccaaccucgccgcgaccaagauguccgagugcguccugggccagagcaagcggguggacuucugcggcaagggguaccaccugauguccuucccccagagcgccccgcacggcguggucuuccuccacgugacguacguccccgcccaggagaagaacuucaccaccgcccccgcgaucugccacgacgggaaggcccacuucccccgcgagggcguguucguguccaacgggacccacugguucgucacgcagcggaacuucugcgagccgcagaucaucaccaccgacaacaccuucgugagcggcaacugcgacguggucaucggcaucgugaacaacacgguguacgacccccugcagcccgagcuggacuccuucaaggaggagcucgacaaguacuucaagaaccacaccagccccgacgucgaccugggggacaucuccggcaucaacgccagcguggugaacauccagaaggagaucgaccgccugaacgaggucgccaagaaccucaacgagucccugaucgaccugcaggagcucgggaaguacgagcaguacaucaag

SEQ ID NO: 11824 - RNA, 3633 nt, Artificial Sequence
  SARS-CoV-2/Wuhan/WIV05/2019__EPI_ISL_402128 spike protein CDS gc (1-1211)(P715C_P1069C)
auguucguguuccugguccuccugccccuggugagcucccagugcgugaaccucaccacccgcacgcagcugccgcccgccuacaccaacagcuucacccggggcgucuacuaccccgacaagguguuccgcuccagcgugcugcacuccacccaggaccucuuccugcccuucuucagcaacgucacgugguuccacgccauccacguguccgggaccaacggcaccaagcgguucgacaacccggugcugcccuucaacgacggggucuacuucgcgagcaccgagaaguccaacaucauccgcggcuggaucuucgggacgacccucgacagcaagacccagucccugcugaucgugaacaacgccaccaacguggucaucaaggugugcgaguuccaguucugcaacgaccccuuccucggcguguacuaccacaagaacaacaagagcuggauggaguccgaguuccgggucuacagcuccgccaacaacugcacguucgaguacgugagccagcccuuccugauggaccuggagggcaagcaggggaacuucaagaaccuccgcgaguucguguucaagaacaucgacggcuacuucaagaucuacuccaagcacaccccgaucaaccugguccgggaccugccccagggguucagcgcccucgagccccugguggaccugcccaucggcaucaacaucacccgcuuccagacccuccuggcccugcaccgguccuaccucacgccgggggacagcagcuccggcuggaccgcgggcgccgccgccuacuacgugggguaccugcagccccgcaccuuccugcucaaguacaacgagaacggcaccaucacggacgcggucgacugcgcccuggacccccugagcgagaccaagugcacccucaaguccuucaccguggagaaggggaucuaccagacgagcaacuuccgggugcagcccaccgaguccaucguccgcuucccgaacaucaccaaccugugccccuucggcgagguguucaacgccacccgguucgccagcgucuacgccuggaaccgcaagcggaucuccaacugcguggcggacuacagcgugcuguacaacuccgccagcuucuccacguucaagugcuacggcgucagccccaccaagcucaacgaccugugcuucaccaacguguacgccgacuccuucgugauccgcggggacgagguccggcagaucgcccccggccagaccgggaagaucgccgacuacaacuacaagcugccggacgacuucacgggcugcgugaucgcguggaacagcaacaaccucgacuccaaggucgggggcaacuacaacuaccuguaccgccuguuccgcaagagcaaccucaagcccuucgagcgggacaucuccaccgagaucuaccaggccggcagcacccccugcaacgggguggagggcuucaacugcuacuucccccugcaguccuacggguuccagccgaccaacggcgugggguaccagcccuaccggguggucgugcugagcuucgagcuccugcacgcccccgccacggugugcggccccaagaaguccaccaaccuggucaagaacaagugcgugaacuucaacuucaacggccucaccgggaccggcgugcugaccgagagcaacaagaaguuccugccguuccagcaguucgggcgcgacaucgccgacacgaccgacgcgguccgcgacccccagacccuggagauccucgacaucacccccugcagcuucggcgggguguccgugaucacgccgggcaccaacaccagcaaccaggucgccgugcuguaccaggacgugaacugcaccgagguccccguggccauccacgccgaccagcugacgcccaccuggcggguguacuccaccggcagcaacgucuuccagacccgcgccgggugccucaucggcgcggagcacgugaacaacuccuacgagugcgacauccccaucggggccggcaucugcgccagcuaccagacgcagaccaacuccccgcggcgcgcccggagcguggcgucccagagcaucaucgccuacaccaugucccugggcgccgagaacagcgucgccuacuccaacaacagcaucgccaucugcaccaacuucacgaucuccgugaccaccgagauccugcccgugagcaugaccaagacgagcgucgacugcaccauguacaucugcggggacuccaccgagugcagcaaccuccugcugcaguacggcuccuucugcacccagcucaaccgcgcgcugacggggaucgccguggagcaggacaagaacacccaggagguguucgcccaggucaagcagaucuacaagacgcccccgaucaaggacuucggcggguucaacuucagccagauccugcccgaccccuccaagcccagcaagcgguccuucaucgaggaccuccuguucaacaaggugacccuggccgacgccggcuucaucaagcaguacggcgacugccucggggacaucgcggcccgcgaccugaucugcgcccagaaguucaacggccugaccgugcucccgccccugcugaccgacgagaugaucgcccaguacaccagcgcccuccuggcggggaccaucacguccggcuggaccuucggggccggcgccgcccugcagauccccuucgcgaugcagauggccuaccgguucaacggcaucggggucacccagaacgugcucuacgagaaccagaagcugaucgccaaccaguucaacagcgccaucggcaagauccaggacucccugagcuccaccgccagcgcgcucgggaagcugcaggacguggucaaccagaacgcccaggcccugaacacgcucgugaagcagcuguccagcaacuucggcgccaucuccagcgugcugaacgacauccucucccgccuggacaaggucgaggccgaggugcagaucgaccggcugaucaccgggcgccuccagagccugcagaccuacgugacccagcagcugauccgggcggccgagauccgcgccagcgccaaccucgccgcgaccaagauguccgagugcguccugggccagagcaagcggguggacuucugcggcaagggguaccaccugauguccuucccccagagcgccccgcacggcguggucuuccuccacgugacguacgucugcgcccaggagaagaacuucaccaccgcccccgcgaucugccacgacgggaaggcccacuucccccgcgagggcguguucguguccaacgggacccacugguucgucacgcagcggaacuucuacgagccgcagaucaucaccaccgacaacaccuucgugagcggcaacugcgacguggucaucggcaucgugaacaacacgguguacgacccccugcagcccgagcuggacuccuucaaggaggagcucgacaaguacuucaagaaccacaccagccccgacgucgaccugggggacaucuccggcaucaacgccagcguggugaacauccagaaggagaucgaccgccugaacgaggucgccaagaaccucaacgagucccugaucgaccugcaggagcucgggaaguacgagcaguacaucaag

SEQ ID NO: 11825 - RNA, 3633 nt, Artificial Sequence
  SARS-CoV-2/Wuhan/WIV05/2019__EPI_ISL_402128 spike protein CDS gc (1-1211)(G889C_L1034C)
auguucguguuccugguccuccugccccuggugagcucccagugcgugaaccucaccacccgcacgcagcugccgcccgccuacaccaacagcuucacccggggcgucuacuaccccgacaagguguuccgcuccagcgugcugcacuccacccaggaccucuuccugcccuucuucagcaacgucacgugguuccacgccauccacguguccgggaccaacggcaccaagcgguucgacaacccggugcugcccuucaacgacggggucuacuucgcgagcaccgagaaguccaacaucauccgcggcuggaucuucgggacgacccucgacagcaagacccagucccugcugaucgugaacaacgccaccaacguggucaucaaggugugcgaguuccaguucugcaacgaccccuuccucggcguguacuaccacaagaacaacaagagcuggauggaguccgaguuccgggucuacagcuccgccaacaacugcacguucgaguacgugagccagcccuuccugauggaccuggagggcaagcaggggaacuucaagaaccuccgcgaguucguguucaagaacaucgacggcuacuucaagaucuacuccaagcacaccccgaucaaccugguccgggaccugccccagggguucagcgcccucgagccccugguggaccugcccaucggcaucaacaucacccgcuuccagacccuccuggcccugcaccgguccuaccucacgccgggggacagcagcuccggcuggaccgcgggcgccgccgccuacuacgugggguaccugcagccccgcaccuuccugcucaaguacaacgagaacggcaccaucacggacgcggucgacugcgcccuggacccccugagcgagaccaagugcacccucaaguccuucaccguggagaaggggaucuaccagacgagcaacuuccgggugcagcccaccgaguccaucguccgcuucccgaacaucaccaaccugugccccuucggcgagguguucaacgccacccgguucgccagcgucuacgccuggaaccgcaagcggaucuccaacugcguggcggacuacagcgugcuguacaacuccgccagcuucuccacguucaagugcuacggcgucagccccaccaagcucaacgaccugugcuucaccaacguguacgccgacuccuucgugauccgcggggacgagguccggcagaucgcccccggccagaccgggaagaucgccgacuacaacuacaagcugccggacgacuucacgggcugcgugaucgcguggaacagcaacaaccucgacuccaaggucgggggcaacuacaacuaccuguaccgccuguuccgcaagagcaaccucaagcccuucgagcgggacaucuccaccgagaucuaccaggccggcagcacccccugcaacgggguggagggcuucaacugcuacuucccccugcaguccuacggguuccagccgaccaacggcgugggguaccagcccuaccggguggucgugcugagcuucgagcuccugcacgcccccgccacggugugcggccccaagaaguccaccaaccuggucaagaacaagugcgugaacuucaacuucaacggccucaccgggaccggcgugcugaccgagagcaacaagaaguuccugccguuccagcaguucgggcgcgacaucgccgacacgaccgacgcgguccgcgacccccagacccuggagauccucgacaucacccccugcagcuucggcgggguguccgugaucacgccgggcaccaacaccagcaaccaggucgccgugcuguaccaggacgugaacugcaccgagguccccguggccauccacgccgaccagcugacgcccaccuggcggguguacuccaccggcagcaacgucuuccagacccgcgccgggugccucaucggcgcggagcacgugaacaacuccuacgagugcgacauccccaucggggccggcaucugcgccagcuaccagacgcagaccaacuccccgcggcgcgcccggagcguggcgucccagagcaucaucgccuacaccaugucccugggcgccgagaacagcgucgccuacuccaacaacagcaucgccauccccaccaacuucacgaucuccgugaccaccgagauccugcccgugagcaugaccaagacgagcgucgacugcaccauguacaucugcggggacuccaccgagugcagcaaccuccugcugcaguacggcuccuucugcacccagcucaaccgcgcgcugacggggaucgccguggagcaggacaagaacacccaggagguguucgcccaggucaagcagaucuacaagacgcccccgaucaaggacuucggcggguucaacuucagccagauccugcccgaccccuccaagcccagcaagcgguccuucaucgaggaccuccuguucaacaaggugacccuggccgacgccggcuucaucaagcaguacggcgacugccucggggacaucgcggcccgcgaccugaucugcgcccagaaguucaacggccugaccgugcucccgccccugcugaccgacgagaugaucgcccaguacaccagcgcccuccuggcggggaccaucacguccggcuggaccuucugcgccggcgccgcccugcagauccccuucgcgaugcagauggccuaccgguucaacggcaucggggucacccagaacgugcucuacgagaaccagaagcugaucgccaaccaguucaacagcgccaucggcaagauccaggacucccugagcuccaccgccagcgcgcucgggaagcugcaggacguggucaaccagaacgcccaggcccugaacacgcucgugaagcagcuguccagcaacuucggcgccaucuccagcgugcugaacgacauccucucccgccuggacaaggucgaggccgaggugcagaucgaccggcugaucaccgggcgccuccagagccugcagaccuacgugacccagcagcugauccgggcggccgagauccgcgccagcgccaaccucgccgcgaccaagauguccgagugcgucugcggccagagcaagcggguggacuucugcggcaagggguaccaccugauguccuucccccagagcgccccgcacggcguggucuuccuccacgugacguacguccccgcccaggagaagaacuucaccaccgcccccgcgaucugccacgacgggaaggcccacuucccccgcgagggcguguucguguccaacgggacccacugguucgucacgcagcggaacuucuacgagccgcagaucaucaccaccgacaacaccuucgugagcggcaacugcgacguggucaucggcaucgugaacaacacgguguacgacccccugcagcccgagcuggacuccuucaaggaggagcucgacaaguacuucaagaaccacaccagccccgacgucgaccugggggacaucuccggcaucaacgccagcguggugaacauccagaaggagaucgaccgccugaacgaggucgccaagaaccucaacgagucccugaucgaccugcaggagcucgggaaguacgagcaguacaucaag

SEQ ID NO: 11826 - RNA, 3633 nt, Artificial Sequence
  SARS-CoV-2/Wuhan/WIV05/2019__EPI_ISL_402128 spike protein CDS gc (1-1211)(I909C_Y1047C)
auguucguguuccugguccuccugccccuggugagcucccagugcgugaaccucaccacccgcacgcagcugccgcccgccuacaccaacagcuucacccggggcgucuacuaccccgacaagguguuccgcuccagcgugcugcacuccacccaggaccucuuccugcccuucuucagcaacgucacgugguuccacgccauccacguguccgggaccaacggcaccaagcgguucgacaacccggugcugcccuucaacgacggggucuacuucgcgagcaccgagaaguccaacaucauccgcggcuggaucuucgggacgacccucgacagcaagacccagucccugcugaucgugaacaacgccaccaacguggucaucaaggugugcgaguuccaguucugcaacgaccccuuccucggcguguacuaccacaagaacaacaagagcuggauggaguccgaguuccgggucuacagcuccgccaacaacugcacguucgaguacgugagccagcccuuccugauggaccuggagggcaagcaggggaacuucaagaaccuccgcgaguucguguucaagaacaucgacggcuacuucaagaucuacuccaagcacaccccgaucaaccugguccgggaccugccccagggguucagcgcccucgagccccugguggaccugcccaucggcaucaacaucacccgcuuccagacccuccuggcccugcaccgguccuaccucacgccgggggacagcagcuccggcuggaccgcgggcgccgccgccuacuacgugggguaccugcagccccgcaccuuccugcucaaguacaacgagaacggcaccaucacggacgcggucgacugcgcccuggacccccugagcgagaccaagugcacccucaaguccuucaccguggagaaggggaucuaccagacgagcaacuuccgggugcagcccaccgaguccaucguccgcuucccgaacaucaccaaccugugccccuucggcgagguguucaacgccacccgguucgccagcgucuacgccuggaaccgcaagcggaucuccaacugcguggcggacuacagcgugcuguacaacuccgccagcuucuccacguucaagugcuacggcgucagccccaccaagcucaacgaccugugcuucaccaacguguacgccgacuccuucgugauccgcggggacgagguccggcagaucgcccccggccagaccgggaagaucgccgacuacaacuacaagcugccggacgacuucacgggcugcgugaucgcguggaacagcaacaaccucgacuccaaggucgggggcaacuacaacuaccuguaccgccuguuccgcaagagcaaccucaagcccuucgagcgggacaucuccaccgagaucuaccaggccggcagcacccccugcaacgggguggagggcuucaacugcuacuucccccugcaguccuacggguuccagccgaccaacggcgugggguaccagcccuaccggguggucgugcugagcuucgagcuccugcacgcccccgccacggugugcggccccaagaaguccaccaaccuggucaagaacaagugcgugaacuucaacuucaacggccucaccgggaccggcgugcugaccgagagcaacaagaaguuccugccguuccagcaguucgggcgcgacaucgccgacacgaccgacgcgguccgcgacccccagacccuggagauccucgacaucacccccugcagcuucggcgggguguccgugaucacgccgggcaccaacaccagcaaccaggucgccgugcuguaccaggacgugaacugcaccgagguccccguggccauccacgccgaccagcugacgcccaccuggcggguguacuccaccggcagcaacgucuuccagacccgcgccgggugccucaucggcgcggagcacgugaacaacuccuacgagugcgacauccccaucggggccggcaucugcgccagcuaccagacgcagaccaacuccccgcggcgcgcccggagcguggcgucccagagcaucaucgccuacaccaugucccugggcgccgagaacagcgucgccuacuccaacaacagcaucgccauccccaccaacuucacgaucuccgugaccaccgagauccugcccgugagcaugaccaagacgagcgucgacugcaccauguacaucugcggggacuccaccgagugcagcaaccuccugcugcaguacggcuccuucugcacccagcucaaccgcgcgcugacggggaucgccguggagcaggacaagaacacccaggagguguucgcccaggucaagcagaucuacaagacgcccccgaucaaggacuucggcggguucaacuucagccagauccugcccgaccccuccaagcccagcaagcgguccuucaucgaggaccuccuguucaacaaggugacccuggccgacgccggcuucaucaagcaguacggcgacugccucggggacaucgcggcccgcgaccugaucugcgcccagaaguucaacggccugaccgugcucccgccccugcugaccgacgagaugaucgcccaguacaccagcgcccuccuggcggggaccaucacguccggcuggaccuucggggccggcgccgcccugcagauccccuucgcgaugcagauggccuaccgguucaacggcugcggggucacccagaacgugcucuacgagaaccagaagcugaucgccaaccaguucaacagcgccaucggcaagauccaggacucccugagcuccaccgccagcgcgcucgggaagcugcaggacguggucaaccagaacgcccaggcccugaacacgcucgugaagcagcuguccagcaacuucggcgccaucuccagcgugcugaacgacauccucucccgccuggacaaggucgaggccgaggugcagaucgaccggcugaucaccgggcgccuccagagccugcagaccuacgugacccagcagcugauccgggcggccgagauccgcgccagcgccaaccucgccgcgaccaagauguccgagugcguccugggccagagcaagcggguggacuucugcggcaaggggugccaccugauguccuucccccagagcgccccgcacggcguggucuuccuccacgugacguacguccccgcccaggagaagaacuucaccaccgcccccgcgaucugccacgacgggaaggcccacuucccccgcgagggcguguucguguccaacgggacccacugguucgucacgcagcggaacuucuacgagccgcagaucaucaccaccgacaacaccuucgugagcggcaacugcgacguggucaucggcaucgugaacaacacgguguacgacccccugcagcccgagcuggacuccuucaaggaggagcucgacaaguacuucaagaaccacaccagccccgacgucgaccugggggacaucuccggcaucaacgccagcguggugaacauccagaaggagaucgaccgccugaacgaggucgccaagaaccucaacgagucccugaucgaccugcaggagcucgggaaguacgagcaguacaucaag

SEQ ID NO: 11827 - RNA, 3633 nt, Artificial Sequence
  SARS-CoV-2/Wuhan/WIV05/2019__EPI_ISL_402128 spike protein CDS gc (1-1211)(Q965C_S1003C)
auguucguguuccugguccuccugccccuggugagcucccagugcgugaaccucaccacccgcacgcagcugccgcccgccuacaccaacagcuucacccggggcgucuacuaccccgacaagguguuccgcuccagcgugcugcacuccacccaggaccucuuccugcccuucuucagcaacgucacgugguuccacgccauccacguguccgggaccaacggcaccaagcgguucgacaacccggugcugcccuucaacgacggggucuacuucgcgagcaccgagaaguccaacaucauccgcggcuggaucuucgggacgacccucgacagcaagacccagucccugcugaucgugaacaacgccaccaacguggucaucaaggugugcgaguuccaguucugcaacgaccccuuccucggcguguacuaccacaagaacaacaagagcuggauggaguccgaguuccgggucuacagcuccgccaacaacugcacguucgaguacgugagccagcccuuccugauggaccuggagggcaagcaggggaacuucaagaaccuccgcgaguucguguucaagaacaucgacggcuacuucaagaucuacuccaagcacaccccgaucaaccugguccgggaccugccccagggguucagcgcccucgagccccugguggaccugcccaucggcaucaacaucacccgcuuccagacccuccuggcccugcaccgguccuaccucacgccgggggacagcagcuccggcuggaccgcgggcgccgccgccuacuacgugggguaccugcagccccgcaccuuccugcucaaguacaacgagaacggcaccaucacggacgcggucgacugcgcccuggacccccugagcgagaccaagugcacccucaaguccuucaccguggagaaggggaucuaccagacgagcaacuuccgggugcagcccaccgaguccaucguccgcuucccgaacaucaccaaccugugccccuucggcgagguguucaacgccacccgguucgccagcgucuacgccuggaaccgcaagcggaucuccaacugcguggcggacuacagcgugcuguacaacuccgccagcuucuccacguucaagugcuacggcgucagccccaccaagcucaacgaccugugcuucaccaacguguacgccgacuccuucgugauccgcggggacgagguccggcagaucgcccccggccagaccgggaagaucgccgacuacaacuacaagcugccggacgacuucacgggcugcgugaucgcguggaacagcaacaaccucgacuccaaggucgggggcaacuacaacuaccuguaccgccuguuccgcaagagcaaccucaagcccuucgagcgggacaucuccaccgagaucuaccaggccggcagcacccccugcaacgggguggagggcuucaacugcuacuucccccugcaguccuacggguuccagccgaccaacggcgugggguaccagcccuaccggguggucgugcugagcuucgagcuccugcacgcccccgccacggugugcggccccaagaaguccaccaaccuggucaagaacaagugcgugaacuucaacuucaacggccucaccgggaccggcgugcugaccgagagcaacaagaaguuccugccguuccagcaguucgggcgcgacaucgccgacacgaccgacgcgguccgcgacccccagacccuggagauccucgacaucacccccugcagcuucggcgggguguccgugaucacgccgggcaccaacaccagcaaccaggucgccgugcuguaccaggacgugaacugcaccgagguccccguggccauccacgccgaccagcugacgcccaccuggcggguguacuccaccggcagcaacgucuuccagacccgcgccgggugccucaucggcgcggagcacgugaacaacuccuacgagugcgacauccccaucggggccggcaucugcgccagcuaccagacgcagaccaacuccccgcggcgcgcccggagcguggcgucccagagcaucaucgccuacaccaugucccugggcgccgagaacagcgucgccuacuccaacaacagcaucgccauccccaccaacuucacgaucuccgugaccaccgagauccugcccgugagcaugaccaagacgagcgucgacugcaccauguacaucugcggggacuccaccgagugcagcaaccuccugcugcaguacggcuccuucugcacccagcucaaccgcgcgcugacggggaucgccguggagcaggacaagaacacccaggagguguucgcccaggucaagcagaucuacaagacgcccccgaucaaggacuucggcggguucaacuucagccagauccugcccgaccccuccaagcccagcaagcgguccuucaucgaggaccuccuguucaacaaggugacccuggccgacgccggcuucaucaagcaguacggcgacugccucggggacaucgcggcccgcgaccugaucugcgcccagaaguucaacggccugaccgugcucccgccccugcugaccgacgagaugaucgcccaguacaccagcgcccuccuggcggggaccaucacguccggcuggaccuucggggccggcgccgcccugcagauccccuucgcgaugcagauggccuaccgguucaacggcaucggggucacccagaacgugcucuacgagaaccagaagcugaucgccaaccaguucaacagcgccaucggcaagauccaggacucccugagcuccaccgccagcgcgcucgggaagcugcaggacguggucaaccagaacgcccaggcccugaacacgcucgugaagugccuguccagcaacuucggcgccaucuccagcgugcugaacgacauccucucccgccuggacaaggucgaggccgaggugcagaucgaccggcugaucaccgggcgccuccagugccugcagaccuacgugacccagcagcugauccgggcggccgagauccgcgccagcgccaaccucgccgcgaccaagauguccgagugcguccugggccagagcaagcggguggacuucugcggcaagggguaccaccugauguccuucccccagagcgccccgcacggcguggucuuccuccacgugacguacguccccgcccaggagaagaacuucaccaccgcccccgcgaucugccacgacgggaaggcccacuucccccgcgagggcguguucguguccaacgggacccacugguucgucacgcagcggaacuucuacgagccgcagaucaucaccaccgacaacaccuucgugagcggcaacugcgacguggucaucggcaucgugaacaacacgguguacgacccccugcagcccgagcuggacuccuucaaggaggagcucgacaaguacuucaagaaccacaccagccccgacgucgaccugggggacaucuccggcaucaacgccagcguggugaacauccagaaggagaucgaccgccugaacgaggucgccaagaaccucaacgagucccugaucgaccugcaggagcucgggaaguacgagcaguacaucaag

SEQ ID NO: 11828 - RNA, 3633 nt, Artificial Sequence
  SARS-CoV-2/Wuhan/WIV05/2019__EPI_ISL_402128 spike protein CDS gc (1-1211)(F970C_G999C)
auguucguguuccugguccuccugccccuggugagcucccagugcgugaaccucaccacccgcacgcagcugccgcccgccuacaccaacagcuucacccggggcgucuacuaccccgacaagguguuccgcuccagcgugcugcacuccacccaggaccucuuccugcccuucuucagcaacgucacgugguuccacgccauccacguguccgggaccaacggcaccaagcgguucgacaacccggugcugcccuucaacgacggggucuacuucgcgagcaccgagaaguccaacaucauccgcggcuggaucuucgggacgacccucgacagcaagacccagucccugcugaucgugaacaacgccaccaacguggucaucaaggugugcgaguuccaguucugcaacgaccccuuccucggcguguacuaccacaagaacaacaagagcuggauggaguccgaguuccgggucuacagcuccgccaacaacugcacguucgaguacgugagccagcccuuccugauggaccuggagggcaagcaggggaacuucaagaaccuccgcgaguucguguucaagaacaucgacggcuacuucaagaucuacuccaagcacaccccgaucaaccugguccgggaccugccccagggguucagcgcccucgagccccugguggaccugcccaucggcaucaacaucacccgcuuccagacccuccuggcccugcaccgguccuaccucacgccgggggacagcagcuccggcuggaccgcgggcgccgccgccuacuacgugggguaccugcagccccgcaccuuccugcucaaguacaacgagaacggcaccaucacggacgcggucgacugcgcccuggacccccugagcgagaccaagugcacccucaaguccuucaccguggagaaggggaucuaccagacgagcaacuuccgggugcagcccaccgaguccaucguccgcuucccgaacaucaccaaccugugccccuucggcgagguguucaacgccacccgguucgccagcgucuacgccuggaaccgcaagcggaucuccaacugcguggcggacuacagcgugcuguacaacuccgccagcuucuccacguucaagugcuacggcgucagccccaccaagcucaacgaccugugcuucaccaacguguacgccgacuccuucgugauccgcggggacgagguccggcagaucgcccccggccagaccgggaagaucgccgacuacaacuacaagcugccggacgacuucacgggcugcgugaucgcguggaacagcaacaaccucgacuccaaggucgggggcaacuacaacuaccuguaccgccuguuccgcaagagcaaccucaagcccuucgagcgggacaucuccaccgagaucuaccaggccggcagcacccccugcaacgggguggagggcuucaacugcuacuucccccugcaguccuacggguuccagccgaccaacggcgugggguaccagcccuaccggguggucgugcugagcuucgagcuccugcacgcccccgccacggugugcggccccaagaaguccaccaaccuggucaagaacaagugcgugaacuucaacuucaacggccucaccgggaccggcgugcugaccgagagcaacaagaaguuccugccguuccagcaguucgggcgcgacaucgccgacacgaccgacgcgguccgcgacccccagacccuggagauccucgacaucacccccugcagcuucggcgggguguccgugaucacgccgggcaccaacaccagcaaccaggucgccgugcuguaccaggacgugaacugcaccgagguccccguggccauccacgccgaccagcugacgcccaccuggcggguguacuccaccggcagcaacgucuuccagacccgcgccgggugccucaucggcgcggagcacgugaacaacuccuacgagugcgacauccccaucggggccggcaucugcgccagcuaccagacgcagaccaacuccccgcggcgcgcccggagcguggcgucccagagcaucaucgccuacaccaugucccugggcgccgagaacagcgucgccuacuccaacaacagcaucgccauccccaccaacuucacgaucuccgugaccaccgagauccugcccgugagcaugaccaagacgagcgucgacugcaccauguacaucugcggggacuccaccgagugcagcaaccuccugcugcaguacggcuccuucugcacccagcucaaccgcgcgcugacggggaucgccguggagcaggacaagaacacccaggagguguucgcccaggucaagcagaucuacaagacgcccccgaucaaggacuucggcggguucaacuucagccagauccugcccgaccccuccaagcccagcaagcgguccuucaucgaggaccuccuguucaacaaggugacccuggccgacgccggcuucaucaagcaguacggcgacugccucggggacaucgcggcccgcgaccugaucugcgcccagaaguucaacggccugaccgugcucccgccccugcugaccgacgagaugaucgcccaguacaccagcgcccuccuggcggggaccaucacguccggcuggaccuucggggccggcgccgcccugcagauccccuucgcgaugcagauggccuaccgguucaacggcaucggggucacccagaacgugcucuacgagaaccagaagcugaucgccaaccaguucaacagcgccaucggcaagauccaggacucccugagcuccaccgccagcgcgcucgggaagcugcaggacguggucaaccagaacgcccaggcccugaacacgcucgugaagcagcuguccagcaacugcggcgccaucuccagcgugcugaacgacauccucucccgccuggacaaggucgaggccgaggugcagaucgaccggcugaucaccugucgccuccagagccugcagaccuacgugacccagcagcugauccgggcggccgagauccgcgccagcgccaaccucgccgcgaccaagauguccgagugcguccugggccagagcaagcggguggacuucugcggcaagggguaccaccugauguccuucccccagagcgccccgcacggcguggucuuccuccacgugacguacguccccgcccaggagaagaacuucaccaccgcccccgcgaucugccacgacgggaaggcccacuucccccgcgagggcguguucguguccaacgggacccacugguucgucacgcagcggaacuucuacgagccgcagaucaucaccaccgacaacaccuucgugagcggcaacugcgacguggucaucggcaucgugaacaacacgguguacgacccccugcagcccgagcuggacuccuucaaggaggagcucgacaaguacuucaagaaccacaccagccccgacgucgaccugggggacaucuccggcaucaacgccagcguggugaacauccagaaggagaucgaccgccugaacgaggucgccaagaaccucaacgagucccugaucgaccugcaggagcucgggaaguacgagcaguacaucaag

SEQ ID NO: 11829 - RNA, 3633 nt, Artificial Sequence
  SARS-CoV-2/Wuhan/WIV05/2019__EPI_ISL_402128 spike protein CDS gc (1-1211)(A972C_R995C)
auguucguguuccugguccuccugccccuggugagcucccagugcgugaaccucaccacccgcacgcagcugccgcccgccuacaccaacagcuucacccggggcgucuacuaccccgacaagguguuccgcuccagcgugcugcacuccacccaggaccucuuccugcccuucuucagcaacgucacgugguuccacgccauccacguguccgggaccaacggcaccaagcgguucgacaacccggugcugcccuucaacgacggggucuacuucgcgagcaccgagaaguccaacaucauccgcggcuggaucuucgggacgacccucgacagcaagacccagucccugcugaucgugaacaacgccaccaacguggucaucaaggugugcgaguuccaguucugcaacgaccccuuccucggcguguacuaccacaagaacaacaagagcuggauggaguccgaguuccgggucuacagcuccgccaacaacugcacguucgaguacgugagccagcccuuccugauggaccuggagggcaagcaggggaacuucaagaaccuccgcgaguucguguucaagaacaucgacggcuacuucaagaucuacuccaagcacaccccgaucaaccugguccgggaccugccccagggguucagcgcccucgagccccugguggaccugcccaucggcaucaacaucacccgcuuccagacccuccuggcccugcaccgguccuaccucacgccgggggacagcagcuccggcuggaccgcgggcgccgccgccuacuacgugggguaccugcagccccgcaccuuccugcucaaguacaacgagaacggcaccaucacggacgcggucgacugcgcccuggacccccugagcgagaccaagugcacccucaaguccuucaccguggagaaggggaucuaccagacgagcaacuuccgggugcagcccaccgaguccaucguccgcuucccgaacaucaccaaccugugccccuucggcgagguguucaacgccacccgguucgccagcgucuacgccuggaaccgcaagcggaucuccaacugcguggcggacuacagcgugcuguacaacuccgccagcuucuccacguucaagugcuacggcgucagccccaccaagcucaacgaccugugcuucaccaacguguacgccgacuccuucgugauccgcggggacgagguccggcagaucgcccccggccagaccgggaagaucgccgacuacaacuacaagcugccggacgacuucacgggcugcgugaucgcguggaacagcaacaaccucgacuccaaggucgggggcaacuacaacuaccuguaccgccuguuccgcaagagcaaccucaagcccuucgagcgggacaucuccaccgagaucuaccaggccggcagcacccccugcaacgggguggagggcuucaacugcuacuucccccugcaguccuacggguuccagccgaccaacggcgugggguaccagcccuaccggguggucgugcugagcuucgagcuccugcacgcccccgccacggugugcggccccaagaaguccaccaaccuggucaagaacaagugcgugaacuucaacuucaacggccucaccgggaccggcgugcugaccgagagcaacaagaaguuccugccguuccagcaguucgggcgcgacaucgccgacacgaccgacgcgguccgcgacccccagacccuggagauccucgacaucacccccugcagcuucggcgggguguccgugaucacgccgggcaccaacaccagcaaccaggucgccgugcuguaccaggacgugaacugcaccgagguccccguggccauccacgccgaccagcugacgcccaccuggcggguguacuccaccggcagcaacgucuuccagacccgcgccgggugccucaucggcgcggagcacgugaacaacuccuacgagugcgacauccccaucggggccggcaucugcgccagcuaccagacgcagaccaacuccccgcggcgcgcccggagcguggcgucccagagcaucaucgccuacaccaugucccugggcgccgagaacagcgucgccuacuccaacaacagcaucgccauccccaccaacuucacgaucuccgugaccaccgagauccugcccgugagcaugaccaagacgagcgucgacugcaccauguacaucugcggggacuccaccgagugcagcaaccuccugcugcaguacggcuccuucugcacccagcucaaccgcgcgcugacggggaucgccguggagcaggacaagaacacccaggagguguucgcccaggucaagcagaucuacaagacgcccccgaucaaggacuucggcggguucaacuucagccagauccugcccgaccccuccaagcccagcaagcgguccuucaucgaggaccuccuguucaacaaggugacccuggccgacgccggcuucaucaagcaguacggcgacugccucggggacaucgcggcccgcgaccugaucugcgcccagaaguucaacggccugaccgugcucccgccccugcugaccgacgagaugaucgcccaguacaccagcgcccuccuggcggggaccaucacguccggcuggaccuucggggccggcgccgcccugcagauccccuucgcgaugcagauggccuaccgguucaacggcaucggggucacccagaacgugcucuacgagaaccagaagcugaucgccaaccaguucaacagcgccaucggcaagauccaggacucccugagcuccaccgccagcgcgcucgggaagcugcaggacguggucaaccagaacgcccaggcccugaacacgcucgugaagcagcuguccagcaacuucggcugcaucuccagcgugcugaacgacauccucucccgccuggacaaggucgaggccgaggugcagaucgacugccugaucaccgggcgccuccagagccugcagaccuacgugacccagcagcugauccgggcggccgagauccgcgccagcgccaaccucgccgcgaccaagauguccgagugcguccugggccagagcaagcggguggacuucugcggcaagggguaccaccugauguccuucccccagagcgccccgcacggcguggucuuccuccacgugacguacguccccgcccaggagaagaacuucaccaccgcccccgcgaucugccacgacgggaaggcccacuucccccgcgagggcguguucguguccaacgggacccacugguucgucacgcagcggaacuucuacgagccgcagaucaucaccaccgacaacaccuucgugagcggcaacugcgacguggucaucggcaucgugaacaacacgguguacgacccccugcagcccgagcuggacuccuucaaggaggagcucgacaaguacuucaagaaccacaccagccccgacgucgaccugggggacaucuccggcaucaacgccagcguggugaacauccagaaggagaucgaccgccugaacgaggucgccaagaaccucaacgagucccugaucgaccugcaggagcucgggaaguacgagcaguacaucaag

SEQ ID NO: 11830 - RNA, 3633 nt, Artificial Sequence
  SARS-CoV-2/Wuhan/WIV05/2019__EPI_ISL_402128 spike protein CDS gc (1-1211)(A890C_V1040C)
auguucguguuccugguccuccugccccuggugagcucccagugcgugaaccucaccacccgcacgcagcugccgcccgccuacaccaacagcuucacccggggcgucuacuaccccgacaagguguuccgcuccagcgugcugcacuccacccaggaccucuuccugcccuucuucagcaacgucacgugguuccacgccauccacguguccgggaccaacggcaccaagcgguucgacaacccggugcugcccuucaacgacggggucuacuucgcgagcaccgagaaguccaacaucauccgcggcuggaucuucgggacgacccucgacagcaagacccagucccugcugaucgugaacaacgccaccaacguggucaucaaggugugcgaguuccaguucugcaacgaccccuuccucggcguguacuaccacaagaacaacaagagcuggauggaguccgaguuccgggucuacagcuccgccaacaacugcacguucgaguacgugagccagcccuuccugauggaccuggagggcaagcaggggaacuucaagaaccuccgcgaguucguguucaagaacaucgacggcuacuucaagaucuacuccaagcacaccccgaucaaccugguccgggaccugccccagggguucagcgcccucgagccccugguggaccugcccaucggcaucaacaucacccgcuuccagacccuccuggcccugcaccgguccuaccucacgccgggggacagcagcuccggcuggaccgcgggcgccgccgccuacuacgugggguaccugcagccccgcaccuuccugcucaaguacaacgagaacggcaccaucacggacgcggucgacugcgcccuggacccccugagcgagaccaagugcacccucaaguccuucaccguggagaaggggaucuaccagacgagcaacuuccgggugcagcccaccgaguccaucguccgcuucccgaacaucaccaaccugugccccuucggcgagguguucaacgccacccgguucgccagcgucuacgccuggaaccgcaagcggaucuccaacugcguggcggacuacagcgugcuguacaacuccgccagcuucuccacguucaagugcuacggcgucagccccaccaagcucaacgaccugugcuucaccaacguguacgccgacuccuucgugauccgcggggacgagguccggcagaucgcccccggccagaccgggaagaucgccgacuacaacuacaagcugccggacgacuucacgggcugcgugaucgcguggaacagcaacaaccucgacuccaaggucgggggcaacuacaacuaccuguaccgccuguuccgcaagagcaaccucaagcccuucgagcgggacaucuccaccgagaucuaccaggccggcagcacccccugcaacgggguggagggcuucaacugcuacuucccccugcaguccuacggguuccagccgaccaacggcgugggguaccagcccuaccggguggucgugcugagcuucgagcuccugcacgcccccgccacggugugcggccccaagaaguccaccaaccuggucaagaacaagugcgugaacuucaacuucaacggccucaccgggaccggcgugcugaccgagagcaacaagaaguuccugccguuccagcaguucgggcgcgacaucgccgacacgaccgacgcgguccgcgacccccagacccuggagauccucgacaucacccccugcagcuucggcgggguguccgugaucacgccgggcaccaacaccagcaaccaggucgccgugcuguaccaggacgugaacugcaccgagguccccguggccauccacgccgaccagcugacgcccaccuggcggguguacuccaccggcagcaacgucuuccagacccgcgccgggugccucaucggcgcggagcacgugaacaacuccuacgagugcgacauccccaucggggccggcaucugcgccagcuaccagacgcagaccaacuccccgcggcgcgcccggagcguggcgucccagagcaucaucgccuacaccaugucccugggcgccgagaacagcgucgccuacuccaacaacagcaucgccauccccaccaacuucacgaucuccgugaccaccgagauccugcccgugagcaugaccaagacgagcgucgacugcaccauguacaucugcggggacuccaccgagugcagcaaccuccugcugcaguacggcuccuucugcacccagcucaaccgcgcgcugacggggaucgccguggagcaggacaagaacacccaggagguguucgcccaggucaagcagaucuacaagacgcccccgaucaaggacuucggcggguucaacuucagccagauccugcccgaccccuccaagcccagcaagcgguccuucaucgaggaccuccuguucaacaaggugacccuggccgacgccggcuucaucaagcaguacggcgacugccucggggacaucgcggcccgcgaccugaucugcgcccagaaguucaacggccugaccgugcucccgccccugcugaccgacgagaugaucgcccaguacaccagcgcccuccuggcggggaccaucacguccggcuggaccuucgggugcggcgccgcccugcagauccccuucgcgaugcagauggccuaccgguucaacggcaucggggucacccagaacgugcucuacgagaaccagaagcugaucgccaaccaguucaacagcgccaucggcaagauccaggacucccugagcuccaccgccagcgcgcucgggaagcugcaggacguggucaaccagaacgcccaggcccugaacacgcucgugaagcagcuguccagcaacuucggcgccaucuccagcgugcugaacgacauccucucccgccuggacaaggucgaggccgaggugcagaucgaccggcugaucaccgggcgccuccagagccugcagaccuacgugacccagcagcugauccgggcggccgagauccgcgccagcgccaaccucgccgcgaccaagauguccgagugcguccugggccagagcaagcggugcgacuucugcggcaagggguaccaccugauguccuucccccagagcgccccgcacggcguggucuuccuccacgugacguacguccccgcccaggagaagaacuucaccaccgcccccgcgaucugccacgacgggaaggcccacuucccccgcgagggcguguucguguccaacgggacccacugguucgucacgcagcggaacuucuacgagccgcagaucaucaccaccgacaacaccuucgugagcggcaacugcgacguggucaucggcaucgugaacaacacgguguacgacccccugcagcccgagcuggacuccuucaaggaggagcucgacaaguacuucaagaaccacaccagccccgacgucgaccugggggacaucuccggcaucaacgccagcguggugaacauccagaaggagaucgaccgccugaacgaggucgccaagaaccucaacgagucccugaucgaccugcaggagcucgggaaguacgagcaguacaucaag

SEQ ID NO: 11831 - RNA, 3633 nt, Artificial Sequence
  SARS-CoV-2/Wuhan/WIV05/2019__EPI_ISL_402128 spike protein CDS gc (1-1211)(T874C_S1055C)
auguucguguuccugguccuccugccccuggugagcucccagugcgugaaccucaccacccgcacgcagcugccgcccgccuacaccaacagcuucacccggggcgucuacuaccccgacaagguguuccgcuccagcgugcugcacuccacccaggaccucuuccugcccuucuucagcaacgucacgugguuccacgccauccacguguccgggaccaacggcaccaagcgguucgacaacccggugcugcccuucaacgacggggucuacuucgcgagcaccgagaaguccaacaucauccgcggcuggaucuucgggacgacccucgacagcaagacccagucccugcugaucgugaacaacgccaccaacguggucaucaaggugugcgaguuccaguucugcaacgaccccuuccucggcguguacuaccacaagaacaacaagagcuggauggaguccgaguuccgggucuacagcuccgccaacaacugcacguucgaguacgugagccagcccuuccugauggaccuggagggcaagcaggggaacuucaagaaccuccgcgaguucguguucaagaacaucgacggcuacuucaagaucuacuccaagcacaccccgaucaaccugguccgggaccugccccagggguucagcgcccucgagccccugguggaccugcccaucggcaucaacaucacccgcuuccagacccuccuggcccugcaccgguccuaccucacgccgggggacagcagcuccggcuggaccgcgggcgccgccgccuacuacgugggguaccugcagccccgcaccuuccugcucaaguacaacgagaacggcaccaucacggacgcggucgacugcgcccuggacccccugagcgagaccaagugcacccucaaguccuucaccguggagaaggggaucuaccagacgagcaacuuccgggugcagcccaccgaguccaucguccgcuucccgaacaucaccaaccugugccccuucggcgagguguucaacgccacccgguucgccagcgucuacgccuggaaccgcaagcggaucuccaacugcguggcggacuacagcgugcuguacaacuccgccagcuucuccacguucaagugcuacggcgucagccccaccaagcucaacgaccugugcuucaccaacguguacgccgacuccuucgugauccgcggggacgagguccggcagaucgcccccggccagaccgggaagaucgccgacuacaacuacaagcugccggacgacuucacgggcugcgugaucgcguggaacagcaacaaccucgacuccaaggucgggggcaacuacaacuaccuguaccgccuguuccgcaagagcaaccucaagcccuucgagcgggacaucuccaccgagaucuaccaggccggcagcacccccugcaacgggguggagggcuucaacugcuacuucccccugcaguccuacggguuccagccgaccaacggcgugggguaccagcccuaccggguggucgugcugagcuucgagcuccugcacgcccccgccacggugugcggccccaagaaguccaccaaccuggucaagaacaagugcgugaacuucaacuucaacggccucaccgggaccggcgugcugaccgagagcaacaagaaguuccugccguuccagcaguucgggcgcgacaucgccgacacgaccgacgcgguccgcgacccccagacccuggagauccucgacaucacccccugcagcuucggcgggguguccgugaucacgccgggcaccaacaccagcaaccaggucgccgugcuguaccaggacgugaacugcaccgagguccccguggccauccacgccgaccagcugacgcccaccuggcggguguacuccaccggcagcaacgucuuccagacccgcgccgggugccucaucggcgcggagcacgugaacaacuccuacgagugcgacauccccaucggggccggcaucugcgccagcuaccagacgcagaccaacuccccgcggcgcgcccggagcguggcgucccagagcaucaucgccuacaccaugucccugggcgccgagaacagcgucgccuacuccaacaacagcaucgccauccccaccaacuucacgaucuccgugaccaccgagauccugcccgugagcaugaccaagacgagcgucgacugcaccauguacaucugcggggacuccaccgagugcagcaaccuccugcugcaguacggcuccuucugcacccagcucaaccgcgcgcugacggggaucgccguggagcaggacaagaacacccaggagguguucgcccaggucaagcagaucuacaagacgcccccgaucaaggacuucggcggguucaacuucagccagauccugcccgaccccuccaagcccagcaagcgguccuucaucgaggaccuccuguucaacaaggugacccuggccgacgccggcuucaucaagcaguacggcgacugccucggggacaucgcggcccgcgaccugaucugcgcccagaaguucaacggccugaccgugcucccgccccugcugaccgacgagaugaucgcccaguacugcagcgcccuccuggcggggaccaucacguccggcuggaccuucggggccggcgccgcccugcagauccccuucgcgaugcagauggccuaccgguucaacggcaucggggucacccagaacgugcucuacgagaaccagaagcugaucgccaaccaguucaacagcgccaucggcaagauccaggacucccugagcuccaccgccagcgcgcucgggaagcugcaggacguggucaaccagaacgcccaggcccugaacacgcucgugaagcagcuguccagcaacuucggcgccaucuccagcgugcugaacgacauccucucccgccuggacaaggucgaggccgaggugcagaucgaccggcugaucaccgggcgccuccagagccugcagaccuacgugacccagcagcugauccgggcggccgagauccgcgccagcgccaaccucgccgcgaccaagauguccgagugcguccugggccagagcaagcggguggacuucugcggcaagggguaccaccugauguccuucccccagugcgccccgcacggcguggucuuccuccacgugacguacguccccgcccaggagaagaacuucaccaccgcccccgcgaucugccacgacgggaaggcccacuucccccgcgagggcguguucguguccaacgggacccacugguucgucacgcagcggaacuucuacgagccgcagaucaucaccaccgacaacaccuucgugagcggcaacugcgacguggucaucggcaucgugaacaacacgguguacgacccccugcagcccgagcuggacuccuucaaggaggagcucgacaaguacuucaagaaccacaccagccccgacgucgaccugggggacaucuccggcaucaacgccagcguggugaacauccagaaggagaucgaccgccugaacgaggucgccaagaaccucaacgagucccugaucgaccugcaggagcucgggaaguacgagcaguacaucaag

SEQ ID NO: 11832 - RNA, 3441 nt, Artificial Sequence
  SARS-CoV-2/Wuhan/WIV05/2019__EPI_ISL_402128 spike protein CDS gc (1-1147)
auguucguguuccugguccuccugccccuggugagcucccagugcgugaaccucaccacccgcacgcagcugccgcccgccuacaccaacagcuucacccggggcgucuacuaccccgacaagguguuccgcuccagcgugcugcacuccacccaggaccucuuccugcccuucuucagcaacgucacgugguuccacgccauccacguguccgggaccaacggcaccaagcgguucgacaacccggugcugcccuucaacgacggggucuacuucgcgagcaccgagaaguccaacaucauccgcggcuggaucuucgggacgacccucgacagcaagacccagucccugcugaucgugaacaacgccaccaacguggucaucaaggugugcgaguuccaguucugcaacgaccccuuccucggcguguacuaccacaagaacaacaagagcuggauggaguccgaguuccgggucuacagcuccgccaacaacugcacguucgaguacgugagccagcccuuccugauggaccuggagggcaagcaggggaacuucaagaaccuccgcgaguucguguucaagaacaucgacggcuacuucaagaucuacuccaagcacaccccgaucaaccugguccgggaccugccccagggguucagcgcccucgagccccugguggaccugcccaucggcaucaacaucacccgcuuccagacccuccuggcccugcaccgguccuaccucacgccgggggacagcagcuccggcuggaccgcgggcgccgccgccuacuacgugggguaccugcagccccgcaccuuccugcucaaguacaacgagaacggcaccaucacggacgcggucgacugcgcccuggacccccugagcgagaccaagugcacccucaaguccuucaccguggagaaggggaucuaccagacgagcaacuuccgggugcagcccaccgaguccaucguccgcuucccgaacaucaccaaccugugccccuucggcgagguguucaacgccacccgguucgccagcgucuacgccuggaaccgcaagcggaucuccaacugcguggcggacuacagcgugcuguacaacuccgccagcuucuccacguucaagugcuacggcgucagccccaccaagcucaacgaccugugcuucaccaacguguacgccgacuccuucgugauccgcggggacgagguccggcagaucgcccccggccagaccgggaagaucgccgacuacaacuacaagcugccggacgacuucacgggcugcgugaucgcguggaacagcaacaaccucgacuccaaggucgggggcaacuacaacuaccuguaccgccuguuccgcaagagcaaccucaagcccuucgagcgggacaucuccaccgagaucuaccaggccggcagcacccccugcaacgggguggagggcuucaacugcuacuucccccugcaguccuacggguuccagccgaccaacggcgugggguaccagcccuaccggguggucgugcugagcuucgagcuccugcacgcccccgccacggugugcggccccaagaaguccaccaaccuggucaagaacaagugcgugaacuucaacuucaacggccucaccgggaccggcgugcugaccgagagcaacaagaaguuccugccguuccagcaguucgggcgcgacaucgccgacacgaccgacgcgguccgcgacccccagacccuggagauccucgacaucacccccugcagcuucggcgggguguccgugaucacgccgggcaccaacaccagcaaccaggucgccgugcuguaccaggacgugaacugcaccgagguccccguggccauccacgccgaccagcugacgcccaccuggcggguguacuccaccggcagcaacgucuuccagacccgcgccgggugccucaucggcgcggagcacgugaacaacuccuacgagugcgacauccccaucggggccggcaucugcgccagcuaccagacgcagaccaacuccccgcggcgcgcccggagcguggcgucccagagcaucaucgccuacaccaugucccugggcgccgagaacagcgucgccuacuccaacaacagcaucgccauccccaccaacuucacgaucuccgugaccaccgagauccugcccgugagcaugaccaagacgagcgucgacugcaccauguacaucugcggggacuccaccgagugcagcaaccuccugcugcaguacggcuccuucugcacccagcucaaccgcgcgcugacggggaucgccguggagcaggacaagaacacccaggagguguucgcccaggucaagcagaucuacaagacgcccccgaucaaggacuucggcggguucaacuucagccagauccugcccgaccccuccaagcccagcaagcgguccuucaucgaggaccuccuguucaacaaggugacccuggccgacgccggcuucaucaagcaguacggcgacugccucggggacaucgcggcccgcgaccugaucugcgcccagaaguucaacggccugaccgugcucccgccccugcugaccgacgagaugaucgcccaguacaccagcgcccuccuggcggggaccaucacguccggcuggaccuucggggccggcgccgcccugcagauccccuucgcgaugcagauggccuaccgguucaacggcaucggggucacccagaacgugcucuacgagaaccagaagcugaucgccaaccaguucaacagcgccaucggcaagauccaggacucccugagcuccaccgccagcgcgcucgggaagcugcaggacguggucaaccagaacgcccaggcccugaacacgcucgugaagcagcuguccagcaacuucggcgccaucuccagcgugcugaacgacauccucucccgccuggacaaggucgaggccgaggugcagaucgaccggcugaucaccgggcgccuccagagccugcagaccuacgugacccagcagcugauccgggcggccgagauccgcgccagcgccaaccucgccgcgaccaagauguccgagugcguccugggccagagcaagcggguggacuucugcggcaagggguaccaccugauguccuucccccagagcgccccgcacggcguggucuuccuccacgugacguacguccccgcccaggagaagaacuucaccaccgcccccgcgaucugccacgacgggaaggcccacuucccccgcgagggcguguucguguccaacgggacccacugguucgucacgcagcggaacuucuacgagccgcagaucaucaccaccgacaacaccuucgugagcggcaacugcgacguggucaucggcaucgugaacaacacgguguacgacccccugcagcccgagcuggacucc

SEQ ID NO: 11833 - RNA, 3441 nt, Artificial Sequence
  SARS-CoV-2/Wuhan/WIV05/2019__EPI_ISL_402128 spike protein CDS gc (1-1147)(K986P_V987P)
auguucguguuccugguccuccugccccuggugagcucccagugcgugaaccucaccacccgcacgcagcugccgcccgccuacaccaacagcuucacccggggcgucuacuaccccgacaagguguuccgcuccagcgugcugcacuccacccaggaccucuuccugcccuucuucagcaacgucacgugguuccacgccauccacguguccgggaccaacggcaccaagcgguucgacaacccggugcugcccuucaacgacggggucuacuucgcgagcaccgagaaguccaacaucauccgcggcuggaucuucgggacgacccucgacagcaagacccagucccugcugaucgugaacaacgccaccaacguggucaucaaggugugcgaguuccaguucugcaacgaccccuuccucggcguguacuaccacaagaacaacaagagcuggauggaguccgaguuccgggucuacagcuccgccaacaacugcacguucgaguacgugagccagcccuuccugauggaccuggagggcaagcaggggaacuucaagaaccuccgcgaguucguguucaagaacaucgacggcuacuucaagaucuacuccaagcacaccccgaucaaccugguccgggaccugccccagggguucagcgcccucgagccccugguggaccugcccaucggcaucaacaucacccgcuuccagacccuccuggcccugcaccgguccuaccucacgccgggggacagcagcuccggcuggaccgcgggcgccgccgccuacuacgugggguaccugcagccccgcaccuuccugcucaaguacaacgagaacggcaccaucacggacgcggucgacugcgcccuggacccccugagcgagaccaagugcacccucaaguccuucaccguggagaaggggaucuaccagacgagcaacuuccgggugcagcccaccgaguccaucguccgcuucccgaacaucaccaaccugugccccuucggcgagguguucaacgccacccgguucgccagcgucuacgccuggaaccgcaagcggaucuccaacugcguggcggacuacagcgugcuguacaacuccgccagcuucuccacguucaagugcuacggcgucagccccaccaagcucaacgaccugugcuucaccaacguguacgccgacuccuucgugauccgcggggacgagguccggcagaucgcccccggccagaccgggaagaucgccgacuacaacuacaagcugccggacgacuucacgggcugcgugaucgcguggaacagcaacaaccucgacuccaaggucgggggcaacuacaacuaccuguaccgccuguuccgcaagagcaaccucaagcccuucgagcgggacaucuccaccgagaucuaccaggccggcagcacccccugcaacgggguggagggcuucaacugcuacuucccccugcaguccuacggguuccagccgaccaacggcgugggguaccagcccuaccggguggucgugcugagcuucgagcuccugcacgcccccgccacggugugcggccccaagaaguccaccaaccuggucaagaacaagugcgugaacuucaacuucaacggccucaccgggaccggcgugcugaccgagagcaacaagaaguuccugccguuccagcaguucgggcgcgacaucgccgacacgaccgacgcgguccgcgacccccagacccuggagauccucgacaucacccccugcagcuucggcgggguguccgugaucacgccgggcaccaacaccagcaaccaggucgccgugcuguaccaggacgugaacugcaccgagguccccguggccauccacgccgaccagcugacgcccaccuggcggguguacuccaccggcagcaacgucuuccagacccgcgccgggugccucaucggcgcggagcacgugaacaacuccuacgagugcgacauccccaucggggccggcaucugcgccagcuaccagacgcagaccaacuccccgcggcgcgcccggagcguggcgucccagagcaucaucgccuacaccaugucccugggcgccgagaacagcgucgccuacuccaacaacagcaucgccauccccaccaacuucacgaucuccgugaccaccgagauccugcccgugagcaugaccaagacgagcgucgacugcaccauguacaucugcggggacuccaccgagugcagcaaccuccugcugcaguacggcuccuucugcacccagcucaaccgcgcgcugacggggaucgccguggagcaggacaagaacacccaggagguguucgcccaggucaagcagaucuacaagacgcccccgaucaaggacuucggcggguucaacuucagccagauccugcccgaccccuccaagcccagcaagcgguccuucaucgaggaccuccuguucaacaaggugacccuggccgacgccggcuucaucaagcaguacggcgacugccucggggacaucgcggcccgcgaccugaucugcgcccagaaguucaacggccugaccgugcucccgccccugcugaccgacgagaugaucgcccaguacaccagcgcccuccuggcggggaccaucacguccggcuggaccuucggggccggcgccgcccugcagauccccuucgcgaugcagauggccuaccgguucaacggcaucggggucacccagaacgugcucuacgagaaccagaagcugaucgccaaccaguucaacagcgccaucggcaagauccaggacucccugagcuccaccgccagcgcgcucgggaagcugcaggacguggucaaccagaacgcccaggcccugaacacgcucgugaagcagcuguccagcaacuucggcgccaucuccagcgugcugaacgacauccucucccgccuggacccgcccgaggccgaggugcagaucgaccggcugaucaccgggcgccuccagagccugcagaccuacgugacccagcagcugauccgggcggccgagauccgcgccagcgccaaccucgccgcgaccaagauguccgagugcguccugggccagagcaagcggguggacuucugcggcaagggguaccaccugauguccuucccccagagcgccccgcacggcguggucuuccuccacgugacguacguccccgcccaggagaagaacuucaccaccgcccccgcgaucugccacgacgggaaggcccacuucccccgcgagggcguguucguguccaacgggacccacugguucgucacgcagcggaacuucuacgagccgcagaucaucaccaccgacaacaccuucgugagcggcaacugcgacguggucaucggcaucgugaacaacacgguguacgacccccugcagcccgagcuggacucc

SEQ ID NO: 11834 - RNA, 3441 nt, Artificial Sequence
  SARS-CoV-2/Wuhan/WIV05/2019__EPI_ISL_402128 spike protein CDS gc (1-1147)(K986P_V987P_T887WN_A1020W)
auguucguguuccugguccuccugccccuggugagcucccagugcgugaaccucaccacccgcacgcagcugccgcccgccuacaccaacagcuucacccggggcgucuacuaccccgacaagguguuccgcuccagcgugcugcacuccacccaggaccucuuccugcccuucuucagcaacgucacgugguuccacgccauccacguguccgggaccaacggcaccaagcgguucgacaacccggugcugcccuucaacgacggggucuacuucgcgagcaccgagaaguccaacaucauccgcggcuggaucuucgggacgacccucgacagcaagacccagucccugcugaucgugaacaacgccaccaacguggucaucaaggugugcgaguuccaguucugcaacgaccccuuccucggcguguacuaccacaagaacaacaagagcuggauggaguccgaguuccgggucuacagcuccgccaacaacugcacguucgaguacgugagccagcccuuccugauggaccuggagggcaagcaggggaacuucaagaaccuccgcgaguucguguucaagaacaucgacggcuacuucaagaucuacuccaagcacaccccgaucaaccugguccgggaccugccccagggguucagcgcccucgagccccugguggaccugcccaucggcaucaacaucacccgcuuccagacccuccuggcccugcaccgguccuaccucacgccgggggacagcagcuccggcuggaccgcgggcgccgccgccuacuacgugggguaccugcagccccgcaccuuccugcucaaguacaacgagaacggcaccaucacggacgcggucgacugcgcccuggacccccugagcgagaccaagugcacccucaaguccuucaccguggagaaggggaucuaccagacgagcaacuuccgggugcagcccaccgaguccaucguccgcuucccgaacaucaccaaccugugccccuucggcgagguguucaacgccacccgguucgccagcgucuacgccuggaaccgcaagcggaucuccaacugcguggcggacuacagcgugcuguacaacuccgccagcuucuccacguucaagugcuacggcgucagccccaccaagcucaacgaccugugcuucaccaacguguacgccgacuccuucgugauccgcggggacgagguccggcagaucgcccccggccagaccgggaagaucgccgacuacaacuacaagcugccggacgacuucacgggcugcgugaucgcguggaacagcaacaaccucgacuccaaggucgggggcaacuacaacuaccuguaccgccuguuccgcaagagcaaccucaagcccuucgagcgggacaucuccaccgagaucuaccaggccggcagcacccccugcaacgggguggagggcuucaacugcuacuucccccugcaguccuacggguuccagccgaccaacggcgugggguaccagcccuaccggguggucgugcugagcuucgagcuccugcacgcccccgccacggugugcggccccaagaaguccaccaaccuggucaagaacaagugcgugaacuucaacuucaacggccucaccgggaccggcgugcugaccgagagcaacaagaaguuccugccguuccagcaguucgggcgcgacaucgccgacacgaccgacgcgguccgcgacccccagacccuggagauccucgacaucacccccugcagcuucggcgggguguccgugaucacgccgggcaccaacaccagcaaccaggucgccgugcuguaccaggacgugaacugcaccgagguccccguggccauccacgccgaccagcugacgcccaccuggcggguguacuccaccggcagcaacgucuuccagacccgcgccgggugccucaucggcgcggagcacgugaacaacuccuacgagugcgacauccccaucggggccggcaucugcgccagcuaccagacgcagaccaacuccccgcggcgcgcccggagcguggcgucccagagcaucaucgccuacaccaugucccugggcgccgagaacagcgucgccuacuccaacaacagcaucgccauccccaccaacuucacgaucuccgugaccaccgagauccugcccgugagcaugaccaagacgagcgucgacugcaccauguacaucugcggggacuccaccgagugcagcaaccuccugcugcaguacggcuccuucugcacccagcucaaccgcgcgcugacggggaucgccguggagcaggacaagaacacccaggagguguucgcccaggucaagcagaucuacaagacgcccccgaucaaggacuucggcggguucaacuucagccagauccugcccgaccccuccaagcccagcaagcgguccuucaucgaggaccuccuguucaacaaggugacccuggccgacgccggcuucaucaagcaguacggcgacugccucggggacaucgcggcccgcgaccugaucugcgcccagaaguucaacggccugaccgugcucccgccccugcugaccgacgagaugaucgcccaguacaccagcgcccuccuggcggggaccaucacguccggcuggugguucggggccggcgccgcccugcagauccccuucgcgaugcagauggccuaccgguucaacggcaucggggucacccagaacgugcucuacgagaaccagaagcugaucgccaaccaguucaacagcgccaucggcaagauccaggacucccugagcuccaccgccagcgcgcucgggaagcugcaggacguggucaaccagaacgcccaggcccugaacacgcucgugaagcagcuguccagcaacuucggcgccaucuccagcgugcugaacgacauccucucccgccuggacccgcccgaggccgaggugcagaucgaccggcugaucaccgggcgccuccagagccugcagaccuacgugacccagcagcugauccgggcggccgagauccgcuggagcgccaaccucgccgcgaccaagauguccgagugcguccugggccagagcaagcggguggacuucugcggcaagggguaccaccugauguccuucccccagagcgccccgcacggcguggucuuccuccacgugacguacguccccgcccaggagaagaacuucaccaccgcccccgcgaucugccacgacgggaaggcccacuucccccgcgagggcguguucguguccaacgggacccacugguucgucacgcagcggaacuucuacgagccgcagaucaucaccaccgacaacaccuucgugagcggcaacugcgacguggucaucggcaucgugaacaacacgguguacgacccccugcagcccgagcuggacucc

SEQ ID NO: 11835 - RNA, 3441 nt, Artificial Sequence
  SARS-CoV-2/Wuhan/WIV05/2019__EPI_ISL_402128 spike protein CDS gc (1-1147)(K986P_V987P_P1069F)
auguucguguuccugguccuccugccccuggugagcucccagugcgugaaccucaccacccgcacgcagcugccgcccgccuacaccaacagcuucacccggggcgucuacuaccccgacaagguguuccgcuccagcgugcugcacuccacccaggaccucuuccugcccuucuucagcaacgucacgugguuccacgccauccacguguccgggaccaacggcaccaagcgguucgacaacccggugcugcccuucaacgacggggucuacuucgcgagcaccgagaaguccaacaucauccgcggcuggaucuucgggacgacccucgacagcaagacccagucccugcugaucgugaacaacgccaccaacguggucaucaaggugugcgaguuccaguucugcaacgaccccuuccucggcguguacuaccacaagaacaacaagagcuggauggaguccgaguuccgggucuacagcuccgccaacaacugcacguucgaguacgugagccagcccuuccugauggaccuggagggcaagcaggggaacuucaagaaccuccgcgaguucguguucaagaacaucgacggcuacuucaagaucuacuccaagcacaccccgaucaaccugguccgggaccugccccagggguucagcgcccucgagccccugguggaccugcccaucggcaucaacaucacccgcuuccagacccuccuggcccugcaccgguccuaccucacgccgggggacagcagcuccggcuggaccgcgggcgccgccgccuacuacgugggguaccugcagccccgcaccuuccugcucaaguacaacgagaacggcaccaucacggacgcggucgacugcgcccuggacccccugagcgagaccaagugcacccucaaguccuucaccguggagaaggggaucuaccagacgagcaacuuccgggugcagcccaccgaguccaucguccgcuucccgaacaucaccaaccugugccccuucggcgagguguucaacgccacccgguucgccagcgucuacgccuggaaccgcaagcggaucuccaacugcguggcggacuacagcgugcuguacaacuccgccagcuucuccacguucaagugcuacggcgucagccccaccaagcucaacgaccugugcuucaccaacguguacgccgacuccuucgugauccgcggggacgagguccggcagaucgcccccggccagaccgggaagaucgccgacuacaacuacaagcugccggacgacuucacgggcugcgugaucgcguggaacagcaacaaccucgacuccaaggucgggggcaacuacaacuaccuguaccgccuguuccgcaagagcaaccucaagcccuucgagcgggacaucuccaccgagaucuaccaggccggcagcacccccugcaacgggguggagggcuucaacugcuacuucccccugcaguccuacggguuccagccgaccaacggcgugggguaccagcccuaccggguggucgugcugagcuucgagcuccugcacgcccccgccacggugugcggccccaagaaguccaccaaccuggucaagaacaagugcgugaacuucaacuucaacggccucaccgggaccggcgugcugaccgagagcaacaagaaguuccugccguuccagcaguucgggcgcgacaucgccgacacgaccgacgcgguccgcgacccccagacccuggagauccucgacaucacccccugcagcuucggcgggguguccgugaucacgccgggcaccaacaccagcaaccaggucgccgugcuguaccaggacgugaacugcaccgagguccccguggccauccacgccgaccagcugacgcccaccuggcggguguacuccaccggcagcaacgucuuccagacccgcgccgggugccucaucggcgcggagcacgugaacaacuccuacgagugcgacauccccaucggggccggcaucugcgccagcuaccagacgcagaccaacuccccgcggcgcgcccggagcguggcgucccagagcaucaucgccuacaccaugucccugggcgccgagaacagcgucgccuacuccaacaacagcaucgccauccccaccaacuucacgaucuccgugaccaccgagauccugcccgugagcaugaccaagacgagcgucgacugcaccauguacaucugcggggacuccaccgagugcagcaaccuccugcugcaguacggcuccuucugcacccagcucaaccgcgcgcugacggggaucgccguggagcaggacaagaacacccaggagguguucgcccaggucaagcagaucuacaagacgcccccgaucaaggacuucggcggguucaacuucagccagauccugcccgaccccuccaagcccagcaagcgguccuucaucgaggaccuccuguucaacaaggugacccuggccgacgccggcuucaucaagcaguacggcgacugccucggggacaucgcggcccgcgaccugaucugcgcccagaaguucaacggccugaccgugcucccgccccugcugaccgacgagaugaucgcccaguacaccagcgcccuccuggcggggaccaucacguccggcuggaccuucggggccggcgccgcccugcagauccccuucgcgaugcagauggccuaccgguucaacggcaucggggucacccagaacgugcucuacgagaaccagaagcugaucgccaaccaguucaacagcgccaucggcaagauccaggacucccugagcuccaccgccagcgcgcucgggaagcugcaggacguggucaaccagaacgcccaggcccugaacacgcucgugaagcagcuguccagcaacuucggcgccaucuccagcgugcugaacgacauccucucccgccuggacccgcccgaggccgaggugcagaucgaccggcugaucaccgggcgccuccagagccugcagaccuacgugacccagcagcugauccgggcggccgagauccgcgccagcgccaaccucgccgcgaccaagauguccgagugcguccugggccagagcaagcggguggacuucugcggcaagggguaccaccugauguccuucccccagagcgccccgcacggcguggucuuccuccacgugacguacgucuucgcccaggagaagaacuucaccaccgcccccgcgaucugccacgacgggaaggcccacuucccccgcgagggcguguucguguccaacgggacccacugguucgucacgcagcggaacuucuacgagccgcagaucaucaccaccgacaacaccuucgugagcggcaacugcgacguggucaucggcaucgugaacaacacgguguacgacccccugcagcccgagcuggacucc

SEQ ID NO: 11836 - RNA, 3441 nt, Artificial Sequence
  SARS-CoV-2/Wuhan/WIV05/2019__EPI_ISL_402128 spike protein CDS gc (1-1147)(K986P_V987P_ H1048Q_H1064N_ H1083N_H1101N)
auguucguguuccugguccuccugccccuggugagcucccagugcgugaaccucaccacccgcacgcagcugccgcccgccuacaccaacagcuucacccggggcgucuacuaccccgacaagguguuccgcuccagcgugcugcacuccacccaggaccucuuccugcccuucuucagcaacgucacgugguuccacgccauccacguguccgggaccaacggcaccaagcgguucgacaacccggugcugcccuucaacgacggggucuacuucgcgagcaccgagaaguccaacaucauccgcggcuggaucuucgggacgacccucgacagcaagacccagucccugcugaucgugaacaacgccaccaacguggucaucaaggugugcgaguuccaguucugcaacgaccccuuccucggcguguacuaccacaagaacaacaagagcuggauggaguccgaguuccgggucuacagcuccgccaacaacugcacguucgaguacgugagccagcccuuccugauggaccuggagggcaagcaggggaacuucaagaaccuccgcgaguucguguucaagaacaucgacggcuacuucaagaucuacuccaagcacaccccgaucaaccugguccgggaccugccccagggguucagcgcccucgagccccugguggaccugcccaucggcaucaacaucacccgcuuccagacccuccuggcccugcaccgguccuaccucacgccgggggacagcagcuccggcuggaccgcgggcgccgccgccuacuacgugggguaccugcagccccgcaccuuccugcucaaguacaacgagaacggcaccaucacggacgcggucgacugcgcccuggacccccugagcgagaccaagugcacccucaaguccuucaccguggagaaggggaucuaccagacgagcaacuuccgggugcagcccaccgaguccaucguccgcuucccgaacaucaccaaccugugccccuucggcgagguguucaacgccacccgguucgccagcgucuacgccuggaaccgcaagcggaucuccaacugcguggcggacuacagcgugcuguacaacuccgccagcuucuccacguucaagugcuacggcgucagccccaccaagcucaacgaccugugcuucaccaacguguacgccgacuccuucgugauccgcggggacgagguccggcagaucgcccccggccagaccgggaagaucgccgacuacaacuacaagcugccggacgacuucacgggcugcgugaucgcguggaacagcaacaaccucgacuccaaggucgggggcaacuacaacuaccuguaccgccuguuccgcaagagcaaccucaagcccuucgagcgggacaucuccaccgagaucuaccaggccggcagcacccccugcaacgggguggagggcuucaacugcuacuucccccugcaguccuacggguuccagccgaccaacggcgugggguaccagcccuaccggguggucgugcugagcuucgagcuccugcacgcccccgccacggugugcggccccaagaaguccaccaaccuggucaagaacaagugcgugaacuucaacuucaacggccucaccgggaccggcgugcugaccgagagcaacaagaaguuccugccguuccagcaguucgggcgcgacaucgccgacacgaccgacgcgguccgcgacccccagacccuggagauccucgacaucacccccugcagcuucggcgggguguccgugaucacgccgggcaccaacaccagcaaccaggucgccgugcuguaccaggacgugaacugcaccgagguccccguggccauccacgccgaccagcugacgcccaccuggcggguguacuccaccggcagcaacgucuuccagacccgcgccgggugccucaucggcgcggagcacgugaacaacuccuacgagugcgacauccccaucggggccggcaucugcgccagcuaccagacgcagaccaacuccccgcggcgcgcccggagcguggcgucccagagcaucaucgccuacaccaugucccugggcgccgagaacagcgucgccuacuccaacaacagcaucgccauccccaccaacuucacgaucuccgugaccaccgagauccugcccgugagcaugaccaagacgagcgucgacugcaccauguacaucugcggggacuccaccgagugcagcaaccuccugcugcaguacggcuccuucugcacccagcucaaccgcgcgcugacggggaucgccguggagcaggacaagaacacccaggagguguucgcccaggucaagcagaucuacaagacgcccccgaucaaggacuucggcggguucaacuucagccagauccugcccgaccccuccaagcccagcaagcgguccuucaucgaggaccuccuguucaacaaggugacccuggccgacgccggcuucaucaagcaguacggcgacugccucggggacaucgcggcccgcgaccugaucugcgcccagaaguucaacggccugaccgugcucccgccccugcugaccgacgagaugaucgcccaguacaccagcgcccuccuggcggggaccaucacguccggcuggaccuucggggccggcgccgcccugcagauccccuucgcgaugcagauggccuaccgguucaacggcaucggggucacccagaacgugcucuacgagaaccagaagcugaucgccaaccaguucaacagcgccaucggcaagauccaggacucccugagcuccaccgccagcgcgcucgggaagcugcaggacguggucaaccagaacgcccaggcccugaacacgcucgugaagcagcuguccagcaacuucggcgccaucuccagcgugcugaacgacauccucucccgccuggacccgcccgaggccgaggugcagaucgaccggcugaucaccgggcgccuccagagccugcagaccuacgugacccagcagcugauccgggcggccgagauccgcgccagcgccaaccucgccgcgaccaagauguccgagugcguccugggccagagcaagcggguggacuucugcggcaagggguaccagcugauguccuucccccagagcgccccgcacggcguggucuuccucaacgugacguacguccccgcccaggagaagaacuucaccaccgcccccgcgaucugcaacgacgggaaggcccacuucccccgcgagggcguguucguguccaacgggaccaacugguucgucacgcagcggaacuucuacgagccgcagaucaucaccaccgacaacaccuucgugagcggcaacugcgacguggucaucggcaucgugaacaacacgguguacgacccccugcagcccgagcuggacucc

SEQ ID NO: 11837 - RNA, 3441 nt, Artificial Sequence
  SARS-CoV-2/Wuhan/WIV05/2019__EPI_ISL_402128 spike protein CDS gc (1-1147)(I712C_T1077C)
auguucguguuccugguccuccugccccuggugagcucccagugcgugaaccucaccacccgcacgcagcugccgcccgccuacaccaacagcuucacccggggcgucuacuaccccgacaagguguuccgcuccagcgugcugcacuccacccaggaccucuuccugcccuucuucagcaacgucacgugguuccacgccauccacguguccgggaccaacggcaccaagcgguucgacaacccggugcugcccuucaacgacggggucuacuucgcgagcaccgagaaguccaacaucauccgcggcuggaucuucgggacgacccucgacagcaagacccagucccugcugaucgugaacaacgccaccaacguggucaucaaggugugcgaguuccaguucugcaacgaccccuuccucggcguguacuaccacaagaacaacaagagcuggauggaguccgaguuccgggucuacagcuccgccaacaacugcacguucgaguacgugagccagcccuuccugauggaccuggagggcaagcaggggaacuucaagaaccuccgcgaguucguguucaagaacaucgacggcuacuucaagaucuacuccaagcacaccccgaucaaccugguccgggaccugccccagggguucagcgcccucgagccccugguggaccugcccaucggcaucaacaucacccgcuuccagacccuccuggcccugcaccgguccuaccucacgccgggggacagcagcuccggcuggaccgcgggcgccgccgccuacuacgugggguaccugcagccccgcaccuuccugcucaaguacaacgagaacggcaccaucacggacgcggucgacugcgcccuggacccccugagcgagaccaagugcacccucaaguccuucaccguggagaaggggaucuaccagacgagcaacuuccgggugcagcccaccgaguccaucguccgcuucccgaacaucaccaaccugugccccuucggcgagguguucaacgccacccgguucgccagcgucuacgccuggaaccgcaagcggaucuccaacugcguggcggacuacagcgugcuguacaacuccgccagcuucuccacguucaagugcuacggcgucagccccaccaagcucaacgaccugugcuucaccaacguguacgccgacuccuucgugauccgcggggacgagguccggcagaucgcccccggccagaccgggaagaucgccgacuacaacuacaagcugccggacgacuucacgggcugcgugaucgcguggaacagcaacaaccucgacuccaaggucgggggcaacuacaacuaccuguaccgccuguuccgcaagagcaaccucaagcccuucgagcgggacaucuccaccgagaucuaccaggccggcagcacccccugcaacgggguggagggcuucaacugcuacuucccccugcaguccuacggguuccagccgaccaacggcgugggguaccagcccuaccggguggucgugcugagcuucgagcuccugcacgcccccgccacggugugcggccccaagaaguccaccaaccuggucaagaacaagugcgugaacuucaacuucaacggccucaccgggaccggcgugcugaccgagagcaacaagaaguuccugccguuccagcaguucgggcgcgacaucgccgacacgaccgacgcgguccgcgacccccagacccuggagauccucgacaucacccccugcagcuucggcgggguguccgugaucacgccgggcaccaacaccagcaaccaggucgccgugcuguaccaggacgugaacugcaccgagguccccguggccauccacgccgaccagcugacgcccaccuggcggguguacuccaccggcagcaacgucuuccagacccgcgccgggugccucaucggcgcggagcacgugaacaacuccuacgagugcgacauccccaucggggccggcaucugcgccagcuaccagacgcagaccaacuccccgcggcgcgcccggagcguggcgucccagagcaucaucgccuacaccaugucccugggcgccgagaacagcgucgccuacuccaacaacagcugcgccauccccaccaacuucacgaucuccgugaccaccgagauccugcccgugagcaugaccaagacgagcgucgacugcaccauguacaucugcggggacuccaccgagugcagcaaccuccugcugcaguacggcuccuucugcacccagcucaaccgcgcgcugacggggaucgccguggagcaggacaagaacacccaggagguguucgcccaggucaagcagaucuacaagacgcccccgaucaaggacuucggcggguucaacuucagccagauccugcccgaccccuccaagcccagcaagcgguccuucaucgaggaccuccuguucaacaaggugacccuggccgacgccggcuucaucaagcaguacggcgacugccucggggacaucgcggcccgcgaccugaucugcgcccagaaguucaacggccugaccgugcucccgccccugcugaccgacgagaugaucgcccaguacaccagcgcccuccuggcggggaccaucacguccggcuggaccuucggggccggcgccgcccugcagauccccuucgcgaugcagauggccuaccgguucaacggcaucggggucacccagaacgugcucuacgagaaccagaagcugaucgccaaccaguucaacagcgccaucggcaagauccaggacucccugagcuccaccgccagcgcgcucgggaagcugcaggacguggucaaccagaacgcccaggcccugaacacgcucgugaagcagcuguccagcaacuucggcgccaucuccagcgugcugaacgacauccucucccgccuggacaaggucgaggccgaggugcagaucgaccggcugaucaccgggcgccuccagagccugcagaccuacgugacccagcagcugauccgggcggccgagauccgcgccagcgccaaccucgccgcgaccaagauguccgagugcguccugggccagagcaagcggguggacuucugcggcaagggguaccaccugauguccuucccccagagcgccccgcacggcguggucuuccuccacgugacguacguccccgcccaggagaagaacuucaccugcgcccccgcgaucugccacgacgggaaggcccacuucccccgcgagggcguguucguguccaacgggacccacugguucgucacgcagcggaacuucuacgagccgcagaucaucaccaccgacaacaccuucgugagcggcaacugcgacguggucaucggcaucgugaacaacacgguguacgacccccugcagcccgagcuggacucc

SEQ ID NO: 11838 - RNA, 3441 nt, Artificial Sequence
  SARS-CoV-2/Wuhan/WIV05/2019__EPI_ISL_402128 spike protein CDS gc (1-1147)(I714C_Y1110C)
auguucguguuccugguccuccugccccuggugagcucccagugcgugaaccucaccacccgcacgcagcugccgcccgccuacaccaacagcuucacccggggcgucuacuaccccgacaagguguuccgcuccagcgugcugcacuccacccaggaccucuuccugcccuucuucagcaacgucacgugguuccacgccauccacguguccgggaccaacggcaccaagcgguucgacaacccggugcugcccuucaacgacggggucuacuucgcgagcaccgagaaguccaacaucauccgcggcuggaucuucgggacgacccucgacagcaagacccagucccugcugaucgugaacaacgccaccaacguggucaucaaggugugcgaguuccaguucugcaacgaccccuuccucggcguguacuaccacaagaacaacaagagcuggauggaguccgaguuccgggucuacagcuccgccaacaacugcacguucgaguacgugagccagcccuuccugauggaccuggagggcaagcaggggaacuucaagaaccuccgcgaguucguguucaagaacaucgacggcuacuucaagaucuacuccaagcacaccccgaucaaccugguccgggaccugccccagggguucagcgcccucgagccccugguggaccugcccaucggcaucaacaucacccgcuuccagacccuccuggcccugcaccgguccuaccucacgccgggggacagcagcuccggcuggaccgcgggcgccgccgccuacuacgugggguaccugcagccccgcaccuuccugcucaaguacaacgagaacggcaccaucacggacgcggucgacugcgcccuggacccccugagcgagaccaagugcacccucaaguccuucaccguggagaaggggaucuaccagacgagcaacuuccgggugcagcccaccgaguccaucguccgcuucccgaacaucaccaaccugugccccuucggcgagguguucaacgccacccgguucgccagcgucuacgccuggaaccgcaagcggaucuccaacugcguggcggacuacagcgugcuguacaacuccgccagcuucuccacguucaagugcuacggcgucagccccaccaagcucaacgaccugugcuucaccaacguguacgccgacuccuucgugauccgcggggacgagguccggcagaucgcccccggccagaccgggaagaucgccgacuacaacuacaagcugccggacgacuucacgggcugcgugaucgcguggaacagcaacaaccucgacuccaaggucgggggcaacuacaacuaccuguaccgccuguuccgcaagagcaaccucaagcccuucgagcgggacaucuccaccgagaucuaccaggccggcagcacccccugcaacgggguggagggcuucaacugcuacuucccccugcaguccuacggguuccagccgaccaacggcgugggguaccagcccuaccggguggucgugcugagcuucgagcuccugcacgcccccgccacggugugcggccccaagaaguccaccaaccuggucaagaacaagugcgugaacuucaacuucaacggccucaccgggaccggcgugcugaccgagagcaacaagaaguuccugccguuccagcaguucgggcgcgacaucgccgacacgaccgacgcgguccgcgacccccagacccuggagauccucgacaucacccccugcagcuucggcgggguguccgugaucacgccgggcaccaacaccagcaaccaggucgccgugcuguaccaggacgugaacugcaccgagguccccguggccauccacgccgaccagcugacgcccaccuggcggguguacuccaccggcagcaacgucuuccagacccgcgccgggugccucaucggcgcggagcacgugaacaacuccuacgagugcgacauccccaucggggccggcaucugcgccagcuaccagacgcagaccaacuccccgcggcgcgcccggagcguggcgucccagagcaucaucgccuacaccaugucccugggcgccgagaacagcgucgccuacuccaacaacagcaucgccugccccaccaacuucacgaucuccgugaccaccgagauccugcccgugagcaugaccaagacgagcgucgacugcaccauguacaucugcggggacuccaccgagugcagcaaccuccugcugcaguacggcuccuucugcacccagcucaaccgcgcgcugacggggaucgccguggagcaggacaagaacacccaggagguguucgcccaggucaagcagaucuacaagacgcccccgaucaaggacuucggcggguucaacuucagccagauccugcccgaccccuccaagcccagcaagcgguccuucaucgaggaccuccuguucaacaaggugacccuggccgacgccggcuucaucaagcaguacggcgacugccucggggacaucgcggcccgcgaccugaucugcgcccagaaguucaacggccugaccgugcucccgccccugcugaccgacgagaugaucgcccaguacaccagcgcccuccuggcggggaccaucacguccggcuggaccuucggggccggcgccgcccugcagauccccuucgcgaugcagauggccuaccgguucaacggcaucggggucacccagaacgugcucuacgagaaccagaagcugaucgccaaccaguucaacagcgccaucggcaagauccaggacucccugagcuccaccgccagcgcgcucgggaagcugcaggacguggucaaccagaacgcccaggcccugaacacgcucgugaagcagcuguccagcaacuucggcgccaucuccagcgugcugaacgacauccucucccgccuggacaaggucgaggccgaggugcagaucgaccggcugaucaccgggcgccuccagagccugcagaccuacgugacccagcagcugauccgggcggccgagauccgcgccagcgccaaccucgccgcgaccaagauguccgagugcguccugggccagagcaagcggguggacuucugcggcaagggguaccaccugauguccuucccccagagcgccccgcacggcguggucuuccuccacgugacguacguccccgcccaggagaagaacuucaccaccgcccccgcgaucugccacgacgggaaggcccacuucccccgcgagggcguguucguguccaacgggacccacugguucgucacgcagcggaacuucugcgagccgcagaucaucaccaccgacaacaccuucgugagcggcaacugcgacguggucaucggcaucgugaacaacacgguguacgacccccugcagcccgagcuggacucc

SEQ ID NO: 11839 - RNA, 3441 nt, Artificial Sequence
  SARS-CoV-2/Wuhan/WIV05/2019__EPI_ISL_402128 spike protein CDS gc (1-1147)(P715C_P1069C)
auguucguguuccugguccuccugccccuggugagcucccagugcgugaaccucaccacccgcacgcagcugccgcccgccuacaccaacagcuucacccggggcgucuacuaccccgacaagguguuccgcuccagcgugcugcacuccacccaggaccucuuccugcccuucuucagcaacgucacgugguuccacgccauccacguguccgggaccaacggcaccaagcgguucgacaacccggugcugcccuucaacgacggggucuacuucgcgagcaccgagaaguccaacaucauccgcggcuggaucuucgggacgacccucgacagcaagacccagucccugcugaucgugaacaacgccaccaacguggucaucaaggugugcgaguuccaguucugcaacgaccccuuccucggcguguacuaccacaagaacaacaagagcuggauggaguccgaguuccgggucuacagcuccgccaacaacugcacguucgaguacgugagccagcccuuccugauggaccuggagggcaagcaggggaacuucaagaaccuccgcgaguucguguucaagaacaucgacggcuacuucaagaucuacuccaagcacaccccgaucaaccugguccgggaccugccccagggguucagcgcccucgagccccugguggaccugcccaucggcaucaacaucacccgcuuccagacccuccuggcccugcaccgguccuaccucacgccgggggacagcagcuccggcuggaccgcgggcgccgccgccuacuacgugggguaccugcagccccgcaccuuccugcucaaguacaacgagaacggcaccaucacggacgcggucgacugcgcccuggacccccugagcgagaccaagugcacccucaaguccuucaccguggagaaggggaucuaccagacgagcaacuuccgggugcagcccaccgaguccaucguccgcuucccgaacaucaccaaccugugccccuucggcgagguguucaacgccacccgguucgccagcgucuacgccuggaaccgcaagcggaucuccaacugcguggcggacuacagcgugcuguacaacuccgccagcuucuccacguucaagugcuacggcgucagccccaccaagcucaacgaccugugcuucaccaacguguacgccgacuccuucgugauccgcggggacgagguccggcagaucgcccccggccagaccgggaagaucgccgacuacaacuacaagcugccggacgacuucacgggcugcgugaucgcguggaacagcaacaaccucgacuccaaggucgggggcaacuacaacuaccuguaccgccuguuccgcaagagcaaccucaagcccuucgagcgggacaucuccaccgagaucuaccaggccggcagcacccccugcaacgggguggagggcuucaacugcuacuucccccugcaguccuacggguuccagccgaccaacggcgugggguaccagcccuaccggguggucgugcugagcuucgagcuccugcacgcccccgccacggugugcggccccaagaaguccaccaaccuggucaagaacaagugcgugaacuucaacuucaacggccucaccgggaccggcgugcugaccgagagcaacaagaaguuccugccguuccagcaguucgggcgcgacaucgccgacacgaccgacgcgguccgcgacccccagacccuggagauccucgacaucacccccugcagcuucggcgggguguccgugaucacgccgggcaccaacaccagcaaccaggucgccgugcuguaccaggacgugaacugcaccgagguccccguggccauccacgccgaccagcugacgcccaccuggcggguguacuccaccggcagcaacgucuuccagacccgcgccgggugccucaucggcgcggagcacgugaacaacuccuacgagugcgacauccccaucggggccggcaucugcgccagcuaccagacgcagaccaacuccccgcggcgcgcccggagcguggcgucccagagcaucaucgccuacaccaugucccugggcgccgagaacagcgucgccuacuccaacaacagcaucgccaucugcaccaacuucacgaucuccgugaccaccgagauccugcccgugagcaugaccaagacgagcgucgacugcaccauguacaucugcggggacuccaccgagugcagcaaccuccugcugcaguacggcuccuucugcacccagcucaaccgcgcgcugacggggaucgccguggagcaggacaagaacacccaggagguguucgcccaggucaagcagaucuacaagacgcccccgaucaaggacuucggcggguucaacuucagccagauccugcccgaccccuccaagcccagcaagcgguccuucaucgaggaccuccuguucaacaaggugacccuggccgacgccggcuucaucaagcaguacggcgacugccucggggacaucgcggcccgcgaccugaucugcgcccagaaguucaacggccugaccgugcucccgccccugcugaccgacgagaugaucgcccaguacaccagcgcccuccuggcggggaccaucacguccggcuggaccuucggggccggcgccgcccugcagauccccuucgcgaugcagauggccuaccgguucaacggcaucggggucacccagaacgugcucuacgagaaccagaagcugaucgccaaccaguucaacagcgccaucggcaagauccaggacucccugagcuccaccgccagcgcgcucgggaagcugcaggacguggucaaccagaacgcccaggcccugaacacgcucgugaagcagcuguccagcaacuucggcgccaucuccagcgugcugaacgacauccucucccgccuggacaaggucgaggccgaggugcagaucgaccggcugaucaccgggcgccuccagagccugcagaccuacgugacccagcagcugauccgggcggccgagauccgcgccagcgccaaccucgccgcgaccaagauguccgagugcguccugggccagagcaagcggguggacuucugcggcaagggguaccaccugauguccuucccccagagcgccccgcacggcguggucuuccuccacgugacguacgucugcgcccaggagaagaacuucaccaccgcccccgcgaucugccacgacgggaaggcccacuucccccgcgagggcguguucguguccaacgggacccacugguucgucacgcagcggaacuucuacgagccgcagaucaucaccaccgacaacaccuucgugagcggcaacugcgacguggucaucggcaucgugaacaacacgguguacgacccccugcagcccgagcuggacucc

SEQ ID NO: 11840 - RNA, 3441 nt, Artificial Sequence
  SARS-CoV-2/Wuhan/WIV05/2019__EPI_ISL_402128 spike protein CDS gc (1-1147)(G889C_L1034C)
auguucguguuccugguccuccugccccuggugagcucccagugcgugaaccucaccacccgcacgcagcugccgcccgccuacaccaacagcuucacccggggcgucuacuaccccgacaagguguuccgcuccagcgugcugcacuccacccaggaccucuuccugcccuucuucagcaacgucacgugguuccacgccauccacguguccgggaccaacggcaccaagcgguucgacaacccggugcugcccuucaacgacggggucuacuucgcgagcaccgagaaguccaacaucauccgcggcuggaucuucgggacgacccucgacagcaagacccagucccugcugaucgugaacaacgccaccaacguggucaucaaggugugcgaguuccaguucugcaacgaccccuuccucggcguguacuaccacaagaacaacaagagcuggauggaguccgaguuccgggucuacagcuccgccaacaacugcacguucgaguacgugagccagcccuuccugauggaccuggagggcaagcaggggaacuucaagaaccuccgcgaguucguguucaagaacaucgacggcuacuucaagaucuacuccaagcacaccccgaucaaccugguccgggaccugccccagggguucagcgcccucgagccccugguggaccugcccaucggcaucaacaucacccgcuuccagacccuccuggcccugcaccgguccuaccucacgccgggggacagcagcuccggcuggaccgcgggcgccgccgccuacuacgugggguaccugcagccccgcaccuuccugcucaaguacaacgagaacggcaccaucacggacgcggucgacugcgcccuggacccccugagcgagaccaagugcacccucaaguccuucaccguggagaaggggaucuaccagacgagcaacuuccgggugcagcccaccgaguccaucguccgcuucccgaacaucaccaaccugugccccuucggcgagguguucaacgccacccgguucgccagcgucuacgccuggaaccgcaagcggaucuccaacugcguggcggacuacagcgugcuguacaacuccgccagcuucuccacguucaagugcuacggcgucagccccaccaagcucaacgaccugugcuucaccaacguguacgccgacuccuucgugauccgcggggacgagguccggcagaucgcccccggccagaccgggaagaucgccgacuacaacuacaagcugccggacgacuucacgggcugcgugaucgcguggaacagcaacaaccucgacuccaaggucgggggcaacuacaacuaccuguaccgccuguuccgcaagagcaaccucaagcccuucgagcgggacaucuccaccgagaucuaccaggccggcagcacccccugcaacgggguggagggcuucaacugcuacuucccccugcaguccuacggguuccagccgaccaacggcgugggguaccagcccuaccggguggucgugcugagcuucgagcuccugcacgcccccgccacggugugcggccccaagaaguccaccaaccuggucaagaacaagugcgugaacuucaacuucaacggccucaccgggaccggcgugcugaccgagagcaacaagaaguuccugccguuccagcaguucgggcgcgacaucgccgacacgaccgacgcgguccgcgacccccagacccuggagauccucgacaucacccccugcagcuucggcgggguguccgugaucacgccgggcaccaacaccagcaaccaggucgccgugcuguaccaggacgugaacugcaccgagguccccguggccauccacgccgaccagcugacgcccaccuggcggguguacuccaccggcagcaacgucuuccagacccgcgccgggugccucaucggcgcggagcacgugaacaacuccuacgagugcgacauccccaucggggccggcaucugcgccagcuaccagacgcagaccaacuccccgcggcgcgcccggagcguggcgucccagagcaucaucgccuacaccaugucccugggcgccgagaacagcgucgccuacuccaacaacagcaucgccauccccaccaacuucacgaucuccgugaccaccgagauccugcccgugagcaugaccaagacgagcgucgacugcaccauguacaucugcggggacuccaccgagugcagcaaccuccugcugcaguacggcuccuucugcacccagcucaaccgcgcgcugacggggaucgccguggagcaggacaagaacacccaggagguguucgcccaggucaagcagaucuacaagacgcccccgaucaaggacuucggcggguucaacuucagccagauccugcccgaccccuccaagcccagcaagcgguccuucaucgaggaccuccuguucaacaaggugacccuggccgacgccggcuucaucaagcaguacggcgacugccucggggacaucgcggcccgcgaccugaucugcgcccagaaguucaacggccugaccgugcucccgccccugcugaccgacgagaugaucgcccaguacaccagcgcccuccuggcggggaccaucacguccggcuggaccuucugcgccggcgccgcccugcagauccccuucgcgaugcagauggccuaccgguucaacggcaucggggucacccagaacgugcucuacgagaaccagaagcugaucgccaaccaguucaacagcgccaucggcaagauccaggacucccugagcuccaccgccagcgcgcucgggaagcugcaggacguggucaaccagaacgcccaggcccugaacacgcucgugaagcagcuguccagcaacuucggcgccaucuccagcgugcugaacgacauccucucccgccuggacaaggucgaggccgaggugcagaucgaccggcugaucaccgggcgccuccagagccugcagaccuacgugacccagcagcugauccgggcggccgagauccgcgccagcgccaaccucgccgcgaccaagauguccgagugcgucugcggccagagcaagcggguggacuucugcggcaagggguaccaccugauguccuucccccagagcgccccgcacggcguggucuuccuccacgugacguacguccccgcccaggagaagaacuucaccaccgcccccgcgaucugccacgacgggaaggcccacuucccccgcgagggcguguucguguccaacgggacccacugguucgucacgcagcggaacuucuacgagccgcagaucaucaccaccgacaacaccuucgugagcggcaacugcgacguggucaucggcaucgugaacaacacgguguacgacccccugcagcccgagcuggacucc

SEQ ID NO: 11841 - RNA, 3441 nt, Artificial Sequence
  SARS-CoV-2/Wuhan/WIV05/2019__EPI_ISL_402128 spike protein CDS gc (1-1147)(I909C_Y1047C)
auguucguguuccugguccuccugccccuggugagcucccagugcgugaaccucaccacccgcacgcagcugccgcccgccuacaccaacagcuucacccggggcgucuacuaccccgacaagguguuccgcuccagcgugcugcacuccacccaggaccucuuccugcccuucuucagcaacgucacgugguuccacgccauccacguguccgggaccaacggcaccaagcgguucgacaacccggugcugcccuucaacgacggggucuacuucgcgagcaccgagaaguccaacaucauccgcggcuggaucuucgggacgacccucgacagcaagacccagucccugcugaucgugaacaacgccaccaacguggucaucaaggugugcgaguuccaguucugcaacgaccccuuccucggcguguacuaccacaagaacaacaagagcuggauggaguccgaguuccgggucuacagcuccgccaacaacugcacguucgaguacgugagccagcccuuccugauggaccuggagggcaagcaggggaacuucaagaaccuccgcgaguucguguucaagaacaucgacggcuacuucaagaucuacuccaagcacaccccgaucaaccugguccgggaccugccccagggguucagcgcccucgagccccugguggaccugcccaucggcaucaacaucacccgcuuccagacccuccuggcccugcaccgguccuaccucacgccgggggacagcagcuccggcuggaccgcgggcgccgccgccuacuacgugggguaccugcagccccgcaccuuccugcucaaguacaacgagaacggcaccaucacggacgcggucgacugcgcccuggacccccugagcgagaccaagugcacccucaaguccuucaccguggagaaggggaucuaccagacgagcaacuuccgggugcagcccaccgaguccaucguccgcuucccgaacaucaccaaccugugccccuucggcgagguguucaacgccacccgguucgccagcgucuacgccuggaaccgcaagcggaucuccaacugcguggcggacuacagcgugcuguacaacuccgccagcuucuccacguucaagugcuacggcgucagccccaccaagcucaacgaccugugcuucaccaacguguacgccgacuccuucgugauccgcggggacgagguccggcagaucgcccccggccagaccgggaagaucgccgacuacaacuacaagcugccggacgacuucacgggcugcgugaucgcguggaacagcaacaaccucgacuccaaggucgggggcaacuacaacuaccuguaccgccuguuccgcaagagcaaccucaagcccuucgagcgggacaucuccaccgagaucuaccaggccggcagcacccccugcaacgggguggagggcuucaacugcuacuucccccugcaguccuacggguuccagccgaccaacggcgugggguaccagcccuaccggguggucgugcugagcuucgagcuccugcacgcccccgccacggugugcggccccaagaaguccaccaaccuggucaagaacaagugcgugaacuucaacuucaacggccucaccgggaccggcgugcugaccgagagcaacaagaaguuccugccguuccagcaguucgggcgcgacaucgccgacacgaccgacgcgguccgcgacccccagacccuggagauccucgacaucacccccugcagcuucggcgggguguccgugaucacgccgggcaccaacaccagcaaccaggucgccgugcuguaccaggacgugaacugcaccgagguccccguggccauccacgccgaccagcugacgcccaccuggcggguguacuccaccggcagcaacgucuuccagacccgcgccgggugccucaucggcgcggagcacgugaacaacuccuacgagugcgacauccccaucggggccggcaucugcgccagcuaccagacgcagaccaacuccccgcggcgcgcccggagcguggcgucccagagcaucaucgccuacaccaugucccugggcgccgagaacagcgucgccuacuccaacaacagcaucgccauccccaccaacuucacgaucuccgugaccaccgagauccugcccgugagcaugaccaagacgagcgucgacugcaccauguacaucugcggggacuccaccgagugcagcaaccuccugcugcaguacggcuccuucugcacccagcucaaccgcgcgcugacggggaucgccguggagcaggacaagaacacccaggagguguucgcccaggucaagcagaucuacaagacgcccccgaucaaggacuucggcggguucaacuucagccagauccugcccgaccccuccaagcccagcaagcgguccuucaucgaggaccuccuguucaacaaggugacccuggccgacgccggcuucaucaagcaguacggcgacugccucggggacaucgcggcccgcgaccugaucugcgcccagaaguucaacggccugaccgugcucccgccccugcugaccgacgagaugaucgcccaguacaccagcgcccuccuggcggggaccaucacguccggcuggaccuucggggccggcgccgcccugcagauccccuucgcgaugcagauggccuaccgguucaacggcugcggggucacccagaacgugcucuacgagaaccagaagcugaucgccaaccaguucaacagcgccaucggcaagauccaggacucccugagcuccaccgccagcgcgcucgggaagcugcaggacguggucaaccagaacgcccaggcccugaacacgcucgugaagcagcuguccagcaacuucggcgccaucuccagcgugcugaacgacauccucucccgccuggacaaggucgaggccgaggugcagaucgaccggcugaucaccgggcgccuccagagccugcagaccuacgugacccagcagcugauccgggcggccgagauccgcgccagcgccaaccucgccgcgaccaagauguccgagugcguccugggccagagcaagcggguggacuucugcggcaaggggugccaccugauguccuucccccagagcgccccgcacggcguggucuuccuccacgugacguacguccccgcccaggagaagaacuucaccaccgcccccgcgaucugccacgacgggaaggcccacuucccccgcgagggcguguucguguccaacgggacccacugguucgucacgcagcggaacuucuacgagccgcagaucaucaccaccgacaacaccuucgugagcggcaacugcgacguggucaucggcaucgugaacaacacgguguacgacccccugcagcccgagcuggacucc

SEQ ID NO: 11842 - RNA, 3441 nt, Artificial Sequence
  SARS-CoV-2/Wuhan/WIV05/2019__EPI_ISL_402128 spike protein CDS gc (1-1147)(Q965C_S1003C)
auguucguguuccugguccuccugccccuggugagcucccagugcgugaaccucaccacccgcacgcagcugccgcccgccuacaccaacagcuucacccggggcgucuacuaccccgacaagguguuccgcuccagcgugcugcacuccacccaggaccucuuccugcccuucuucagcaacgucacgugguuccacgccauccacguguccgggaccaacggcaccaagcgguucgacaacccggugcugcccuucaacgacggggucuacuucgcgagcaccgagaaguccaacaucauccgcggcuggaucuucgggacgacccucgacagcaagacccagucccugcugaucgugaacaacgccaccaacguggucaucaaggugugcgaguuccaguucugcaacgaccccuuccucggcguguacuaccacaagaacaacaagagcuggauggaguccgaguuccgggucuacagcuccgccaacaacugcacguucgaguacgugagccagcccuuccugauggaccuggagggcaagcaggggaacuucaagaaccuccgcgaguucguguucaagaacaucgacggcuacuucaagaucuacuccaagcacaccccgaucaaccugguccgggaccugccccagggguucagcgcccucgagccccugguggaccugcccaucggcaucaacaucacccgcuuccagacccuccuggcccugcaccgguccuaccucacgccgggggacagcagcuccggcuggaccgcgggcgccgccgccuacuacgugggguaccugcagccccgcaccuuccugcucaaguacaacgagaacggcaccaucacggacgcggucgacugcgcccuggacccccugagcgagaccaagugcacccucaaguccuucaccguggagaaggggaucuaccagacgagcaacuuccgggugcagcccaccgaguccaucguccgcuucccgaacaucaccaaccugugccccuucggcgagguguucaacgccacccgguucgccagcgucuacgccuggaaccgcaagcggaucuccaacugcguggcggacuacagcgugcuguacaacuccgccagcuucuccacguucaagugcuacggcgucagccccaccaagcucaacgaccugugcuucaccaacguguacgccgacuccuucgugauccgcggggacgagguccggcagaucgcccccggccagaccgggaagaucgccgacuacaacuacaagcugccggacgacuucacgggcugcgugaucgcguggaacagcaacaaccucgacuccaaggucgggggcaacuacaacuaccuguaccgccuguuccgcaagagcaaccucaagcccuucgagcgggacaucuccaccgagaucuaccaggccggcagcacccccugcaacgggguggagggcuucaacugcuacuucccccugcaguccuacggguuccagccgaccaacggcgugggguaccagcccuaccggguggucgugcugagcuucgagcuccugcacgcccccgccacggugugcggccccaagaaguccaccaaccuggucaagaacaagugcgugaacuucaacuucaacggccucaccgggaccggcgugcugaccgagagcaacaagaaguuccugccguuccagcaguucgggcgcgacaucgccgacacgaccgacgcgguccgcgacccccagacccuggagauccucgacaucacccccugcagcuucggcgggguguccgugaucacgccgggcaccaacaccagcaaccaggucgccgugcuguaccaggacgugaacugcaccgagguccccguggccauccacgccgaccagcugacgcccaccuggcggguguacuccaccggcagcaacgucuuccagacccgcgccgggugccucaucggcgcggagcacgugaacaacuccuacgagugcgacauccccaucggggccggcaucugcgccagcuaccagacgcagaccaacuccccgcggcgcgcccggagcguggcgucccagagcaucaucgccuacaccaugucccugggcgccgagaacagcgucgccuacuccaacaacagcaucgccauccccaccaacuucacgaucuccgugaccaccgagauccugcccgugagcaugaccaagacgagcgucgacugcaccauguacaucugcggggacuccaccgagugcagcaaccuccugcugcaguacggcuccuucugcacccagcucaaccgcgcgcugacggggaucgccguggagcaggacaagaacacccaggagguguucgcccaggucaagcagaucuacaagacgcccccgaucaaggacuucggcggguucaacuucagccagauccugcccgaccccuccaagcccagcaagcgguccuucaucgaggaccuccuguucaacaaggugacccuggccgacgccggcuucaucaagcaguacggcgacugccucggggacaucgcggcccgcgaccugaucugcgcccagaaguucaacggccugaccgugcucccgccccugcugaccgacgagaugaucgcccaguacaccagcgcccuccuggcggggaccaucacguccggcuggaccuucggggccggcgccgcccugcagauccccuucgcgaugcagauggccuaccgguucaacggcaucggggucacccagaacgugcucuacgagaaccagaagcugaucgccaaccaguucaacagcgccaucggcaagauccaggacucccugagcuccaccgccagcgcgcucgggaagcugcaggacguggucaaccagaacgcccaggcccugaacacgcucgugaagugccuguccagcaacuucggcgccaucuccagcgugcugaacgacauccucucccgccuggacaaggucgaggccgaggugcagaucgaccggcugaucaccgggcgccuccagugccugcagaccuacgugacccagcagcugauccgggcggccgagauccgcgccagcgccaaccucgccgcgaccaagauguccgagugcguccugggccagagcaagcggguggacuucugcggcaagggguaccaccugauguccuucccccagagcgccccgcacggcguggucuuccuccacgugacguacguccccgcccaggagaagaacuucaccaccgcccccgcgaucugccacgacgggaaggcccacuucccccgcgagggcguguucguguccaacgggacccacugguucgucacgcagcggaacuucuacgagccgcagaucaucaccaccgacaacaccuucgugagcggcaacugcgacguggucaucggcaucgugaacaacacgguguacgacccccugcagcccgagcuggacucc

SEQ ID NO: 11843 - RNA, 3441 nt, Artificial Sequence
  SARS-CoV-2/Wuhan/WIV05/2019__EPI_ISL_402128 spike protein CDS gc (1-1147)(F970C_G999C)
auguucguguuccugguccuccugccccuggugagcucccagugcgugaaccucaccacccgcacgcagcugccgcccgccuacaccaacagcuucacccggggcgucuacuaccccgacaagguguuccgcuccagcgugcugcacuccacccaggaccucuuccugcccuucuucagcaacgucacgugguuccacgccauccacguguccgggaccaacggcaccaagcgguucgacaacccggugcugcccuucaacgacggggucuacuucgcgagcaccgagaaguccaacaucauccgcggcuggaucuucgggacgacccucgacagcaagacccagucccugcugaucgugaacaacgccaccaacguggucaucaaggugugcgaguuccaguucugcaacgaccccuuccucggcguguacuaccacaagaacaacaagagcuggauggaguccgaguuccgggucuacagcuccgccaacaacugcacguucgaguacgugagccagcccuuccugauggaccuggagggcaagcaggggaacuucaagaaccuccgcgaguucguguucaagaacaucgacggcuacuucaagaucuacuccaagcacaccccgaucaaccugguccgggaccugccccagggguucagcgcccucgagccccugguggaccugcccaucggcaucaacaucacccgcuuccagacccuccuggcccugcaccgguccuaccucacgccgggggacagcagcuccggcuggaccgcgggcgccgccgccuacuacgugggguaccugcagccccgcaccuuccugcucaaguacaacgagaacggcaccaucacggacgcggucgacugcgcccuggacccccugagcgagaccaagugcacccucaaguccuucaccguggagaaggggaucuaccagacgagcaacuuccgggugcagcccaccgaguccaucguccgcuucccgaacaucaccaaccugugccccuucggcgagguguucaacgccacccgguucgccagcgucuacgccuggaaccgcaagcggaucuccaacugcguggcggacuacagcgugcuguacaacuccgccagcuucuccacguucaagugcuacggcgucagccccaccaagcucaacgaccugugcuucaccaacguguacgccgacuccuucgugauccgcggggacgagguccggcagaucgcccccggccagaccgggaagaucgccgacuacaacuacaagcugccggacgacuucacgggcugcgugaucgcguggaacagcaacaaccucgacuccaaggucgggggcaacuacaacuaccuguaccgccuguuccgcaagagcaaccucaagcccuucgagcgggacaucuccaccgagaucuaccaggccggcagcacccccugcaacgggguggagggcuucaacugcuacuucccccugcaguccuacggguuccagccgaccaacggcgugggguaccagcccuaccggguggucgugcugagcuucgagcuccugcacgcccccgccacggugugcggccccaagaaguccaccaaccuggucaagaacaagugcgugaacuucaacuucaacggccucaccgggaccggcgugcugaccgagagcaacaagaaguuccugccguuccagcaguucgggcgcgacaucgccgacacgaccgacgcgguccgcgacccccagacccuggagauccucgacaucacccccugcagcuucggcgggguguccgugaucacgccgggcaccaacaccagcaaccaggucgccgugcuguaccaggacgugaacugcaccgagguccccguggccauccacgccgaccagcugacgcccaccuggcggguguacuccaccggcagcaacgucuuccagacccgcgccgggugccucaucggcgcggagcacgugaacaacuccuacgagugcgacauccccaucggggccggcaucugcgccagcuaccagacgcagaccaacuccccgcggcgcgcccggagcguggcgucccagagcaucaucgccuacaccaugucccugggcgccgagaacagcgucgccuacuccaacaacagcaucgccauccccaccaacuucacgaucuccgugaccaccgagauccugcccgugagcaugaccaagacgagcgucgacugcaccauguacaucugcggggacuccaccgagugcagcaaccuccugcugcaguacggcuccuucugcacccagcucaaccgcgcgcugacggggaucgccguggagcaggacaagaacacccaggagguguucgcccaggucaagcagaucuacaagacgcccccgaucaaggacuucggcggguucaacuucagccagauccugcccgaccccuccaagcccagcaagcgguccuucaucgaggaccuccuguucaacaaggugacccuggccgacgccggcuucaucaagcaguacggcgacugccucggggacaucgcggcccgcgaccugaucugcgcccagaaguucaacggccugaccgugcucccgccccugcugaccgacgagaugaucgcccaguacaccagcgcccuccuggcggggaccaucacguccggcuggaccuucggggccggcgccgcccugcagauccccuucgcgaugcagauggccuaccgguucaacggcaucggggucacccagaacgugcucuacgagaaccagaagcugaucgccaaccaguucaacagcgccaucggcaagauccaggacucccugagcuccaccgccagcgcgcucgggaagcugcaggacguggucaaccagaacgcccaggcccugaacacgcucgugaagcagcuguccagcaacugcggcgccaucuccagcgugcugaacgacauccucucccgccuggacaaggucgaggccgaggugcagaucgaccggcugaucaccugucgccuccagagccugcagaccuacgugacccagcagcugauccgggcggccgagauccgcgccagcgccaaccucgccgcgaccaagauguccgagugcguccugggccagagcaagcggguggacuucugcggcaagggguaccaccugauguccuucccccagagcgccccgcacggcguggucuuccuccacgugacguacguccccgcccaggagaagaacuucaccaccgcccccgcgaucugccacgacgggaaggcccacuucccccgcgagggcguguucguguccaacgggacccacugguucgucacgcagcggaacuucuacgagccgcagaucaucaccaccgacaacaccuucgugagcggcaacugcgacguggucaucggcaucgugaacaacacgguguacgacccccugcagcccgagcuggacucc

SEQ ID NO: 11844 - RNA, 3441 nt, Artificial Sequence
  SARS-CoV-2/Wuhan/WIV05/2019__EPI_ISL_402128 spike protein CDS gc (1-1147)(A972C_R995C)
auguucguguuccugguccuccugccccuggugagcucccagugcgugaaccucaccacccgcacgcagcugccgcccgccuacaccaacagcuucacccggggcgucuacuaccccgacaagguguuccgcuccagcgugcugcacuccacccaggaccucuuccugcccuucuucagcaacgucacgugguuccacgccauccacguguccgggaccaacggcaccaagcgguucgacaacccggugcugcccuucaacgacggggucuacuucgcgagcaccgagaaguccaacaucauccgcggcuggaucuucgggacgacccucgacagcaagacccagucccugcugaucgugaacaacgccaccaacguggucaucaaggugugcgaguuccaguucugcaacgaccccuuccucggcguguacuaccacaagaacaacaagagcuggauggaguccgaguuccgggucuacagcuccgccaacaacugcacguucgaguacgugagccagcccuuccugauggaccuggagggcaagcaggggaacuucaagaaccuccgcgaguucguguucaagaacaucgacggcuacuucaagaucuacuccaagcacaccccgaucaaccugguccgggaccugccccagggguucagcgcccucgagccccugguggaccugcccaucggcaucaacaucacccgcuuccagacccuccuggcccugcaccgguccuaccucacgccgggggacagcagcuccggcuggaccgcgggcgccgccgccuacuacgugggguaccugcagccccgcaccuuccugcucaaguacaacgagaacggcaccaucacggacgcggucgacugcgcccuggacccccugagcgagaccaagugcacccucaaguccuucaccguggagaaggggaucuaccagacgagcaacuuccgggugcagcccaccgaguccaucguccgcuucccgaacaucaccaaccugugccccuucggcgagguguucaacgccacccgguucgccagcgucuacgccuggaaccgcaagcggaucuccaacugcguggcggacuacagcgugcuguacaacuccgccagcuucuccacguucaagugcuacggcgucagccccaccaagcucaacgaccugugcuucaccaacguguacgccgacuccuucgugauccgcggggacgagguccggcagaucgcccccggccagaccgggaagaucgccgacuacaacuacaagcugccggacgacuucacgggcugcgugaucgcguggaacagcaacaaccucgacuccaaggucgggggcaacuacaacuaccuguaccgccuguuccgcaagagcaaccucaagcccuucgagcgggacaucuccaccgagaucuaccaggccggcagcacccccugcaacgggguggagggcuucaacugcuacuucccccugcaguccuacggguuccagccgaccaacggcgugggguaccagcccuaccggguggucgugcugagcuucgagcuccugcacgcccccgccacggugugcggccccaagaaguccaccaaccuggucaagaacaagugcgugaacuucaacuucaacggccucaccgggaccggcgugcugaccgagagcaacaagaaguuccugccguuccagcaguucgggcgcgacaucgccgacacgaccgacgcgguccgcgacccccagacccuggagauccucgacaucacccccugcagcuucggcgggguguccgugaucacgccgggcaccaacaccagcaaccaggucgccgugcuguaccaggacgugaacugcaccgagguccccguggccauccacgccgaccagcugacgcccaccuggcggguguacuccaccggcagcaacgucuuccagacccgcgccgggugccucaucggcgcggagcacgugaacaacuccuacgagugcgacauccccaucggggccggcaucugcgccagcuaccagacgcagaccaacuccccgcggcgcgcccggagcguggcgucccagagcaucaucgccuacaccaugucccugggcgccgagaacagcgucgccuacuccaacaacagcaucgccauccccaccaacuucacgaucuccgugaccaccgagauccugcccgugagcaugaccaagacgagcgucgacugcaccauguacaucugcggggacuccaccgagugcagcaaccuccugcugcaguacggcuccuucugcacccagcucaaccgcgcgcugacggggaucgccguggagcaggacaagaacacccaggagguguucgcccaggucaagcagaucuacaagacgcccccgaucaaggacuucggcggguucaacuucagccagauccugcccgaccccuccaagcccagcaagcgguccuucaucgaggaccuccuguucaacaaggugacccuggccgacgccggcuucaucaagcaguacggcgacugccucggggacaucgcggcccgcgaccugaucugcgcccagaaguucaacggccugaccgugcucccgccccugcugaccgacgagaugaucgcccaguacaccagcgcccuccuggcggggaccaucacguccggcuggaccuucggggccggcgccgcccugcagauccccuucgcgaugcagauggccuaccgguucaacggcaucggggucacccagaacgugcucuacgagaaccagaagcugaucgccaaccaguucaacagcgccaucggcaagauccaggacucccugagcuccaccgccagcgcgcucgggaagcugcaggacguggucaaccagaacgcccaggcccugaacacgcucgugaagcagcuguccagcaacuucggcugcaucuccagcgugcugaacgacauccucucccgccuggacaaggucgaggccgaggugcagaucgacugccugaucaccgggcgccuccagagccugcagaccuacgugacccagcagcugauccgggcggccgagauccgcgccagcgccaaccucgccgcgaccaagauguccgagugcguccugggccagagcaagcggguggacuucugcggcaagggguaccaccugauguccuucccccagagcgccccgcacggcguggucuuccuccacgugacguacguccccgcccaggagaagaacuucaccaccgcccccgcgaucugccacgacgggaaggcccacuucccccgcgagggcguguucguguccaacgggacccacugguucgucacgcagcggaacuucuacgagccgcagaucaucaccaccgacaacaccuucgugagcggcaacugcgacguggucaucggcaucgugaacaacacgguguacgacccccugcagcccgagcuggacucc

SEQ ID NO: 11845 - RNA, 3441 nt, Artificial Sequence
  SARS-CoV-2/Wuhan/WIV05/2019__EPI_ISL_402128 spike protein CDS gc (1-1147)(A890C_V1040C)
auguucguguuccugguccuccugccccuggugagcucccagugcgugaaccucaccacccgcacgcagcugccgcccgccuacaccaacagcuucacccggggcgucuacuaccccgacaagguguuccgcuccagcgugcugcacuccacccaggaccucuuccugcccuucuucagcaacgucacgugguuccacgccauccacguguccgggaccaacggcaccaagcgguucgacaacccggugcugcccuucaacgacggggucuacuucgcgagcaccgagaaguccaacaucauccgcggcuggaucuucgggacgacccucgacagcaagacccagucccugcugaucgugaacaacgccaccaacguggucaucaaggugugcgaguuccaguucugcaacgaccccuuccucggcguguacuaccacaagaacaacaagagcuggauggaguccgaguuccgggucuacagcuccgccaacaacugcacguucgaguacgugagccagcccuuccugauggaccuggagggcaagcaggggaacuucaagaaccuccgcgaguucguguucaagaacaucgacggcuacuucaagaucuacuccaagcacaccccgaucaaccugguccgggaccugccccagggguucagcgcccucgagccccugguggaccugcccaucggcaucaacaucacccgcuuccagacccuccuggcccugcaccgguccuaccucacgccgggggacagcagcuccggcuggaccgcgggcgccgccgccuacuacgugggguaccugcagccccgcaccuuccugcucaaguacaacgagaacggcaccaucacggacgcggucgacugcgcccuggacccccugagcgagaccaagugcacccucaaguccuucaccguggagaaggggaucuaccagacgagcaacuuccgggugcagcccaccgaguccaucguccgcuucccgaacaucaccaaccugugccccuucggcgagguguucaacgccacccgguucgccagcgucuacgccuggaaccgcaagcggaucuccaacugcguggcggacuacagcgugcuguacaacuccgccagcuucuccacguucaagugcuacggcgucagccccaccaagcucaacgaccugugcuucaccaacguguacgccgacuccuucgugauccgcggggacgagguccggcagaucgcccccggccagaccgggaagaucgccgacuacaacuacaagcugccggacgacuucacgggcugcgugaucgcguggaacagcaacaaccucgacuccaaggucgggggcaacuacaacuaccuguaccgccuguuccgcaagagcaaccucaagcccuucgagcgggacaucuccaccgagaucuaccaggccggcagcacccccugcaacgggguggagggcuucaacugcuacuucccccugcaguccuacggguuccagccgaccaacggcgugggguaccagcccuaccggguggucgugcugagcuucgagcuccugcacgcccccgccacggugugcggccccaagaaguccaccaaccuggucaagaacaagugcgugaacuucaacuucaacggccucaccgggaccggcgugcugaccgagagcaacaagaaguuccugccguuccagcaguucgggcgcgacaucgccgacacgaccgacgcgguccgcgacccccagacccuggagauccucgacaucacccccugcagcuucggcgggguguccgugaucacgccgggcaccaacaccagcaaccaggucgccgugcuguaccaggacgugaacugcaccgagguccccguggccauccacgccgaccagcugacgcccaccuggcggguguacuccaccggcagcaacgucuuccagacccgcgccgggugccucaucggcgcggagcacgugaacaacuccuacgagugcgacauccccaucggggccggcaucugcgccagcuaccagacgcagaccaacuccccgcggcgcgcccggagcguggcgucccagagcaucaucgccuacaccaugucccugggcgccgagaacagcgucgccuacuccaacaacagcaucgccauccccaccaacuucacgaucuccgugaccaccgagauccugcccgugagcaugaccaagacgagcgucgacugcaccauguacaucugcggggacuccaccgagugcagcaaccuccugcugcaguacggcuccuucugcacccagcucaaccgcgcgcugacggggaucgccguggagcaggacaagaacacccaggagguguucgcccaggucaagcagaucuacaagacgcccccgaucaaggacuucggcggguucaacuucagccagauccugcccgaccccuccaagcccagcaagcgguccuucaucgaggaccuccuguucaacaaggugacccuggccgacgccggcuucaucaagcaguacggcgacugccucggggacaucgcggcccgcgaccugaucugcgcccagaaguucaacggccugaccgugcucccgccccugcugaccgacgagaugaucgcccaguacaccagcgcccuccuggcggggaccaucacguccggcuggaccuucgggugcggcgccgcccugcagauccccuucgcgaugcagauggccuaccgguucaacggcaucggggucacccagaacgugcucuacgagaaccagaagcugaucgccaaccaguucaacagcgccaucggcaagauccaggacucccugagcuccaccgccagcgcgcucgggaagcugcaggacguggucaaccagaacgcccaggcccugaacacgcucgugaagcagcuguccagcaacuucggcgccaucuccagcgugcugaacgacauccucucccgccuggacaaggucgaggccgaggugcagaucgaccggcugaucaccgggcgccuccagagccugcagaccuacgugacccagcagcugauccgggcggccgagauccgcgccagcgccaaccucgccgcgaccaagauguccgagugcguccugggccagagcaagcggugcgacuucugcggcaagggguaccaccugauguccuucccccagagcgccccgcacggcguggucuuccuccacgugacguacguccccgcccaggagaagaacuucaccaccgcccccgcgaucugccacgacgggaaggcccacuucccccgcgagggcguguucguguccaacgggacccacugguucgucacgcagcggaacuucuacgagccgcagaucaucaccaccgacaacaccuucgugagcggcaacugcgacguggucaucggcaucgugaacaacacgguguacgacccccugcagcccgagcuggacucc

SEQ ID NO: 11846 - RNA, 3441 nt, Artificial Sequence
  SARS-CoV-2/Wuhan/WIV05/2019__EPI_ISL_402128 spike protein CDS gc (1-1147)(T874C_S1055C)
auguucguguuccugguccuccugccccuggugagcucccagugcgugaaccucaccacccgcacgcagcugccgcccgccuacaccaacagcuucacccggggcgucuacuaccccgacaagguguuccgcuccagcgugcugcacuccacccaggaccucuuccugcccuucuucagcaacgucacgugguuccacgccauccacguguccgggaccaacggcaccaagcgguucgacaacccggugcugcccuucaacgacggggucuacuucgcgagcaccgagaaguccaacaucauccgcggcuggaucuucgggacgacccucgacagcaagacccagucccugcugaucgugaacaacgccaccaacguggucaucaaggugugcgaguuccaguucugcaacgaccccuuccucggcguguacuaccacaagaacaacaagagcuggauggaguccgaguuccgggucuacagcuccgccaacaacugcacguucgaguacgugagccagcccuuccugauggaccuggagggcaagcaggggaacuucaagaaccuccgcgaguucguguucaagaacaucgacggcuacuucaagaucuacuccaagcacaccccgaucaaccugguccgggaccugccccagggguucagcgcccucgagccccugguggaccugcccaucggcaucaacaucacccgcuuccagacccuccuggcccugcaccgguccuaccucacgccgggggacagcagcuccggcuggaccgcgggcgccgccgccuacuacgugggguaccugcagccccgcaccuuccugcucaaguacaacgagaacggcaccaucacggacgcggucgacugcgcccuggacccccugagcgagaccaagugcacccucaaguccuucaccguggagaaggggaucuaccagacgagcaacuuccgggugcagcccaccgaguccaucguccgcuucccgaacaucaccaaccugugccccuucggcgagguguucaacgccacccgguucgccagcgucuacgccuggaaccgcaagcggaucuccaacugcguggcggacuacagcgugcuguacaacuccgccagcuucuccacguucaagugcuacggcgucagccccaccaagcucaacgaccugugcuucaccaacguguacgccgacuccuucgugauccgcggggacgagguccggcagaucgcccccggccagaccgggaagaucgccgacuacaacuacaagcugccggacgacuucacgggcugcgugaucgcguggaacagcaacaaccucgacuccaaggucgggggcaacuacaacuaccuguaccgccuguuccgcaagagcaaccucaagcccuucgagcgggacaucuccaccgagaucuaccaggccggcagcacccccugcaacgggguggagggcuucaacugcuacuucccccugcaguccuacggguuccagccgaccaacggcgugggguaccagcccuaccggguggucgugcugagcuucgagcuccugcacgcccccgccacggugugcggccccaagaaguccaccaaccuggucaagaacaagugcgugaacuucaacuucaacggccucaccgggaccggcgugcugaccgagagcaacaagaaguuccugccguuccagcaguucgggcgcgacaucgccgacacgaccgacgcgguccgcgacccccagacccuggagauccucgacaucacccccugcagcuucggcgggguguccgugaucacgccgggcaccaacaccagcaaccaggucgccgugcuguaccaggacgugaacugcaccgagguccccguggccauccacgccgaccagcugacgcccaccuggcggguguacuccaccggcagcaacgucuuccagacccgcgccgggugccucaucggcgcggagcacgugaacaacuccuacgagugcgacauccccaucggggccggcaucugcgccagcuaccagacgcagaccaacuccccgcggcgcgcccggagcguggcgucccagagcaucaucgccuacaccaugucccugggcgccgagaacagcgucgccuacuccaacaacagcaucgccauccccaccaacuucacgaucuccgugaccaccgagauccugcccgugagcaugaccaagacgagcgucgacugcaccauguacaucugcggggacuccaccgagugcagcaaccuccugcugcaguacggcuccuucugcacccagcucaaccgcgcgcugacggggaucgccguggagcaggacaagaacacccaggagguguucgcccaggucaagcagaucuacaagacgcccccgaucaaggacuucggcggguucaacuucagccagauccugcccgaccccuccaagcccagcaagcgguccuucaucgaggaccuccuguucaacaaggugacccuggccgacgccggcuucaucaagcaguacggcgacugccucggggacaucgcggcccgcgaccugaucugcgcccagaaguucaacggccugaccgugcucccgccccugcugaccgacgagaugaucgcccaguacugcagcgcccuccuggcggggaccaucacguccggcuggaccuucggggccggcgccgcccugcagauccccuucgcgaugcagauggccuaccgguucaacggcaucggggucacccagaacgugcucuacgagaaccagaagcugaucgccaaccaguucaacagcgccaucggcaagauccaggacucccugagcuccaccgccagcgcgcucgggaagcugcaggacguggucaaccagaacgcccaggcccugaacacgcucgugaagcagcuguccagcaacuucggcgccaucuccagcgugcugaacgacauccucucccgccuggacaaggucgaggccgaggugcagaucgaccggcugaucaccgggcgccuccagagccugcagaccuacgugacccagcagcugauccgggcggccgagauccgcgccagcgccaaccucgccgcgaccaagauguccgagugcguccugggccagagcaagcggguggacuucugcggcaagggguaccaccugauguccuucccccagugcgccccgcacggcguggucuuccuccacgugacguacguccccgcccaggagaagaacuucaccaccgcccccgcgaucugccacgacgggaaggcccacuucccccgcgagggcguguucguguccaacgggacccacugguucgucacgcagcggaacuucuacgagccgcagaucaucaccaccgacaacaccuucgugagcggcaacugcgacguggucaucggcaucgugaacaacacgguguacgacccccugcagcccgagcuggacucc

SEQ ID NO: 11847 - RNA, 4116 nt, Artificial Sequence
  SARS-CoV-2/Wuhan/WIV05/2019__EPI_ISL_402128 spike protein CDS gc (1-1211) LumSynth construct
auguucguguuccugguccuccugccccuggugagcucccagugcgugaaccucaccacccgcacgcagcugccgcccgccuacaccaacagcuucacccggggcgucuacuaccccgacaagguguuccgcuccagcgugcugcacuccacccaggaccucuuccugcccuucuucagcaacgucacgugguuccacgccauccacguguccgggaccaacggcaccaagcgguucgacaacccggugcugcccuucaacgacggggucuacuucgcgagcaccgagaaguccaacaucauccgcggcuggaucuucgggacgacccucgacagcaagacccagucccugcugaucgugaacaacgccaccaacguggucaucaaggugugcgaguuccaguucugcaacgaccccuuccucggcguguacuaccacaagaacaacaagagcuggauggaguccgaguuccgggucuacagcuccgccaacaacugcacguucgaguacgugagccagcccuuccugauggaccuggagggcaagcaggggaacuucaagaaccuccgcgaguucguguucaagaacaucgacggcuacuucaagaucuacuccaagcacaccccgaucaaccugguccgggaccugccccagggguucagcgcccucgagccccugguggaccugcccaucggcaucaacaucacccgcuuccagacccuccuggcccugcaccgguccuaccucacgccgggggacagcagcuccggcuggaccgcgggcgccgccgccuacuacgugggguaccugcagccccgcaccuuccugcucaaguacaacgagaacggcaccaucacggacgcggucgacugcgcccuggacccccugagcgagaccaagugcacccucaaguccuucaccguggagaaggggaucuaccagacgagcaacuuccgggugcagcccaccgaguccaucguccgcuucccgaacaucaccaaccugugccccuucggcgagguguucaacgccacccgguucgccagcgucuacgccuggaaccgcaagcggaucuccaacugcguggcggacuacagcgugcuguacaacuccgccagcuucuccacguucaagugcuacggcgucagccccaccaagcucaacgaccugugcuucaccaacguguacgccgacuccuucgugauccgcggggacgagguccggcagaucgcccccggccagaccgggaagaucgccgacuacaacuacaagcugccggacgacuucacgggcugcgugaucgcguggaacagcaacaaccucgacuccaaggucgggggcaacuacaacuaccuguaccgccuguuccgcaagagcaaccucaagcccuucgagcgggacaucuccaccgagaucuaccaggccggcagcacccccugcaacgggguggagggcuucaacugcuacuucccccugcaguccuacggguuccagccgaccaacggcgugggguaccagcccuaccggguggucgugcugagcuucgagcuccugcacgcccccgccacggugugcggccccaagaaguccaccaaccuggucaagaacaagugcgugaacuucaacuucaacggccucaccgggaccggcgugcugaccgagagcaacaagaaguuccugccguuccagcaguucgggcgcgacaucgccgacacgaccgacgcgguccgcgacccccagacccuggagauccucgacaucacccccugcagcuucggcgggguguccgugaucacgccgggcaccaacaccagcaaccaggucgccgugcuguaccaggacgugaacugcaccgagguccccguggccauccacgccgaccagcugacgcccaccuggcggguguacuccaccggcagcaacgucuuccagacccgcgccgggugccucaucggcgcggagcacgugaacaacuccuacgagugcgacauccccaucggggccggcaucugcgccagcuaccagacgcagaccaacuccccgcggcgcgcccggagcguggcgucccagagcaucaucgccuacaccaugucccugggcgccgagaacagcgucgccuacuccaacaacagcaucgccauccccaccaacuucacgaucuccgugaccaccgagauccugcccgugagcaugaccaagacgagcgucgacugcaccauguacaucugcggggacuccaccgagugcagcaaccuccugcugcaguacggcuccuucugcacccagcucaaccgcgcgcugacggggaucgccguggagcaggacaagaacacccaggagguguucgcccaggucaagcagaucuacaagacgcccccgaucaaggacuucggcggguucaacuucagccagauccugcccgaccccuccaagcccagcaagcgguccuucaucgaggaccuccuguucaacaaggugacccuggccgacgccggcuucaucaagcaguacggcgacugccucggggacaucgcggcccgcgaccugaucugcgcccagaaguucaacggccugaccgugcucccgccccugcugaccgacgagaugaucgcccaguacaccagcgcccuccuggcggggaccaucacguccggcuggaccuucggggccggcgccgcccugcagauccccuucgcgaugcagauggccuaccgguucaacggcaucggggucacccagaacgugcucuacgagaaccagaagcugaucgccaaccaguucaacagcgccaucggcaagauccaggacucccugagcuccaccgccagcgcgcucgggaagcugcaggacguggucaaccagaacgcccaggcccugaacacgcucgugaagcagcuguccagcaacuucggcgccaucuccagcgugcugaacgacauccucucccgccuggacaaggucgaggccgaggugcagaucgaccggcugaucaccgggcgccuccagagccugcagaccuacgugacccagcagcugauccgggcggccgagauccgcgccagcgccaaccucgccgcgaccaagauguccgagugcguccugggccagagcaagcggguggacuucugcggcaagggguaccaccugauguccuucccccagagcgccccgcacggcguggucuuccuccacgugacguacguccccgcccaggagaagaacuucaccaccgcccccgcgaucugccacgacgggaaggcccacuucccccgcgagggcguguucguguccaacgggacccacugguucgucacgcagcggaacuucuacgagccgcagaucaucaccaccgacaacaccuucgugagcggcaacugcgacguggucaucggcaucgugaacaacacgguguacgacccccugcagcccgagcuggacuccuucaaggaggagcucgacaaguacuucaagaaccacaccagccccgacgucgaccugggggacaucuccggcaucaacgccagcguggugaacauccagaaggagaucgaccgccugaacgaggucgccaagaaccucaacgagucccugaucgaccugcaggagcucgggaaguacgagcaguacaucaagggcggcgggagcgggggcgggcagaucuacgagggcaagcugaccgccgaggggcuccgcuucggcaucguggccagccgguucaaccacgcgcuggucgaccgccugguggagggggccaucgacgccaucgugcggcacggcgggcgcgaggaggacaucacccucguccgggugcccggcuccugggagaucccgguggccgccggcgagcuggcccgcaaggaggacaucgacgcggucaucgccaucggggugcugauccggggcgccacgccccacuucgacuacaucgccagcgagguguccaaggggcucgcggaccugagccuggagcuccgcaagcccaucaccuucggcgucaucaccgccgacacccuggagcaggccaucgagcgggccgggacgaagcacggcaacaagggcugggaggccgcgcuguccgccaucgagauggccaaccucuucaagagccugcgcuga

SEQ ID NO: 11848 - RNA, 4116 nt, Artificial Sequence
  SARS-CoV-2/Wuhan/WIV05/2019__EPI_ISL_402128 spike protein CDS gc (1-1211)(K986P_V987P) LumSynth construct
auguucguguuccugguccuccugccccuggugagcucccagugcgugaaccucaccacccgcacgcagcugccgcccgccuacaccaacagcuucacccggggcgucuacuaccccgacaagguguuccgcuccagcgugcugcacuccacccaggaccucuuccugcccuucuucagcaacgucacgugguuccacgccauccacguguccgggaccaacggcaccaagcgguucgacaacccggugcugcccuucaacgacggggucuacuucgcgagcaccgagaaguccaacaucauccgcggcuggaucuucgggacgacccucgacagcaagacccagucccugcugaucgugaacaacgccaccaacguggucaucaaggugugcgaguuccaguucugcaacgaccccuuccucggcguguacuaccacaagaacaacaagagcuggauggaguccgaguuccgggucuacagcuccgccaacaacugcacguucgaguacgugagccagcccuuccugauggaccuggagggcaagcaggggaacuucaagaaccuccgcgaguucguguucaagaacaucgacggcuacuucaagaucuacuccaagcacaccccgaucaaccugguccgggaccugccccagggguucagcgcccucgagccccugguggaccugcccaucggcaucaacaucacccgcuuccagacccuccuggcccugcaccgguccuaccucacgccgggggacagcagcuccggcuggaccgcgggcgccgccgccuacuacgugggguaccugcagccccgcaccuuccugcucaaguacaacgagaacggcaccaucacggacgcggucgacugcgcccuggacccccugagcgagaccaagugcacccucaaguccuucaccguggagaaggggaucuaccagacgagcaacuuccgggugcagcccaccgaguccaucguccgcuucccgaacaucaccaaccugugccccuucggcgagguguucaacgccacccgguucgccagcgucuacgccuggaaccgcaagcggaucuccaacugcguggcggacuacagcgugcuguacaacuccgccagcuucuccacguucaagugcuacggcgucagccccaccaagcucaacgaccugugcuucaccaacguguacgccgacuccuucgugauccgcggggacgagguccggcagaucgcccccggccagaccgggaagaucgccgacuacaacuacaagcugccggacgacuucacgggcugcgugaucgcguggaacagcaacaaccucgacuccaaggucgggggcaacuacaacuaccuguaccgccuguuccgcaagagcaaccucaagcccuucgagcgggacaucuccaccgagaucuaccaggccggcagcacccccugcaacgggguggagggcuucaacugcuacuucccccugcaguccuacggguuccagccgaccaacggcgugggguaccagcccuaccggguggucgugcugagcuucgagcuccugcacgcccccgccacggugugcggccccaagaaguccaccaaccuggucaagaacaagugcgugaacuucaacuucaacggccucaccgggaccggcgugcugaccgagagcaacaagaaguuccugccguuccagcaguucgggcgcgacaucgccgacacgaccgacgcgguccgcgacccccagacccuggagauccucgacaucacccccugcagcuucggcgggguguccgugaucacgccgggcaccaacaccagcaaccaggucgccgugcuguaccaggacgugaacugcaccgagguccccguggccauccacgccgaccagcugacgcccaccuggcggguguacuccaccggcagcaacgucuuccagacccgcgccgggugccucaucggcgcggagcacgugaacaacuccuacgagugcgacauccccaucggggccggcaucugcgccagcuaccagacgcagaccaacuccccgcggcgcgcccggagcguggcgucccagagcaucaucgccuacaccaugucccugggcgccgagaacagcgucgccuacuccaacaacagcaucgccauccccaccaacuucacgaucuccgugaccaccgagauccugcccgugagcaugaccaagacgagcgucgacugcaccauguacaucugcggggacuccaccgagugcagcaaccuccugcugcaguacggcuccuucugcacccagcucaaccgcgcgcugacggggaucgccguggagcaggacaagaacacccaggagguguucgcccaggucaagcagaucuacaagacgcccccgaucaaggacuucggcggguucaacuucagccagauccugcccgaccccuccaagcccagcaagcgguccuucaucgaggaccuccuguucaacaaggugacccuggccgacgccggcuucaucaagcaguacggcgacugccucggggacaucgcggcccgcgaccugaucugcgcccagaaguucaacggccugaccgugcucccgccccugcugaccgacgagaugaucgcccaguacaccagcgcccuccuggcggggaccaucacguccggcuggaccuucggggccggcgccgcccugcagauccccuucgcgaugcagauggccuaccgguucaacggcaucggggucacccagaacgugcucuacgagaaccagaagcugaucgccaaccaguucaacagcgccaucggcaagauccaggacucccugagcuccaccgccagcgcgcucgggaagcugcaggacguggucaaccagaacgcccaggcccugaacacgcucgugaagcagcuguccagcaacuucggcgccaucuccagcgugcugaacgacauccucucccgccuggacccgcccgaggccgaggugcagaucgaccggcugaucaccgggcgccuccagagccugcagaccuacgugacccagcagcugauccgggcggccgagauccgcgccagcgccaaccucgccgcgaccaagauguccgagugcguccugggccagagcaagcggguggacuucugcggcaagggguaccaccugauguccuucccccagagcgccccgcacggcguggucuuccuccacgugacguacguccccgcccaggagaagaacuucaccaccgcccccgcgaucugccacgacgggaaggcccacuucccccgcgagggcguguucguguccaacgggacccacugguucgucacgcagcggaacuucuacgagccgcagaucaucaccaccgacaacaccuucgugagcggcaacugcgacguggucaucggcaucgugaacaacacgguguacgacccccugcagcccgagcuggacuccuucaaggaggagcucgacaaguacuucaagaaccacaccagccccgacgucgaccugggggacaucuccggcaucaacgccagcguggugaacauccagaaggagaucgaccgccugaacgaggucgccaagaaccucaacgagucccugaucgaccugcaggagcucgggaaguacgagcaguacaucaagggcggcgggagcgggggcgggcagaucuacgagggcaagcugaccgccgaggggcuccgcuucggcaucguggccagccgguucaaccacgcgcuggucgaccgccugguggagggggccaucgacgccaucgugcggcacggcgggcgcgaggaggacaucacccucguccgggugcccggcuccugggagaucccgguggccgccggcgagcuggcccgcaaggaggacaucgacgcggucaucgccaucggggugcugauccggggcgccacgccccacuucgacuacaucgccagcgagguguccaaggggcucgcggaccugagccuggagcuccgcaagcccaucaccuucggcgucaucaccgccgacacccuggagcaggccaucgagcgggccgggacgaagcacggcaacaagggcugggaggccgcgcuguccgccaucgagauggccaaccucuucaagagccugcgcuga

SEQ ID NO: 11849 - RNA, 4116 nt, Artificial Sequence
  SARS-CoV-2/Wuhan/WIV05/2019__EPI_ISL_402128 spike protein CDS gc (1-1211)(K986P_V987P_T887WN_A1020W) LumSynth construct
auguucguguuccugguccuccugccccuggugagcucccagugcgugaaccucaccacccgcacgcagcugccgcccgccuacaccaacagcuucacccggggcgucuacuaccccgacaagguguuccgcuccagcgugcugcacuccacccaggaccucuuccugcccuucuucagcaacgucacgugguuccacgccauccacguguccgggaccaacggcaccaagcgguucgacaacccggugcugcccuucaacgacggggucuacuucgcgagcaccgagaaguccaacaucauccgcggcuggaucuucgggacgacccucgacagcaagacccagucccugcugaucgugaacaacgccaccaacguggucaucaaggugugcgaguuccaguucugcaacgaccccuuccucggcguguacuaccacaagaacaacaagagcuggauggaguccgaguuccgggucuacagcuccgccaacaacugcacguucgaguacgugagccagcccuuccugauggaccuggagggcaagcaggggaacuucaagaaccuccgcgaguucguguucaagaacaucgacggcuacuucaagaucuacuccaagcacaccccgaucaaccugguccgggaccugccccagggguucagcgcccucgagccccugguggaccugcccaucggcaucaacaucacccgcuuccagacccuccuggcccugcaccgguccuaccucacgccgggggacagcagcuccggcuggaccgcgggcgccgccgccuacuacgugggguaccugcagccccgcaccuuccugcucaaguacaacgagaacggcaccaucacggacgcggucgacugcgcccuggacccccugagcgagaccaagugcacccucaaguccuucaccguggagaaggggaucuaccagacgagcaacuuccgggugcagcccaccgaguccaucguccgcuucccgaacaucaccaaccugugccccuucggcgagguguucaacgccacccgguucgccagcgucuacgccuggaaccgcaagcggaucuccaacugcguggcggacuacagcgugcuguacaacuccgccagcuucuccacguucaagugcuacggcgucagccccaccaagcucaacgaccugugcuucaccaacguguacgccgacuccuucgugauccgcggggacgagguccggcagaucgcccccggccagaccgggaagaucgccgacuacaacuacaagcugccggacgacuucacgggcugcgugaucgcguggaacagcaacaaccucgacuccaaggucgggggcaacuacaacuaccuguaccgccuguuccgcaagagcaaccucaagcccuucgagcgggacaucuccaccgagaucuaccaggccggcagcacccccugcaacgggguggagggcuucaacugcuacuucccccugcaguccuacggguuccagccgaccaacggcgugggguaccagcccuaccggguggucgugcugagcuucgagcuccugcacgcccccgccacggugugcggccccaagaaguccaccaaccuggucaagaacaagugcgugaacuucaacuucaacggccucaccgggaccggcgugcugaccgagagcaacaagaaguuccugccguuccagcaguucgggcgcgacaucgccgacacgaccgacgcgguccgcgacccccagacccuggagauccucgacaucacccccugcagcuucggcgggguguccgugaucacgccgggcaccaacaccagcaaccaggucgccgugcuguaccaggacgugaacugcaccgagguccccguggccauccacgccgaccagcugacgcccaccuggcggguguacuccaccggcagcaacgucuuccagacccgcgccgggugccucaucggcgcggagcacgugaacaacuccuacgagugcgacauccccaucggggccggcaucugcgccagcuaccagacgcagaccaacuccccgcggcgcgcccggagcguggcgucccagagcaucaucgccuacaccaugucccugggcgccgagaacagcgucgccuacuccaacaacagcaucgccauccccaccaacuucacgaucuccgugaccaccgagauccugcccgugagcaugaccaagacgagcgucgacugcaccauguacaucugcggggacuccaccgagugcagcaaccuccugcugcaguacggcuccuucugcacccagcucaaccgcgcgcugacggggaucgccguggagcaggacaagaacacccaggagguguucgcccaggucaagcagaucuacaagacgcccccgaucaaggacuucggcggguucaacuucagccagauccugcccgaccccuccaagcccagcaagcgguccuucaucgaggaccuccuguucaacaaggugacccuggccgacgccggcuucaucaagcaguacggcgacugccucggggacaucgcggcccgcgaccugaucugcgcccagaaguucaacggccugaccgugcucccgccccugcugaccgacgagaugaucgcccaguacaccagcgcccuccuggcggggaccaucacguccggcuggugguucggggccggcgccgcccugcagauccccuucgcgaugcagauggccuaccgguucaacggcaucggggucacccagaacgugcucuacgagaaccagaagcugaucgccaaccaguucaacagcgccaucggcaagauccaggacucccugagcuccaccgccagcgcgcucgggaagcugcaggacguggucaaccagaacgcccaggcccugaacacgcucgugaagcagcuguccagcaacuucggcgccaucuccagcgugcugaacgacauccucucccgccuggacccgcccgaggccgaggugcagaucgaccggcugaucaccgggcgccuccagagccugcagaccuacgugacccagcagcugauccgggcggccgagauccgcuggagcgccaaccucgccgcgaccaagauguccgagugcguccugggccagagcaagcggguggacuucugcggcaagggguaccaccugauguccuucccccagagcgccccgcacggcguggucuuccuccacgugacguacguccccgcccaggagaagaacuucaccaccgcccccgcgaucugccacgacgggaaggcccacuucccccgcgagggcguguucguguccaacgggacccacugguucgucacgcagcggaacuucuacgagccgcagaucaucaccaccgacaacaccuucgugagcggcaacugcgacguggucaucggcaucgugaacaacacgguguacgacccccugcagcccgagcuggacuccuucaaggaggagcucgacaaguacuucaagaaccacaccagccccgacgucgaccugggggacaucuccggcaucaacgccagcguggugaacauccagaaggagaucgaccgccugaacgaggucgccaagaaccucaacgagucccugaucgaccugcaggagcucgggaaguacgagcaguacaucaagggcggcgggagcgggggcgggcagaucuacgagggcaagcugaccgccgaggggcuccgcuucggcaucguggccagccgguucaaccacgcgcuggucgaccgccugguggagggggccaucgacgccaucgugcggcacggcgggcgcgaggaggacaucacccucguccgggugcccggcuccugggagaucccgguggccgccggcgagcuggcccgcaaggaggacaucgacgcggucaucgccaucggggugcugauccggggcgccacgccccacuucgacuacaucgccagcgagguguccaaggggcucgcggaccugagccuggagcuccgcaagcccaucaccuucggcgucaucaccgccgacacccuggagcaggccaucgagcgggccgggacgaagcacggcaacaagggcugggaggccgcgcuguccgccaucgagauggccaaccucuucaagagccugcgcuga

SEQ ID NO: 11850 - RNA, 4116 nt, Artificial Sequence
  SARS-CoV-2/Wuhan/WIV05/2019__EPI_ISL_402128 spike protein CDS gc (1-1211)(K986P_V987P_P1069F) LumSynth construct
auguucguguuccugguccuccugccccuggugagcucccagugcgugaaccucaccacccgcacgcagcugccgcccgccuacaccaacagcuucacccggggcgucuacuaccccgacaagguguuccgcuccagcgugcugcacuccacccaggaccucuuccugcccuucuucagcaacgucacgugguuccacgccauccacguguccgggaccaacggcaccaagcgguucgacaacccggugcugcccuucaacgacggggucuacuucgcgagcaccgagaaguccaacaucauccgcggcuggaucuucgggacgacccucgacagcaagacccagucccugcugaucgugaacaacgccaccaacguggucaucaaggugugcgaguuccaguucugcaacgaccccuuccucggcguguacuaccacaagaacaacaagagcuggauggaguccgaguuccgggucuacagcuccgccaacaacugcacguucgaguacgugagccagcccuuccugauggaccuggagggcaagcaggggaacuucaagaaccuccgcgaguucguguucaagaacaucgacggcuacuucaagaucuacuccaagcacaccccgaucaaccugguccgggaccugccccagggguucagcgcccucgagccccugguggaccugcccaucggcaucaacaucacccgcuuccagacccuccuggcccugcaccgguccuaccucacgccgggggacagcagcuccggcuggaccgcgggcgccgccgccuacuacgugggguaccugcagccccgcaccuuccugcucaaguacaacgagaacggcaccaucacggacgcggucgacugcgcccuggacccccugagcgagaccaagugcacccucaaguccuucaccguggagaaggggaucuaccagacgagcaacuuccgggugcagcccaccgaguccaucguccgcuucccgaacaucaccaaccugugccccuucggcgagguguucaacgccacccgguucgccagcgucuacgccuggaaccgcaagcggaucuccaacugcguggcggacuacagcgugcuguacaacuccgccagcuucuccacguucaagugcuacggcgucagccccaccaagcucaacgaccugugcuucaccaacguguacgccgacuccuucgugauccgcggggacgagguccggcagaucgcccccggccagaccgggaagaucgccgacuacaacuacaagcugccggacgacuucacgggcugcgugaucgcguggaacagcaacaaccucgacuccaaggucgggggcaacuacaacuaccuguaccgccuguuccgcaagagcaaccucaagcccuucgagcgggacaucuccaccgagaucuaccaggccggcagcacccccugcaacgggguggagggcuucaacugcuacuucccccugcaguccuacggguuccagccgaccaacggcgugggguaccagcccuaccggguggucgugcugagcuucgagcuccugcacgcccccgccacggugugcggccccaagaaguccaccaaccuggucaagaacaagugcgugaacuucaacuucaacggccucaccgggaccggcgugcugaccgagagcaacaagaaguuccugccguuccagcaguucgggcgcgacaucgccgacacgaccgacgcgguccgcgacccccagacccuggagauccucgacaucacccccugcagcuucggcgggguguccgugaucacgccgggcaccaacaccagcaaccaggucgccgugcuguaccaggacgugaacugcaccgagguccccguggccauccacgccgaccagcugacgcccaccuggcggguguacuccaccggcagcaacgucuuccagacccgcgccgggugccucaucggcgcggagcacgugaacaacuccuacgagugcgacauccccaucggggccggcaucugcgccagcuaccagacgcagaccaacuccccgcggcgcgcccggagcguggcgucccagagcaucaucgccuacaccaugucccugggcgccgagaacagcgucgccuacuccaacaacagcaucgccauccccaccaacuucacgaucuccgugaccaccgagauccugcccgugagcaugaccaagacgagcgucgacugcaccauguacaucugcggggacuccaccgagugcagcaaccuccugcugcaguacggcuccuucugcacccagcucaaccgcgcgcugacggggaucgccguggagcaggacaagaacacccaggagguguucgcccaggucaagcagaucuacaagacgcccccgaucaaggacuucggcggguucaacuucagccagauccugcccgaccccuccaagcccagcaagcgguccuucaucgaggaccuccuguucaacaaggugacccuggccgacgccggcuucaucaagcaguacggcgacugccucggggacaucgcggcccgcgaccugaucugcgcccagaaguucaacggccugaccgugcucccgccccugcugaccgacgagaugaucgcccaguacaccagcgcccuccuggcggggaccaucacguccggcuggaccuucggggccggcgccgcccugcagauccccuucgcgaugcagauggccuaccgguucaacggcaucggggucacccagaacgugcucuacgagaaccagaagcugaucgccaaccaguucaacagcgccaucggcaagauccaggacucccugagcuccaccgccagcgcgcucgggaagcugcaggacguggucaaccagaacgcccaggcccugaacacgcucgugaagcagcuguccagcaacuucggcgccaucuccagcgugcugaacgacauccucucccgccuggacccgcccgaggccgaggugcagaucgaccggcugaucaccgggcgccuccagagccugcagaccuacgugacccagcagcugauccgggcggccgagauccgcgccagcgccaaccucgccgcgaccaagauguccgagugcguccugggccagagcaagcggguggacuucugcggcaagggguaccaccugauguccuucccccagagcgccccgcacggcguggucuuccuccacgugacguacgucuucgcccaggagaagaacuucaccaccgcccccgcgaucugccacgacgggaaggcccacuucccccgcgagggcguguucguguccaacgggacccacugguucgucacgcagcggaacuucuacgagccgcagaucaucaccaccgacaacaccuucgugagcggcaacugcgacguggucaucggcaucgugaacaacacgguguacgacccccugcagcccgagcuggacuccuucaaggaggagcucgacaaguacuucaagaaccacaccagccccgacgucgaccugggggacaucuccggcaucaacgccagcguggugaacauccagaaggagaucgaccgccugaacgaggucgccaagaaccucaacgagucccugaucgaccugcaggagcucgggaaguacgagcaguacaucaagggcggcgggagcgggggcgggcagaucuacgagggcaagcugaccgccgaggggcuccgcuucggcaucguggccagccgguucaaccacgcgcuggucgaccgccugguggagggggccaucgacgccaucgugcggcacggcgggcgcgaggaggacaucacccucguccgggugcccggcuccugggagaucccgguggccgccggcgagcuggcccgcaaggaggacaucgacgcggucaucgccaucggggugcugauccggggcgccacgccccacuucgacuacaucgccagcgagguguccaaggggcucgcggaccugagccuggagcuccgcaagcccaucaccuucggcgucaucaccgccgacacccuggagcaggccaucgagcgggccgggacgaagcacggcaacaagggcugggaggccgcgcuguccgccaucgagauggccaaccucuucaagagccugcgcuga

SEQ ID NO: 11851 - RNA, 4116 nt, Artificial Sequence
  SARS-CoV-2/Wuhan/WIV05/2019__EPI_ISL_402128 spike protein CDS gc (1-1211)(K986P_V987P_ H1048Q_H1064N_ H1083N_H1101N) LumSynth construct
auguucguguuccugguccuccugccccuggugagcucccagugcgugaaccucaccacccgcacgcagcugccgcccgccuacaccaacagcuucacccggggcgucuacuaccccgacaagguguuccgcuccagcgugcugcacuccacccaggaccucuuccugcccuucuucagcaacgucacgugguuccacgccauccacguguccgggaccaacggcaccaagcgguucgacaacccggugcugcccuucaacgacggggucuacuucgcgagcaccgagaaguccaacaucauccgcggcuggaucuucgggacgacccucgacagcaagacccagucccugcugaucgugaacaacgccaccaacguggucaucaaggugugcgaguuccaguucugcaacgaccccuuccucggcguguacuaccacaagaacaacaagagcuggauggaguccgaguuccgggucuacagcuccgccaacaacugcacguucgaguacgugagccagcccuuccugauggaccuggagggcaagcaggggaacuucaagaaccuccgcgaguucguguucaagaacaucgacggcuacuucaagaucuacuccaagcacaccccgaucaaccugguccgggaccugccccagggguucagcgcccucgagccccugguggaccugcccaucggcaucaacaucacccgcuuccagacccuccuggcccugcaccgguccuaccucacgccgggggacagcagcuccggcuggaccgcgggcgccgccgccuacuacgugggguaccugcagccccgcaccuuccugcucaaguacaacgagaacggcaccaucacggacgcggucgacugcgcccuggacccccugagcgagaccaagugcacccucaaguccuucaccguggagaaggggaucuaccagacgagcaacuuccgggugcagcccaccgaguccaucguccgcuucccgaacaucaccaaccugugccccuucggcgagguguucaacgccacccgguucgccagcgucuacgccuggaaccgcaagcggaucuccaacugcguggcggacuacagcgugcuguacaacuccgccagcuucuccacguucaagugcuacggcgucagccccaccaagcucaacgaccugugcuucaccaacguguacgccgacuccuucgugauccgcggggacgagguccggcagaucgcccccggccagaccgggaagaucgccgacuacaacuacaagcugccggacgacuucacgggcugcgugaucgcguggaacagcaacaaccucgacuccaaggucgggggcaacuacaacuaccuguaccgccuguuccgcaagagcaaccucaagcccuucgagcgggacaucuccaccgagaucuaccaggccggcagcacccccugcaacgggguggagggcuucaacugcuacuucccccugcaguccuacggguuccagccgaccaacggcgugggguaccagcccuaccggguggucgugcugagcuucgagcuccugcacgcccccgccacggugugcggccccaagaaguccaccaaccuggucaagaacaagugcgugaacuucaacuucaacggccucaccgggaccggcgugcugaccgagagcaacaagaaguuccugccguuccagcaguucgggcgcgacaucgccgacacgaccgacgcgguccgcgacccccagacccuggagauccucgacaucacccccugcagcuucggcgggguguccgugaucacgccgggcaccaacaccagcaaccaggucgccgugcuguaccaggacgugaacugcaccgagguccccguggccauccacgccgaccagcugacgcccaccuggcggguguacuccaccggcagcaacgucuuccagacccgcgccgggugccucaucggcgcggagcacgugaacaacuccuacgagugcgacauccccaucggggccggcaucugcgccagcuaccagacgcagaccaacuccccgcggcgcgcccggagcguggcgucccagagcaucaucgccuacaccaugucccugggcgccgagaacagcgucgccuacuccaacaacagcaucgccauccccaccaacuucacgaucuccgugaccaccgagauccugcccgugagcaugaccaagacgagcgucgacugcaccauguacaucugcggggacuccaccgagugcagcaaccuccugcugcaguacggcuccuucugcacccagcucaaccgcgcgcugacggggaucgccguggagcaggacaagaacacccaggagguguucgcccaggucaagcagaucuacaagacgcccccgaucaaggacuucggcggguucaacuucagccagauccugcccgaccccuccaagcccagcaagcgguccuucaucgaggaccuccuguucaacaaggugacccuggccgacgccggcuucaucaagcaguacggcgacugccucggggacaucgcggcccgcgaccugaucugcgcccagaaguucaacggccugaccgugcucccgccccugcugaccgacgagaugaucgcccaguacaccagcgcccuccuggcggggaccaucacguccggcuggaccuucggggccggcgccgcccugcagauccccuucgcgaugcagauggccuaccgguucaacggcaucggggucacccagaacgugcucuacgagaaccagaagcugaucgccaaccaguucaacagcgccaucggcaagauccaggacucccugagcuccaccgccagcgcgcucgggaagcugcaggacguggucaaccagaacgcccaggcccugaacacgcucgugaagcagcuguccagcaacuucggcgccaucuccagcgugcugaacgacauccucucccgccuggacccgcccgaggccgaggugcagaucgaccggcugaucaccgggcgccuccagagccugcagaccuacgugacccagcagcugauccgggcggccgagauccgcgccagcgccaaccucgccgcgaccaagauguccgagugcguccugggccagagcaagcggguggacuucugcggcaagggguaccagcugauguccuucccccagagcgccccgcacggcguggucuuccucaacgugacguacguccccgcccaggagaagaacuucaccaccgcccccgcgaucugcaacgacgggaaggcccacuucccccgcgagggcguguucguguccaacgggaccaacugguucgucacgcagcggaacuucuacgagccgcagaucaucaccaccgacaacaccuucgugagcggcaacugcgacguggucaucggcaucgugaacaacacgguguacgacccccugcagcccgagcuggacuccuucaaggaggagcucgacaaguacuucaagaaccacaccagccccgacgucgaccugggggacaucuccggcaucaacgccagcguggugaacauccagaaggagaucgaccgccugaacgaggucgccaagaaccucaacgagucccugaucgaccugcaggagcucgggaaguacgagcaguacaucaagggcggcgggagcgggggcgggcagaucuacgagggcaagcugaccgccgaggggcuccgcuucggcaucguggccagccgguucaaccacgcgcuggucgaccgccugguggagggggccaucgacgccaucgugcggcacggcgggcgcgaggaggacaucacccucguccgggugcccggcuccugggagaucccgguggccgccggcgagcuggcccgcaaggaggacaucgacgcggucaucgccaucggggugcugauccggggcgccacgccccacuucgacuacaucgccagcgagguguccaaggggcucgcggaccugagccuggagcuccgcaagcccaucaccuucggcgucaucaccgccgacacccuggagcaggccaucgagcgggccgggacgaagcacggcaacaagggcugggaggccgcgcuguccgccaucgagauggccaaccucuucaagagccugcgcuga

SEQ ID NO: 11852 - RNA, 4116 nt, Artificial Sequence
  SARS-CoV-2/Wuhan/WIV05/2019__EPI_ISL_402128 spike protein CDS gc (1-1211)(I712C_T1077C) LumSynth construct
auguucguguuccugguccuccugccccuggugagcucccagugcgugaaccucaccacccgcacgcagcugccgcccgccuacaccaacagcuucacccggggcgucuacuaccccgacaagguguuccgcuccagcgugcugcacuccacccaggaccucuuccugcccuucuucagcaacgucacgugguuccacgccauccacguguccgggaccaacggcaccaagcgguucgacaacccggugcugcccuucaacgacggggucuacuucgcgagcaccgagaaguccaacaucauccgcggcuggaucuucgggacgacccucgacagcaagacccagucccugcugaucgugaacaacgccaccaacguggucaucaaggugugcgaguuccaguucugcaacgaccccuuccucggcguguacuaccacaagaacaacaagagcuggauggaguccgaguuccgggucuacagcuccgccaacaacugcacguucgaguacgugagccagcccuuccugauggaccuggagggcaagcaggggaacuucaagaaccuccgcgaguucguguucaagaacaucgacggcuacuucaagaucuacuccaagcacaccccgaucaaccugguccgggaccugccccagggguucagcgcccucgagccccugguggaccugcccaucggcaucaacaucacccgcuuccagacccuccuggcccugcaccgguccuaccucacgccgggggacagcagcuccggcuggaccgcgggcgccgccgccuacuacgugggguaccugcagccccgcaccuuccugcucaaguacaacgagaacggcaccaucacggacgcggucgacugcgcccuggacccccugagcgagaccaagugcacccucaaguccuucaccguggagaaggggaucuaccagacgagcaacuuccgggugcagcccaccgaguccaucguccgcuucccgaacaucaccaaccugugccccuucggcgagguguucaacgccacccgguucgccagcgucuacgccuggaaccgcaagcggaucuccaacugcguggcggacuacagcgugcuguacaacuccgccagcuucuccacguucaagugcuacggcgucagccccaccaagcucaacgaccugugcuucaccaacguguacgccgacuccuucgugauccgcggggacgagguccggcagaucgcccccggccagaccgggaagaucgccgacuacaacuacaagcugccggacgacuucacgggcugcgugaucgcguggaacagcaacaaccucgacuccaaggucgggggcaacuacaacuaccuguaccgccuguuccgcaagagcaaccucaagcccuucgagcgggacaucuccaccgagaucuaccaggccggcagcacccccugcaacgggguggagggcuucaacugcuacuucccccugcaguccuacggguuccagccgaccaacggcgugggguaccagcccuaccggguggucgugcugagcuucgagcuccugcacgcccccgccacggugugcggccccaagaaguccaccaaccuggucaagaacaagugcgugaacuucaacuucaacggccucaccgggaccggcgugcugaccgagagcaacaagaaguuccugccguuccagcaguucgggcgcgacaucgccgacacgaccgacgcgguccgcgacccccagacccuggagauccucgacaucacccccugcagcuucggcgggguguccgugaucacgccgggcaccaacaccagcaaccaggucgccgugcuguaccaggacgugaacugcaccgagguccccguggccauccacgccgaccagcugacgcccaccuggcggguguacuccaccggcagcaacgucuuccagacccgcgccgggugccucaucggcgcggagcacgugaacaacuccuacgagugcgacauccccaucggggccggcaucugcgccagcuaccagacgcagaccaacuccccgcggcgcgcccggagcguggcgucccagagcaucaucgccuacaccaugucccugggcgccgagaacagcgucgccuacuccaacaacagcugcgccauccccaccaacuucacgaucuccgugaccaccgagauccugcccgugagcaugaccaagacgagcgucgacugcaccauguacaucugcggggacuccaccgagugcagcaaccuccugcugcaguacggcuccuucugcacccagcucaaccgcgcgcugacggggaucgccguggagcaggacaagaacacccaggagguguucgcccaggucaagcagaucuacaagacgcccccgaucaaggacuucggcggguucaacuucagccagauccugcccgaccccuccaagcccagcaagcgguccuucaucgaggaccuccuguucaacaaggugacccuggccgacgccggcuucaucaagcaguacggcgacugccucggggacaucgcggcccgcgaccugaucugcgcccagaaguucaacggccugaccgugcucccgccccugcugaccgacgagaugaucgcccaguacaccagcgcccuccuggcggggaccaucacguccggcuggaccuucggggccggcgccgcccugcagauccccuucgcgaugcagauggccuaccgguucaacggcaucggggucacccagaacgugcucuacgagaaccagaagcugaucgccaaccaguucaacagcgccaucggcaagauccaggacucccugagcuccaccgccagcgcgcucgggaagcugcaggacguggucaaccagaacgcccaggcccugaacacgcucgugaagcagcuguccagcaacuucggcgccaucuccagcgugcugaacgacauccucucccgccuggacaaggucgaggccgaggugcagaucgaccggcugaucaccgggcgccuccagagccugcagaccuacgugacccagcagcugauccgggcggccgagauccgcgccagcgccaaccucgccgcgaccaagauguccgagugcguccugggccagagcaagcggguggacuucugcggcaagggguaccaccugauguccuucccccagagcgccccgcacggcguggucuuccuccacgugacguacguccccgcccaggagaagaacuucaccugcgcccccgcgaucugccacgacgggaaggcccacuucccccgcgagggcguguucguguccaacgggacccacugguucgucacgcagcggaacuucuacgagccgcagaucaucaccaccgacaacaccuucgugagcggcaacugcgacguggucaucggcaucgugaacaacacgguguacgacccccugcagcccgagcuggacuccuucaaggaggagcucgacaaguacuucaagaaccacaccagccccgacgucgaccugggggacaucuccggcaucaacgccagcguggugaacauccagaaggagaucgaccgccugaacgaggucgccaagaaccucaacgagucccugaucgaccugcaggagcucgggaaguacgagcaguacaucaagggcggcgggagcgggggcgggcagaucuacgagggcaagcugaccgccgaggggcuccgcuucggcaucguggccagccgguucaaccacgcgcuggucgaccgccugguggagggggccaucgacgccaucgugcggcacggcgggcgcgaggaggacaucacccucguccgggugcccggcuccugggagaucccgguggccgccggcgagcuggcccgcaaggaggacaucgacgcggucaucgccaucggggugcugauccggggcgccacgccccacuucgacuacaucgccagcgagguguccaaggggcucgcggaccugagccuggagcuccgcaagcccaucaccuucggcgucaucaccgccgacacccuggagcaggccaucgagcgggccgggacgaagcacggcaacaagggcugggaggccgcgcuguccgccaucgagauggccaaccucuucaagagccugcgcuga

SEQ ID NO: 11853 - RNA, 4116 nt, Artificial Sequence
  SARS-CoV-2/Wuhan/WIV05/2019__EPI_ISL_402128 spike protein CDS gc (1-1211)(I714C_Y1110C) LumSynth construct
auguucguguuccugguccuccugccccuggugagcucccagugcgugaaccucaccacccgcacgcagcugccgcccgccuacaccaacagcuucacccggggcgucuacuaccccgacaagguguuccgcuccagcgugcugcacuccacccaggaccucuuccugcccuucuucagcaacgucacgugguuccacgccauccacguguccgggaccaacggcaccaagcgguucgacaacccggugcugcccuucaacgacggggucuacuucgcgagcaccgagaaguccaacaucauccgcggcuggaucuucgggacgacccucgacagcaagacccagucccugcugaucgugaacaacgccaccaacguggucaucaaggugugcgaguuccaguucugcaacgaccccuuccucggcguguacuaccacaagaacaacaagagcuggauggaguccgaguuccgggucuacagcuccgccaacaacugcacguucgaguacgugagccagcccuuccugauggaccuggagggcaagcaggggaacuucaagaaccuccgcgaguucguguucaagaacaucgacggcuacuucaagaucuacuccaagcacaccccgaucaaccugguccgggaccugccccagggguucagcgcccucgagccccugguggaccugcccaucggcaucaacaucacccgcuuccagacccuccuggcccugcaccgguccuaccucacgccgggggacagcagcuccggcuggaccgcgggcgccgccgccuacuacgugggguaccugcagccccgcaccuuccugcucaaguacaacgagaacggcaccaucacggacgcggucgacugcgcccuggacccccugagcgagaccaagugcacccucaaguccuucaccguggagaaggggaucuaccagacgagcaacuuccgggugcagcccaccgaguccaucguccgcuucccgaacaucaccaaccugugccccuucggcgagguguucaacgccacccgguucgccagcgucuacgccuggaaccgcaagcggaucuccaacugcguggcggacuacagcgugcuguacaacuccgccagcuucuccacguucaagugcuacggcgucagccccaccaagcucaacgaccugugcuucaccaacguguacgccgacuccuucgugauccgcggggacgagguccggcagaucgcccccggccagaccgggaagaucgccgacuacaacuacaagcugccggacgacuucacgggcugcgugaucgcguggaacagcaacaaccucgacuccaaggucgggggcaacuacaacuaccuguaccgccuguuccgcaagagcaaccucaagcccuucgagcgggacaucuccaccgagaucuaccaggccggcagcacccccugcaacgggguggagggcuucaacugcuacuucccccugcaguccuacggguuccagccgaccaacggcgugggguaccagcccuaccggguggucgugcugagcuucgagcuccugcacgcccccgccacggugugcggccccaagaaguccaccaaccuggucaagaacaagugcgugaacuucaacuucaacggccucaccgggaccggcgugcugaccgagagcaacaagaaguuccugccguuccagcaguucgggcgcgacaucgccgacacgaccgacgcgguccgcgacccccagacccuggagauccucgacaucacccccugcagcuucggcgggguguccgugaucacgccgggcaccaacaccagcaaccaggucgccgugcuguaccaggacgugaacugcaccgagguccccguggccauccacgccgaccagcugacgcccaccuggcggguguacuccaccggcagcaacgucuuccagacccgcgccgggugccucaucggcgcggagcacgugaacaacuccuacgagugcgacauccccaucggggccggcaucugcgccagcuaccagacgcagaccaacuccccgcggcgcgcccggagcguggcgucccagagcaucaucgccuacaccaugucccugggcgccgagaacagcgucgccuacuccaacaacagcaucgccugccccaccaacuucacgaucuccgugaccaccgagauccugcccgugagcaugaccaagacgagcgucgacugcaccauguacaucugcggggacuccaccgagugcagcaaccuccugcugcaguacggcuccuucugcacccagcucaaccgcgcgcugacggggaucgccguggagcaggacaagaacacccaggagguguucgcccaggucaagcagaucuacaagacgcccccgaucaaggacuucggcggguucaacuucagccagauccugcccgaccccuccaagcccagcaagcgguccuucaucgaggaccuccuguucaacaaggugacccuggccgacgccggcuucaucaagcaguacggcgacugccucggggacaucgcggcccgcgaccugaucugcgcccagaaguucaacggccugaccgugcucccgccccugcugaccgacgagaugaucgcccaguacaccagcgcccuccuggcggggaccaucacguccggcuggaccuucggggccggcgccgcccugcagauccccuucgcgaugcagauggccuaccgguucaacggcaucggggucacccagaacgugcucuacgagaaccagaagcugaucgccaaccaguucaacagcgccaucggcaagauccaggacucccugagcuccaccgccagcgcgcucgggaagcugcaggacguggucaaccagaacgcccaggcccugaacacgcucgugaagcagcuguccagcaacuucggcgccaucuccagcgugcugaacgacauccucucccgccuggacaaggucgaggccgaggugcagaucgaccggcugaucaccgggcgccuccagagccugcagaccuacgugacccagcagcugauccgggcggccgagauccgcgccagcgccaaccucgccgcgaccaagauguccgagugcguccugggccagagcaagcggguggacuucugcggcaagggguaccaccugauguccuucccccagagcgccccgcacggcguggucuuccuccacgugacguacguccccgcccaggagaagaacuucaccaccgcccccgcgaucugccacgacgggaaggcccacuucccccgcgagggcguguucguguccaacgggacccacugguucgucacgcagcggaacuucugcgagccgcagaucaucaccaccgacaacaccuucgugagcggcaacugcgacguggucaucggcaucgugaacaacacgguguacgacccccugcagcccgagcuggacuccuucaaggaggagcucgacaaguacuucaagaaccacaccagccccgacgucgaccugggggacaucuccggcaucaacgccagcguggugaacauccagaaggagaucgaccgccugaacgaggucgccaagaaccucaacgagucccugaucgaccugcaggagcucgggaaguacgagcaguacaucaagggcggcgggagcgggggcgggcagaucuacgagggcaagcugaccgccgaggggcuccgcuucggcaucguggccagccgguucaaccacgcgcuggucgaccgccugguggagggggccaucgacgccaucgugcggcacggcgggcgcgaggaggacaucacccucguccgggugcccggcuccugggagaucccgguggccgccggcgagcuggcccgcaaggaggacaucgacgcggucaucgccaucggggugcugauccggggcgccacgccccacuucgacuacaucgccagcgagguguccaaggggcucgcggaccugagccuggagcuccgcaagcccaucaccuucggcgucaucaccgccgacacccuggagcaggccaucgagcgggccgggacgaagcacggcaacaagggcugggaggccgcgcuguccgccaucgagauggccaaccucuucaagagccugcgcuga

SEQ ID NO: 11854 - RNA, 4116 nt, Artificial Sequence
  SARS-CoV-2/Wuhan/WIV05/2019__EPI_ISL_402128 spike protein CDS gc (1-1211)(P715C_P1069C) LumSynth construct
auguucguguuccugguccuccugccccuggugagcucccagugcgugaaccucaccacccgcacgcagcugccgcccgccuacaccaacagcuucacccggggcgucuacuaccccgacaagguguuccgcuccagcgugcugcacuccacccaggaccucuuccugcccuucuucagcaacgucacgugguuccacgccauccacguguccgggaccaacggcaccaagcgguucgacaacccggugcugcccuucaacgacggggucuacuucgcgagcaccgagaaguccaacaucauccgcggcuggaucuucgggacgacccucgacagcaagacccagucccugcugaucgugaacaacgccaccaacguggucaucaaggugugcgaguuccaguucugcaacgaccccuuccucggcguguacuaccacaagaacaacaagagcuggauggaguccgaguuccgggucuacagcuccgccaacaacugcacguucgaguacgugagccagcccuuccugauggaccuggagggcaagcaggggaacuucaagaaccuccgcgaguucguguucaagaacaucgacggcuacuucaagaucuacuccaagcacaccccgaucaaccugguccgggaccugccccagggguucagcgcccucgagccccugguggaccugcccaucggcaucaacaucacccgcuuccagacccuccuggcccugcaccgguccuaccucacgccgggggacagcagcuccggcuggaccgcgggcgccgccgccuacuacgugggguaccugcagccccgcaccuuccugcucaaguacaacgagaacggcaccaucacggacgcggucgacugcgcccuggacccccugagcgagaccaagugcacccucaaguccuucaccguggagaaggggaucuaccagacgagcaacuuccgggugcagcccaccgaguccaucguccgcuucccgaacaucaccaaccugugccccuucggcgagguguucaacgccacccgguucgccagcgucuacgccuggaaccgcaagcggaucuccaacugcguggcggacuacagcgugcuguacaacuccgccagcuucuccacguucaagugcuacggcgucagccccaccaagcucaacgaccugugcuucaccaacguguacgccgacuccuucgugauccgcggggacgagguccggcagaucgcccccggccagaccgggaagaucgccgacuacaacuacaagcugccggacgacuucacgggcugcgugaucgcguggaacagcaacaaccucgacuccaaggucgggggcaacuacaacuaccuguaccgccuguuccgcaagagcaaccucaagcccuucgagcgggacaucuccaccgagaucuaccaggccggcagcacccccugcaacgggguggagggcuucaacugcuacuucccccugcaguccuacggguuccagccgaccaacggcgugggguaccagcccuaccggguggucgugcugagcuucgagcuccugcacgcccccgccacggugugcggccccaagaaguccaccaaccuggucaagaacaagugcgugaacuucaacuucaacggccucaccgggaccggcgugcugaccgagagcaacaagaaguuccugccguuccagcaguucgggcgcgacaucgccgacacgaccgacgcgguccgcgacccccagacccuggagauccucgacaucacccccugcagcuucggcgggguguccgugaucacgccgggcaccaacaccagcaaccaggucgccgugcuguaccaggacgugaacugcaccgagguccccguggccauccacgccgaccagcugacgcccaccuggcggguguacuccaccggcagcaacgucuuccagacccgcgccgggugccucaucggcgcggagcacgugaacaacuccuacgagugcgacauccccaucggggccggcaucugcgccagcuaccagacgcagaccaacuccccgcggcgcgcccggagcguggcgucccagagcaucaucgccuacaccaugucccugggcgccgagaacagcgucgccuacuccaacaacagcaucgccaucugcaccaacuucacgaucuccgugaccaccgagauccugcccgugagcaugaccaagacgagcgucgacugcaccauguacaucugcggggacuccaccgagugcagcaaccuccugcugcaguacggcuccuucugcacccagcucaaccgcgcgcugacggggaucgccguggagcaggacaagaacacccaggagguguucgcccaggucaagcagaucuacaagacgcccccgaucaaggacuucggcggguucaacuucagccagauccugcccgaccccuccaagcccagcaagcgguccuucaucgaggaccuccuguucaacaaggugacccuggccgacgccggcuucaucaagcaguacggcgacugccucggggacaucgcggcccgcgaccugaucugcgcccagaaguucaacggccugaccgugcucccgccccugcugaccgacgagaugaucgcccaguacaccagcgcccuccuggcggggaccaucacguccggcuggaccuucggggccggcgccgcccugcagauccccuucgcgaugcagauggccuaccgguucaacggcaucggggucacccagaacgugcucuacgagaaccagaagcugaucgccaaccaguucaacagcgccaucggcaagauccaggacucccugagcuccaccgccagcgcgcucgggaagcugcaggacguggucaaccagaacgcccaggcccugaacacgcucgugaagcagcuguccagcaacuucggcgccaucuccagcgugcugaacgacauccucucccgccuggacaaggucgaggccgaggugcagaucgaccggcugaucaccgggcgccuccagagccugcagaccuacgugacccagcagcugauccgggcggccgagauccgcgccagcgccaaccucgccgcgaccaagauguccgagugcguccugggccagagcaagcggguggacuucugcggcaagggguaccaccugauguccuucccccagagcgccccgcacggcguggucuuccuccacgugacguacgucugcgcccaggagaagaacuucaccaccgcccccgcgaucugccacgacgggaaggcccacuucccccgcgagggcguguucguguccaacgggacccacugguucgucacgcagcggaacuucuacgagccgcagaucaucaccaccgacaacaccuucgugagcggcaacugcgacguggucaucggcaucgugaacaacacgguguacgacccccugcagcccgagcuggacuccuucaaggaggagcucgacaaguacuucaagaaccacaccagccccgacgucgaccugggggacaucuccggcaucaacgccagcguggugaacauccagaaggagaucgaccgccugaacgaggucgccaagaaccucaacgagucccugaucgaccugcaggagcucgggaaguacgagcaguacaucaagggcggcgggagcgggggcgggcagaucuacgagggcaagcugaccgccgaggggcuccgcuucggcaucguggccagccgguucaaccacgcgcuggucgaccgccugguggagggggccaucgacgccaucgugcggcacggcgggcgcgaggaggacaucacccucguccgggugcccggcuccugggagaucccgguggccgccggcgagcuggcccgcaaggaggacaucgacgcggucaucgccaucggggugcugauccggggcgccacgccccacuucgacuacaucgccagcgagguguccaaggggcucgcggaccugagccuggagcuccgcaagcccaucaccuucggcgucaucaccgccgacacccuggagcaggccaucgagcgggccgggacgaagcacggcaacaagggcugggaggccgcgcuguccgccaucgagauggccaaccucuucaagagccugcgcuga

SEQ ID NO: 11855 - RNA, 4116 nt, Artificial Sequence
  SARS-CoV-2/Wuhan/WIV05/2019__EPI_ISL_402128 spike protein CDS gc (1-1211)(G889C_L1034C) LumSynth construct
auguucguguuccugguccuccugccccuggugagcucccagugcgugaaccucaccacccgcacgcagcugccgcccgccuacaccaacagcuucacccggggcgucuacuaccccgacaagguguuccgcuccagcgugcugcacuccacccaggaccucuuccugcccuucuucagcaacgucacgugguuccacgccauccacguguccgggaccaacggcaccaagcgguucgacaacccggugcugcccuucaacgacggggucuacuucgcgagcaccgagaaguccaacaucauccgcggcuggaucuucgggacgacccucgacagcaagacccagucccugcugaucgugaacaacgccaccaacguggucaucaaggugugcgaguuccaguucugcaacgaccccuuccucggcguguacuaccacaagaacaacaagagcuggauggaguccgaguuccgggucuacagcuccgccaacaacugcacguucgaguacgugagccagcccuuccugauggaccuggagggcaagcaggggaacuucaagaaccuccgcgaguucguguucaagaacaucgacggcuacuucaagaucuacuccaagcacaccccgaucaaccugguccgggaccugccccagggguucagcgcccucgagccccugguggaccugcccaucggcaucaacaucacccgcuuccagacccuccuggcccugcaccgguccuaccucacgccgggggacagcagcuccggcuggaccgcgggcgccgccgccuacuacgugggguaccugcagccccgcaccuuccugcucaaguacaacgagaacggcaccaucacggacgcggucgacugcgcccuggacccccugagcgagaccaagugcacccucaaguccuucaccguggagaaggggaucuaccagacgagcaacuuccgggugcagcccaccgaguccaucguccgcuucccgaacaucaccaaccugugccccuucggcgagguguucaacgccacccgguucgccagcgucuacgccuggaaccgcaagcggaucuccaacugcguggcggacuacagcgugcuguacaacuccgccagcuucuccacguucaagugcuacggcgucagccccaccaagcucaacgaccugugcuucaccaacguguacgccgacuccuucgugauccgcggggacgagguccggcagaucgcccccggccagaccgggaagaucgccgacuacaacuacaagcugccggacgacuucacgggcugcgugaucgcguggaacagcaacaaccucgacuccaaggucgggggcaacuacaacuaccuguaccgccuguuccgcaagagcaaccucaagcccuucgagcgggacaucuccaccgagaucuaccaggccggcagcacccccugcaacgggguggagggcuucaacugcuacuucccccugcaguccuacggguuccagccgaccaacggcgugggguaccagcccuaccggguggucgugcugagcuucgagcuccugcacgcccccgccacggugugcggccccaagaaguccaccaaccuggucaagaacaagugcgugaacuucaacuucaacggccucaccgggaccggcgugcugaccgagagcaacaagaaguuccugccguuccagcaguucgggcgcgacaucgccgacacgaccgacgcgguccgcgacccccagacccuggagauccucgacaucacccccugcagcuucggcgggguguccgugaucacgccgggcaccaacaccagcaaccaggucgccgugcuguaccaggacgugaacugcaccgagguccccguggccauccacgccgaccagcugacgcccaccuggcggguguacuccaccggcagcaacgucuuccagacccgcgccgggugccucaucggcgcggagcacgugaacaacuccuacgagugcgacauccccaucggggccggcaucugcgccagcuaccagacgcagaccaacuccccgcggcgcgcccggagcguggcgucccagagcaucaucgccuacaccaugucccugggcgccgagaacagcgucgccuacuccaacaacagcaucgccauccccaccaacuucacgaucuccgugaccaccgagauccugcccgugagcaugaccaagacgagcgucgacugcaccauguacaucugcggggacuccaccgagugcagcaaccuccugcugcaguacggcuccuucugcacccagcucaaccgcgcgcugacggggaucgccguggagcaggacaagaacacccaggagguguucgcccaggucaagcagaucuacaagacgcccccgaucaaggacuucggcggguucaacuucagccagauccugcccgaccccuccaagcccagcaagcgguccuucaucgaggaccuccuguucaacaaggugacccuggccgacgccggcuucaucaagcaguacggcgacugccucggggacaucgcggcccgcgaccugaucugcgcccagaaguucaacggccugaccgugcucccgccccugcugaccgacgagaugaucgcccaguacaccagcgcccuccuggcggggaccaucacguccggcuggaccuucugcgccggcgccgcccugcagauccccuucgcgaugcagauggccuaccgguucaacggcaucggggucacccagaacgugcucuacgagaaccagaagcugaucgccaaccaguucaacagcgccaucggcaagauccaggacucccugagcuccaccgccagcgcgcucgggaagcugcaggacguggucaaccagaacgcccaggcccugaacacgcucgugaagcagcuguccagcaacuucggcgccaucuccagcgugcugaacgacauccucucccgccuggacaaggucgaggccgaggugcagaucgaccggcugaucaccgggcgccuccagagccugcagaccuacgugacccagcagcugauccgggcggccgagauccgcgccagcgccaaccucgccgcgaccaagauguccgagugcgucugcggccagagcaagcggguggacuucugcggcaagggguaccaccugauguccuucccccagagcgccccgcacggcguggucuuccuccacgugacguacguccccgcccaggagaagaacuucaccaccgcccccgcgaucugccacgacgggaaggcccacuucccccgcgagggcguguucguguccaacgggacccacugguucgucacgcagcggaacuucuacgagccgcagaucaucaccaccgacaacaccuucgugagcggcaacugcgacguggucaucggcaucgugaacaacacgguguacgacccccugcagcccgagcuggacuccuucaaggaggagcucgacaaguacuucaagaaccacaccagccccgacgucgaccugggggacaucuccggcaucaacgccagcguggugaacauccagaaggagaucgaccgccugaacgaggucgccaagaaccucaacgagucccugaucgaccugcaggagcucgggaaguacgagcaguacaucaagggcggcgggagcgggggcgggcagaucuacgagggcaagcugaccgccgaggggcuccgcuucggcaucguggccagccgguucaaccacgcgcuggucgaccgccugguggagggggccaucgacgccaucgugcggcacggcgggcgcgaggaggacaucacccucguccgggugcccggcuccugggagaucccgguggccgccggcgagcuggcccgcaaggaggacaucgacgcggucaucgccaucggggugcugauccggggcgccacgccccacuucgacuacaucgccagcgagguguccaaggggcucgcggaccugagccuggagcuccgcaagcccaucaccuucggcgucaucaccgccgacacccuggagcaggccaucgagcgggccgggacgaagcacggcaacaagggcugggaggccgcgcuguccgccaucgagauggccaaccucuucaagagccugcgcuga

SEQ ID NO: 11856 - RNA, 4116 nt, Artificial Sequence
  SARS-CoV-2/Wuhan/WIV05/2019__EPI_ISL_402128 spike protein CDS gc (1-1211)(I909C_Y1047C) LumSynth construct
auguucguguuccugguccuccugccccuggugagcucccagugcgugaaccucaccacccgcacgcagcugccgcccgccuacaccaacagcuucacccggggcgucuacuaccccgacaagguguuccgcuccagcgugcugcacuccacccaggaccucuuccugcccuucuucagcaacgucacgugguuccacgccauccacguguccgggaccaacggcaccaagcgguucgacaacccggugcugcccuucaacgacggggucuacuucgcgagcaccgagaaguccaacaucauccgcggcuggaucuucgggacgacccucgacagcaagacccagucccugcugaucgugaacaacgccaccaacguggucaucaaggugugcgaguuccaguucugcaacgaccccuuccucggcguguacuaccacaagaacaacaagagcuggauggaguccgaguuccgggucuacagcuccgccaacaacugcacguucgaguacgugagccagcccuuccugauggaccuggagggcaagcaggggaacuucaagaaccuccgcgaguucguguucaagaacaucgacggcuacuucaagaucuacuccaagcacaccccgaucaaccugguccgggaccugccccagggguucagcgcccucgagccccugguggaccugcccaucggcaucaacaucacccgcuuccagacccuccuggcccugcaccgguccuaccucacgccgggggacagcagcuccggcuggaccgcgggcgccgccgccuacuacgugggguaccugcagccccgcaccuuccugcucaaguacaacgagaacggcaccaucacggacgcggucgacugcgcccuggacccccugagcgagaccaagugcacccucaaguccuucaccguggagaaggggaucuaccagacgagcaacuuccgggugcagcccaccgaguccaucguccgcuucccgaacaucaccaaccugugccccuucggcgagguguucaacgccacccgguucgccagcgucuacgccuggaaccgcaagcggaucuccaacugcguggcggacuacagcgugcuguacaacuccgccagcuucuccacguucaagugcuacggcgucagccccaccaagcucaacgaccugugcuucaccaacguguacgccgacuccuucgugauccgcggggacgagguccggcagaucgcccccggccagaccgggaagaucgccgacuacaacuacaagcugccggacgacuucacgggcugcgugaucgcguggaacagcaacaaccucgacuccaaggucgggggcaacuacaacuaccuguaccgccuguuccgcaagagcaaccucaagcccuucgagcgggacaucuccaccgagaucuaccaggccggcagcacccccugcaacgggguggagggcuucaacugcuacuucccccugcaguccuacggguuccagccgaccaacggcgugggguaccagcccuaccggguggucgugcugagcuucgagcuccugcacgcccccgccacggugugcggccccaagaaguccaccaaccuggucaagaacaagugcgugaacuucaacuucaacggccucaccgggaccggcgugcugaccgagagcaacaagaaguuccugccguuccagcaguucgggcgcgacaucgccgacacgaccgacgcgguccgcgacccccagacccuggagauccucgacaucacccccugcagcuucggcgggguguccgugaucacgccgggcaccaacaccagcaaccaggucgccgugcuguaccaggacgugaacugcaccgagguccccguggccauccacgccgaccagcugacgcccaccuggcggguguacuccaccggcagcaacgucuuccagacccgcgccgggugccucaucggcgcggagcacgugaacaacuccuacgagugcgacauccccaucggggccggcaucugcgccagcuaccagacgcagaccaacuccccgcggcgcgcccggagcguggcgucccagagcaucaucgccuacaccaugucccugggcgccgagaacagcgucgccuacuccaacaacagcaucgccauccccaccaacuucacgaucuccgugaccaccgagauccugcccgugagcaugaccaagacgagcgucgacugcaccauguacaucugcggggacuccaccgagugcagcaaccuccugcugcaguacggcuccuucugcacccagcucaaccgcgcgcugacggggaucgccguggagcaggacaagaacacccaggagguguucgcccaggucaagcagaucuacaagacgcccccgaucaaggacuucggcggguucaacuucagccagauccugcccgaccccuccaagcccagcaagcgguccuucaucgaggaccuccuguucaacaaggugacccuggccgacgccggcuucaucaagcaguacggcgacugccucggggacaucgcggcccgcgaccugaucugcgcccagaaguucaacggccugaccgugcucccgccccugcugaccgacgagaugaucgcccaguacaccagcgcccuccuggcggggaccaucacguccggcuggaccuucggggccggcgccgcccugcagauccccuucgcgaugcagauggccuaccgguucaacggcugcggggucacccagaacgugcucuacgagaaccagaagcugaucgccaaccaguucaacagcgccaucggcaagauccaggacucccugagcuccaccgccagcgcgcucgggaagcugcaggacguggucaaccagaacgcccaggcccugaacacgcucgugaagcagcuguccagcaacuucggcgccaucuccagcgugcugaacgacauccucucccgccuggacaaggucgaggccgaggugcagaucgaccggcugaucaccgggcgccuccagagccugcagaccuacgugacccagcagcugauccgggcggccgagauccgcgccagcgccaaccucgccgcgaccaagauguccgagugcguccugggccagagcaagcggguggacuucugcggcaaggggugccaccugauguccuucccccagagcgccccgcacggcguggucuuccuccacgugacguacguccccgcccaggagaagaacuucaccaccgcccccgcgaucugccacgacgggaaggcccacuucccccgcgagggcguguucguguccaacgggacccacugguucgucacgcagcggaacuucuacgagccgcagaucaucaccaccgacaacaccuucgugagcggcaacugcgacguggucaucggcaucgugaacaacacgguguacgacccccugcagcccgagcuggacuccuucaaggaggagcucgacaaguacuucaagaaccacaccagccccgacgucgaccugggggacaucuccggcaucaacgccagcguggugaacauccagaaggagaucgaccgccugaacgaggucgccaagaaccucaacgagucccugaucgaccugcaggagcucgggaaguacgagcaguacaucaagggcggcgggagcgggggcgggcagaucuacgagggcaagcugaccgccgaggggcuccgcuucggcaucguggccagccgguucaaccacgcgcuggucgaccgccugguggagggggccaucgacgccaucgugcggcacggcgggcgcgaggaggacaucacccucguccgggugcccggcuccugggagaucccgguggccgccggcgagcuggcccgcaaggaggacaucgacgcggucaucgccaucggggugcugauccggggcgccacgccccacuucgacuacaucgccagcgagguguccaaggggcucgcggaccugagccuggagcuccgcaagcccaucaccuucggcgucaucaccgccgacacccuggagcaggccaucgagcgggccgggacgaagcacggcaacaagggcugggaggccgcgcuguccgccaucgagauggccaaccucuucaagagccugcgcuga

SEQ ID NO: 11857 - RNA, 4116 nt, Artificial Sequence
  SARS-CoV-2/Wuhan/WIV05/2019__EPI_ISL_402128 spike protein CDS gc (1-1211)(Q965C_S1003C) LumSynth construct
auguucguguuccugguccuccugccccuggugagcucccagugcgugaaccucaccacccgcacgcagcugccgcccgccuacaccaacagcuucacccggggcgucuacuaccccgacaagguguuccgcuccagcgugcugcacuccacccaggaccucuuccugcccuucuucagcaacgucacgugguuccacgccauccacguguccgggaccaacggcaccaagcgguucgacaacccggugcugcccuucaacgacggggucuacuucgcgagcaccgagaaguccaacaucauccgcggcuggaucuucgggacgacccucgacagcaagacccagucccugcugaucgugaacaacgccaccaacguggucaucaaggugugcgaguuccaguucugcaacgaccccuuccucggcguguacuaccacaagaacaacaagagcuggauggaguccgaguuccgggucuacagcuccgccaacaacugcacguucgaguacgugagccagcccuuccugauggaccuggagggcaagcaggggaacuucaagaaccuccgcgaguucguguucaagaacaucgacggcuacuucaagaucuacuccaagcacaccccgaucaaccugguccgggaccugccccagggguucagcgcccucgagccccugguggaccugcccaucggcaucaacaucacccgcuuccagacccuccuggcccugcaccgguccuaccucacgccgggggacagcagcuccggcuggaccgcgggcgccgccgccuacuacgugggguaccugcagccccgcaccuuccugcucaaguacaacgagaacggcaccaucacggacgcggucgacugcgcccuggacccccugagcgagaccaagugcacccucaaguccuucaccguggagaaggggaucuaccagacgagcaacuuccgggugcagcccaccgaguccaucguccgcuucccgaacaucaccaaccugugccccuucggcgagguguucaacgccacccgguucgccagcgucuacgccuggaaccgcaagcggaucuccaacugcguggcggacuacagcgugcuguacaacuccgccagcuucuccacguucaagugcuacggcgucagccccaccaagcucaacgaccugugcuucaccaacguguacgccgacuccuucgugauccgcggggacgagguccggcagaucgcccccggccagaccgggaagaucgccgacuacaacuacaagcugccggacgacuucacgggcugcgugaucgcguggaacagcaacaaccucgacuccaaggucgggggcaacuacaacuaccuguaccgccuguuccgcaagagcaaccucaagcccuucgagcgggacaucuccaccgagaucuaccaggccggcagcacccccugcaacgggguggagggcuucaacugcuacuucccccugcaguccuacggguuccagccgaccaacggcgugggguaccagcccuaccggguggucgugcugagcuucgagcuccugcacgcccccgccacggugugcggccccaagaaguccaccaaccuggucaagaacaagugcgugaacuucaacuucaacggccucaccgggaccggcgugcugaccgagagcaacaagaaguuccugccguuccagcaguucgggcgcgacaucgccgacacgaccgacgcgguccgcgacccccagacccuggagauccucgacaucacccccugcagcuucggcgggguguccgugaucacgccgggcaccaacaccagcaaccaggucgccgugcuguaccaggacgugaacugcaccgagguccccguggccauccacgccgaccagcugacgcccaccuggcggguguacuccaccggcagcaacgucuuccagacccgcgccgggugccucaucggcgcggagcacgugaacaacuccuacgagugcgacauccccaucggggccggcaucugcgccagcuaccagacgcagaccaacuccccgcggcgcgcccggagcguggcgucccagagcaucaucgccuacaccaugucccugggcgccgagaacagcgucgccuacuccaacaacagcaucgccauccccaccaacuucacgaucuccgugaccaccgagauccugcccgugagcaugaccaagacgagcgucgacugcaccauguacaucugcggggacuccaccgagugcagcaaccuccugcugcaguacggcuccuucugcacccagcucaaccgcgcgcugacggggaucgccguggagcaggacaagaacacccaggagguguucgcccaggucaagcagaucuacaagacgcccccgaucaaggacuucggcggguucaacuucagccagauccugcccgaccccuccaagcccagcaagcgguccuucaucgaggaccuccuguucaacaaggugacccuggccgacgccggcuucaucaagcaguacggcgacugccucggggacaucgcggcccgcgaccugaucugcgcccagaaguucaacggccugaccgugcucccgccccugcugaccgacgagaugaucgcccaguacaccagcgcccuccuggcggggaccaucacguccggcuggaccuucggggccggcgccgcccugcagauccccuucgcgaugcagauggccuaccgguucaacggcaucggggucacccagaacgugcucuacgagaaccagaagcugaucgccaaccaguucaacagcgccaucggcaagauccaggacucccugagcuccaccgccagcgcgcucgggaagcugcaggacguggucaaccagaacgcccaggcccugaacacgcucgugaagugccuguccagcaacuucggcgccaucuccagcgugcugaacgacauccucucccgccuggacaaggucgaggccgaggugcagaucgaccggcugaucaccgggcgccuccagugccugcagaccuacgugacccagcagcugauccgggcggccgagauccgcgccagcgccaaccucgccgcgaccaagauguccgagugcguccugggccagagcaagcggguggacuucugcggcaagggguaccaccugauguccuucccccagagcgccccgcacggcguggucuuccuccacgugacguacguccccgcccaggagaagaacuucaccaccgcccccgcgaucugccacgacgggaaggcccacuucccccgcgagggcguguucguguccaacgggacccacugguucgucacgcagcggaacuucuacgagccgcagaucaucaccaccgacaacaccuucgugagcggcaacugcgacguggucaucggcaucgugaacaacacgguguacgacccccugcagcccgagcuggacuccuucaaggaggagcucgacaaguacuucaagaaccacaccagccccgacgucgaccugggggacaucuccggcaucaacgccagcguggugaacauccagaaggagaucgaccgccugaacgaggucgccaagaaccucaacgagucccugaucgaccugcaggagcucgggaaguacgagcaguacaucaagggcggcgggagcgggggcgggcagaucuacgagggcaagcugaccgccgaggggcuccgcuucggcaucguggccagccgguucaaccacgcgcuggucgaccgccugguggagggggccaucgacgccaucgugcggcacggcgggcgcgaggaggacaucacccucguccgggugcccggcuccugggagaucccgguggccgccggcgagcuggcccgcaaggaggacaucgacgcggucaucgccaucggggugcugauccggggcgccacgccccacuucgacuacaucgccagcgagguguccaaggggcucgcggaccugagccuggagcuccgcaagcccaucaccuucggcgucaucaccgccgacacccuggagcaggccaucgagcgggccgggacgaagcacggcaacaagggcugggaggccgcgcuguccgccaucgagauggccaaccucuucaagagccugcgcuga

SEQ ID NO: 11858 - RNA, 4116 nt, Artificial Sequence
  SARS-CoV-2/Wuhan/WIV05/2019__EPI_ISL_402128 spike protein CDS gc (1-1211)(F970C_G999C) LumSynth construct
auguucguguuccugguccuccugccccuggugagcucccagugcgugaaccucaccacccgcacgcagcugccgcccgccuacaccaacagcuucacccggggcgucuacuaccccgacaagguguuccgcuccagcgugcugcacuccacccaggaccucuuccugcccuucuucagcaacgucacgugguuccacgccauccacguguccgggaccaacggcaccaagcgguucgacaacccggugcugcccuucaacgacggggucuacuucgcgagcaccgagaaguccaacaucauccgcggcuggaucuucgggacgacccucgacagcaagacccagucccugcugaucgugaacaacgccaccaacguggucaucaaggugugcgaguuccaguucugcaacgaccccuuccucggcguguacuaccacaagaacaacaagagcuggauggaguccgaguuccgggucuacagcuccgccaacaacugcacguucgaguacgugagccagcccuuccugauggaccuggagggcaagcaggggaacuucaagaaccuccgcgaguucguguucaagaacaucgacggcuacuucaagaucuacuccaagcacaccccgaucaaccugguccgggaccugccccagggguucagcgcccucgagccccugguggaccugcccaucggcaucaacaucacccgcuuccagacccuccuggcccugcaccgguccuaccucacgccgggggacagcagcuccggcuggaccgcgggcgccgccgccuacuacgugggguaccugcagccccgcaccuuccugcucaaguacaacgagaacggcaccaucacggacgcggucgacugcgcccuggacccccugagcgagaccaagugcacccucaaguccuucaccguggagaaggggaucuaccagacgagcaacuuccgggugcagcccaccgaguccaucguccgcuucccgaacaucaccaaccugugccccuucggcgagguguucaacgccacccgguucgccagcgucuacgccuggaaccgcaagcggaucuccaacugcguggcggacuacagcgugcuguacaacuccgccagcuucuccacguucaagugcuacggcgucagccccaccaagcucaacgaccugugcuucaccaacguguacgccgacuccuucgugauccgcggggacgagguccggcagaucgcccccggccagaccgggaagaucgccgacuacaacuacaagcugccggacgacuucacgggcugcgugaucgcguggaacagcaacaaccucgacuccaaggucgggggcaacuacaacuaccuguaccgccuguuccgcaagagcaaccucaagcccuucgagcgggacaucuccaccgagaucuaccaggccggcagcacccccugcaacgggguggagggcuucaacugcuacuucccccugcaguccuacggguuccagccgaccaacggcgugggguaccagcccuaccggguggucgugcugagcuucgagcuccugcacgcccccgccacggugugcggccccaagaaguccaccaaccuggucaagaacaagugcgugaacuucaacuucaacggccucaccgggaccggcgugcugaccgagagcaacaagaaguuccugccguuccagcaguucgggcgcgacaucgccgacacgaccgacgcgguccgcgacccccagacccuggagauccucgacaucacccccugcagcuucggcgggguguccgugaucacgccgggcaccaacaccagcaaccaggucgccgugcuguaccaggacgugaacugcaccgagguccccguggccauccacgccgaccagcugacgcccaccuggcggguguacuccaccggcagcaacgucuuccagacccgcgccgggugccucaucggcgcggagcacgugaacaacuccuacgagugcgacauccccaucggggccggcaucugcgccagcuaccagacgcagaccaacuccccgcggcgcgcccggagcguggcgucccagagcaucaucgccuacaccaugucccugggcgccgagaacagcgucgccuacuccaacaacagcaucgccauccccaccaacuucacgaucuccgugaccaccgagauccugcccgugagcaugaccaagacgagcgucgacugcaccauguacaucugcggggacuccaccgagugcagcaaccuccugcugcaguacggcuccuucugcacccagcucaaccgcgcgcugacggggaucgccguggagcaggacaagaacacccaggagguguucgcccaggucaagcagaucuacaagacgcccccgaucaaggacuucggcggguucaacuucagccagauccugcccgaccccuccaagcccagcaagcgguccuucaucgaggaccuccuguucaacaaggugacccuggccgacgccggcuucaucaagcaguacggcgacugccucggggacaucgcggcccgcgaccugaucugcgcccagaaguucaacggccugaccgugcucccgccccugcugaccgacgagaugaucgcccaguacaccagcgcccuccuggcggggaccaucacguccggcuggaccuucggggccggcgccgcccugcagauccccuucgcgaugcagauggccuaccgguucaacggcaucggggucacccagaacgugcucuacgagaaccagaagcugaucgccaaccaguucaacagcgccaucggcaagauccaggacucccugagcuccaccgccagcgcgcucgggaagcugcaggacguggucaaccagaacgcccaggcccugaacacgcucgugaagcagcuguccagcaacugcggcgccaucuccagcgugcugaacgacauccucucccgccuggacaaggucgaggccgaggugcagaucgaccggcugaucaccugucgccuccagagccugcagaccuacgugacccagcagcugauccgggcggccgagauccgcgccagcgccaaccucgccgcgaccaagauguccgagugcguccugggccagagcaagcggguggacuucugcggcaagggguaccaccugauguccuucccccagagcgccccgcacggcguggucuuccuccacgugacguacguccccgcccaggagaagaacuucaccaccgcccccgcgaucugccacgacgggaaggcccacuucccccgcgagggcguguucguguccaacgggacccacugguucgucacgcagcggaacuucuacgagccgcagaucaucaccaccgacaacaccuucgugagcggcaacugcgacguggucaucggcaucgugaacaacacgguguacgacccccugcagcccgagcuggacuccuucaaggaggagcucgacaaguacuucaagaaccacaccagccccgacgucgaccugggggacaucuccggcaucaacgccagcguggugaacauccagaaggagaucgaccgccugaacgaggucgccaagaaccucaacgagucccugaucgaccugcaggagcucgggaaguacgagcaguacaucaagggcggcgggagcgggggcgggcagaucuacgagggcaagcugaccgccgaggggcuccgcuucggcaucguggccagccgguucaaccacgcgcuggucgaccgccugguggagggggccaucgacgccaucgugcggcacggcgggcgcgaggaggacaucacccucguccgggugcccggcuccugggagaucccgguggccgccggcgagcuggcccgcaaggaggacaucgacgcggucaucgccaucggggugcugauccggggcgccacgccccacuucgacuacaucgccagcgagguguccaaggggcucgcggaccugagccuggagcuccgcaagcccaucaccuucggcgucaucaccgccgacacccuggagcaggccaucgagcgggccgggacgaagcacggcaacaagggcugggaggccgcgcuguccgccaucgagauggccaaccucuucaagagccugcgcuga

SEQ ID NO: 11859 - RNA, 4116 nt, Artificial Sequence
  SARS-CoV-2/Wuhan/WIV05/2019__EPI_ISL_402128 spike protein CDS gc (1-1211)(A972C_R995C) LumSynth construct
auguucguguuccugguccuccugccccuggugagcucccagugcgugaaccucaccacccgcacgcagcugccgcccgccuacaccaacagcuucacccggggcgucuacuaccccgacaagguguuccgcuccagcgugcugcacuccacccaggaccucuuccugcccuucuucagcaacgucacgugguuccacgccauccacguguccgggaccaacggcaccaagcgguucgacaacccggugcugcccuucaacgacggggucuacuucgcgagcaccgagaaguccaacaucauccgcggcuggaucuucgggacgacccucgacagcaagacccagucccugcugaucgugaacaacgccaccaacguggucaucaaggugugcgaguuccaguucugcaacgaccccuuccucggcguguacuaccacaagaacaacaagagcuggauggaguccgaguuccgggucuacagcuccgccaacaacugcacguucgaguacgugagccagcccuuccugauggaccuggagggcaagcaggggaacuucaagaaccuccgcgaguucguguucaagaacaucgacggcuacuucaagaucuacuccaagcacaccccgaucaaccugguccgggaccugccccagggguucagcgcccucgagccccugguggaccugcccaucggcaucaacaucacccgcuuccagacccuccuggcccugcaccgguccuaccucacgccgggggacagcagcuccggcuggaccgcgggcgccgccgccuacuacgugggguaccugcagccccgcaccuuccugcucaaguacaacgagaacggcaccaucacggacgcggucgacugcgcccuggacccccugagcgagaccaagugcacccucaaguccuucaccguggagaaggggaucuaccagacgagcaacuuccgggugcagcccaccgaguccaucguccgcuucccgaacaucaccaaccugugccccuucggcgagguguucaacgccacccgguucgccagcgucuacgccuggaaccgcaagcggaucuccaacugcguggcggacuacagcgugcuguacaacuccgccagcuucuccacguucaagugcuacggcgucagccccaccaagcucaacgaccugugcuucaccaacguguacgccgacuccuucgugauccgcggggacgagguccggcagaucgcccccggccagaccgggaagaucgccgacuacaacuacaagcugccggacgacuucacgggcugcgugaucgcguggaacagcaacaaccucgacuccaaggucgggggcaacuacaacuaccuguaccgccuguuccgcaagagcaaccucaagcccuucgagcgggacaucuccaccgagaucuaccaggccggcagcacccccugcaacgggguggagggcuucaacugcuacuucccccugcaguccuacggguuccagccgaccaacggcgugggguaccagcccuaccggguggucgugcugagcuucgagcuccugcacgcccccgccacggugugcggccccaagaaguccaccaaccuggucaagaacaagugcgugaacuucaacuucaacggccucaccgggaccggcgugcugaccgagagcaacaagaaguuccugccguuccagcaguucgggcgcgacaucgccgacacgaccgacgcgguccgcgacccccagacccuggagauccucgacaucacccccugcagcuucggcgggguguccgugaucacgccgggcaccaacaccagcaaccaggucgccgugcuguaccaggacgugaacugcaccgagguccccguggccauccacgccgaccagcugacgcccaccuggcggguguacuccaccggcagcaacgucuuccagacccgcgccgggugccucaucggcgcggagcacgugaacaacuccuacgagugcgacauccccaucggggccggcaucugcgccagcuaccagacgcagaccaacuccccgcggcgcgcccggagcguggcgucccagagcaucaucgccuacaccaugucccugggcgccgagaacagcgucgccuacuccaacaacagcaucgccauccccaccaacuucacgaucuccgugaccaccgagauccugcccgugagcaugaccaagacgagcgucgacugcaccauguacaucugcggggacuccaccgagugcagcaaccuccugcugcaguacggcuccuucugcacccagcucaaccgcgcgcugacggggaucgccguggagcaggacaagaacacccaggagguguucgcccaggucaagcagaucuacaagacgcccccgaucaaggacuucggcggguucaacuucagccagauccugcccgaccccuccaagcccagcaagcgguccuucaucgaggaccuccuguucaacaaggugacccuggccgacgccggcuucaucaagcaguacggcgacugccucggggacaucgcggcccgcgaccugaucugcgcccagaaguucaacggccugaccgugcucccgccccugcugaccgacgagaugaucgcccaguacaccagcgcccuccuggcggggaccaucacguccggcuggaccuucggggccggcgccgcccugcagauccccuucgcgaugcagauggccuaccgguucaacggcaucggggucacccagaacgugcucuacgagaaccagaagcugaucgccaaccaguucaacagcgccaucggcaagauccaggacucccugagcuccaccgccagcgcgcucgggaagcugcaggacguggucaaccagaacgcccaggcccugaacacgcucgugaagcagcuguccagcaacuucggcugcaucuccagcgugcugaacgacauccucucccgccuggacaaggucgaggccgaggugcagaucgacugccugaucaccgggcgccuccagagccugcagaccuacgugacccagcagcugauccgggcggccgagauccgcgccagcgccaaccucgccgcgaccaagauguccgagugcguccugggccagagcaagcggguggacuucugcggcaagggguaccaccugauguccuucccccagagcgccccgcacggcguggucuuccuccacgugacguacguccccgcccaggagaagaacuucaccaccgcccccgcgaucugccacgacgggaaggcccacuucccccgcgagggcguguucguguccaacgggacccacugguucgucacgcagcggaacuucuacgagccgcagaucaucaccaccgacaacaccuucgugagcggcaacugcgacguggucaucggcaucgugaacaacacgguguacgacccccugcagcccgagcuggacuccuucaaggaggagcucgacaaguacuucaagaaccacaccagccccgacgucgaccugggggacaucuccggcaucaacgccagcguggugaacauccagaaggagaucgaccgccugaacgaggucgccaagaaccucaacgagucccugaucgaccugcaggagcucgggaaguacgagcaguacaucaagggcggcgggagcgggggcgggcagaucuacgagggcaagcugaccgccgaggggcuccgcuucggcaucguggccagccgguucaaccacgcgcuggucgaccgccugguggagggggccaucgacgccaucgugcggcacggcgggcgcgaggaggacaucacccucguccgggugcccggcuccugggagaucccgguggccgccggcgagcuggcccgcaaggaggacaucgacgcggucaucgccaucggggugcugauccggggcgccacgccccacuucgacuacaucgccagcgagguguccaaggggcucgcggaccugagccuggagcuccgcaagcccaucaccuucggcgucaucaccgccgacacccuggagcaggccaucgagcgggccgggacgaagcacggcaacaagggcugggaggccgcgcuguccgccaucgagauggccaaccucuucaagagccugcgcuga

SEQ ID NO: 11860 - RNA, 4116 nt, Artificial Sequence
  SARS-CoV-2/Wuhan/WIV05/2019__EPI_ISL_402128 spike protein CDS gc (1-1211)(A890C_V1040C) LumSynth construct
auguucguguuccugguccuccugccccuggugagcucccagugcgugaaccucaccacccgcacgcagcugccgcccgccuacaccaacagcuucacccggggcgucuacuaccccgacaagguguuccgcuccagcgugcugcacuccacccaggaccucuuccugcccuucuucagcaacgucacgugguuccacgccauccacguguccgggaccaacggcaccaagcgguucgacaacccggugcugcccuucaacgacggggucuacuucgcgagcaccgagaaguccaacaucauccgcggcuggaucuucgggacgacccucgacagcaagacccagucccugcugaucgugaacaacgccaccaacguggucaucaaggugugcgaguuccaguucugcaacgaccccuuccucggcguguacuaccacaagaacaacaagagcuggauggaguccgaguuccgggucuacagcuccgccaacaacugcacguucgaguacgugagccagcccuuccugauggaccuggagggcaagcaggggaacuucaagaaccuccgcgaguucguguucaagaacaucgacggcuacuucaagaucuacuccaagcacaccccgaucaaccugguccgggaccugccccagggguucagcgcccucgagccccugguggaccugcccaucggcaucaacaucacccgcuuccagacccuccuggcccugcaccgguccuaccucacgccgggggacagcagcuccggcuggaccgcgggcgccgccgccuacuacgugggguaccugcagccccgcaccuuccugcucaaguacaacgagaacggcaccaucacggacgcggucgacugcgcccuggacccccugagcgagaccaagugcacccucaaguccuucaccguggagaaggggaucuaccagacgagcaacuuccgggugcagcccaccgaguccaucguccgcuucccgaacaucaccaaccugugccccuucggcgagguguucaacgccacccgguucgccagcgucuacgccuggaaccgcaagcggaucuccaacugcguggcggacuacagcgugcuguacaacuccgccagcuucuccacguucaagugcuacggcgucagccccaccaagcucaacgaccugugcuucaccaacguguacgccgacuccuucgugauccgcggggacgagguccggcagaucgcccccggccagaccgggaagaucgccgacuacaacuacaagcugccggacgacuucacgggcugcgugaucgcguggaacagcaacaaccucgacuccaaggucgggggcaacuacaacuaccuguaccgccuguuccgcaagagcaaccucaagcccuucgagcgggacaucuccaccgagaucuaccaggccggcagcacccccugcaacgggguggagggcuucaacugcuacuucccccugcaguccuacggguuccagccgaccaacggcgugggguaccagcccuaccggguggucgugcugagcuucgagcuccugcacgcccccgccacggugugcggccccaagaaguccaccaaccuggucaagaacaagugcgugaacuucaacuucaacggccucaccgggaccggcgugcugaccgagagcaacaagaaguuccugccguuccagcaguucgggcgcgacaucgccgacacgaccgacgcgguccgcgacccccagacccuggagauccucgacaucacccccugcagcuucggcgggguguccgugaucacgccgggcaccaacaccagcaaccaggucgccgugcuguaccaggacgugaacugcaccgagguccccguggccauccacgccgaccagcugacgcccaccuggcggguguacuccaccggcagcaacgucuuccagacccgcgccgggugccucaucggcgcggagcacgugaacaacuccuacgagugcgacauccccaucggggccggcaucugcgccagcuaccagacgcagaccaacuccccgcggcgcgcccggagcguggcgucccagagcaucaucgccuacaccaugucccugggcgccgagaacagcgucgccuacuccaacaacagcaucgccauccccaccaacuucacgaucuccgugaccaccgagauccugcccgugagcaugaccaagacgagcgucgacugcaccauguacaucugcggggacuccaccgagugcagcaaccuccugcugcaguacggcuccuucugcacccagcucaaccgcgcgcugacggggaucgccguggagcaggacaagaacacccaggagguguucgcccaggucaagcagaucuacaagacgcccccgaucaaggacuucggcggguucaacuucagccagauccugcccgaccccuccaagcccagcaagcgguccuucaucgaggaccuccuguucaacaaggugacccuggccgacgccggcuucaucaagcaguacggcgacugccucggggacaucgcggcccgcgaccugaucugcgcccagaaguucaacggccugaccgugcucccgccccugcugaccgacgagaugaucgcccaguacaccagcgcccuccuggcggggaccaucacguccggcuggaccuucgggugcggcgccgcccugcagauccccuucgcgaugcagauggccuaccgguucaacggcaucggggucacccagaacgugcucuacgagaaccagaagcugaucgccaaccaguucaacagcgccaucggcaagauccaggacucccugagcuccaccgccagcgcgcucgggaagcugcaggacguggucaaccagaacgcccaggcccugaacacgcucgugaagcagcuguccagcaacuucggcgccaucuccagcgugcugaacgacauccucucccgccuggacaaggucgaggccgaggugcagaucgaccggcugaucaccgggcgccuccagagccugcagaccuacgugacccagcagcugauccgggcggccgagauccgcgccagcgccaaccucgccgcgaccaagauguccgagugcguccugggccagagcaagcggugcgacuucugcggcaagggguaccaccugauguccuucccccagagcgccccgcacggcguggucuuccuccacgugacguacguccccgcccaggagaagaacuucaccaccgcccccgcgaucugccacgacgggaaggcccacuucccccgcgagggcguguucguguccaacgggacccacugguucgucacgcagcggaacuucuacgagccgcagaucaucaccaccgacaacaccuucgugagcggcaacugcgacguggucaucggcaucgugaacaacacgguguacgacccccugcagcccgagcuggacuccuucaaggaggagcucgacaaguacuucaagaaccacaccagccccgacgucgaccugggggacaucuccggcaucaacgccagcguggugaacauccagaaggagaucgaccgccugaacgaggucgccaagaaccucaacgagucccugaucgaccugcaggagcucgggaaguacgagcaguacaucaagggcggcgggagcgggggcgggcagaucuacgagggcaagcugaccgccgaggggcuccgcuucggcaucguggccagccgguucaaccacgcgcuggucgaccgccugguggagggggccaucgacgccaucgugcggcacggcgggcgcgaggaggacaucacccucguccgggugcccggcuccugggagaucccgguggccgccggcgagcuggcccgcaaggaggacaucgacgcggucaucgccaucggggugcugauccggggcgccacgccccacuucgacuacaucgccagcgagguguccaaggggcucgcggaccugagccuggagcuccgcaagcccaucaccuucggcgucaucaccgccgacacccuggagcaggccaucgagcgggccgggacgaagcacggcaacaagggcugggaggccgcgcuguccgccaucgagauggccaaccucuucaagagccugcgcuga

SEQ ID NO: 11861 - RNA, 4116 nt, Artificial Sequence
  SARS-CoV-2/Wuhan/WIV05/2019__EPI_ISL_402128 spike protein CDS gc (1-1211)(T874C_S1055C) LumSynth construct
auguucguguuccugguccuccugccccuggugagcucccagugcgugaaccucaccacccgcacgcagcugccgcccgccuacaccaacagcuucacccggggcgucuacuaccccgacaagguguuccgcuccagcgugcugcacuccacccaggaccucuuccugcccuucuucagcaacgucacgugguuccacgccauccacguguccgggaccaacggcaccaagcgguucgacaacccggugcugcccuucaacgacggggucuacuucgcgagcaccgagaaguccaacaucauccgcggcuggaucuucgggacgacccucgacagcaagacccagucccugcugaucgugaacaacgccaccaacguggucaucaaggugugcgaguuccaguucugcaacgaccccuuccucggcguguacuaccacaagaacaacaagagcuggauggaguccgaguuccgggucuacagcuccgccaacaacugcacguucgaguacgugagccagcccuuccugauggaccuggagggcaagcaggggaacuucaagaaccuccgcgaguucguguucaagaacaucgacggcuacuucaagaucuacuccaagcacaccccgaucaaccugguccgggaccugccccagggguucagcgcccucgagccccugguggaccugcccaucggcaucaacaucacccgcuuccagacccuccuggcccugcaccgguccuaccucacgccgggggacagcagcuccggcuggaccgcgggcgccgccgccuacuacgugggguaccugcagccccgcaccuuccugcucaaguacaacgagaacggcaccaucacggacgcggucgacugcgcccuggacccccugagcgagaccaagugcacccucaaguccuucaccguggagaaggggaucuaccagacgagcaacuuccgggugcagcccaccgaguccaucguccgcuucccgaacaucaccaaccugugccccuucggcgagguguucaacgccacccgguucgccagcgucuacgccuggaaccgcaagcggaucuccaacugcguggcggacuacagcgugcuguacaacuccgccagcuucuccacguucaagugcuacggcgucagccccaccaagcucaacgaccugugcuucaccaacguguacgccgacuccuucgugauccgcggggacgagguccggcagaucgcccccggccagaccgggaagaucgccgacuacaacuacaagcugccggacgacuucacgggcugcgugaucgcguggaacagcaacaaccucgacuccaaggucgggggcaacuacaacuaccuguaccgccuguuccgcaagagcaaccucaagcccuucgagcgggacaucuccaccgagaucuaccaggccggcagcacccccugcaacgggguggagggcuucaacugcuacuucccccugcaguccuacggguuccagccgaccaacggcgugggguaccagcccuaccggguggucgugcugagcuucgagcuccugcacgcccccgccacggugugcggccccaagaaguccaccaaccuggucaagaacaagugcgugaacuucaacuucaacggccucaccgggaccggcgugcugaccgagagcaacaagaaguuccugccguuccagcaguucgggcgcgacaucgccgacacgaccgacgcgguccgcgacccccagacccuggagauccucgacaucacccccugcagcuucggcgggguguccgugaucacgccgggcaccaacaccagcaaccaggucgccgugcuguaccaggacgugaacugcaccgagguccccguggccauccacgccgaccagcugacgcccaccuggcggguguacuccaccggcagcaacgucuuccagacccgcgccgggugccucaucggcgcggagcacgugaacaacuccuacgagugcgacauccccaucggggccggcaucugcgccagcuaccagacgcagaccaacuccccgcggcgcgcccggagcguggcgucccagagcaucaucgccuacaccaugucccugggcgccgagaacagcgucgccuacuccaacaacagcaucgccauccccaccaacuucacgaucuccgugaccaccgagauccugcccgugagcaugaccaagacgagcgucgacugcaccauguacaucugcggggacuccaccgagugcagcaaccuccugcugcaguacggcuccuucugcacccagcucaaccgcgcgcugacggggaucgccguggagcaggacaagaacacccaggagguguucgcccaggucaagcagaucuacaagacgcccccgaucaaggacuucggcggguucaacuucagccagauccugcccgaccccuccaagcccagcaagcgguccuucaucgaggaccuccuguucaacaaggugacccuggccgacgccggcuucaucaagcaguacggcgacugccucggggacaucgcggcccgcgaccugaucugcgcccagaaguucaacggccugaccgugcucccgccccugcugaccgacgagaugaucgcccaguacugcagcgcccuccuggcggggaccaucacguccggcuggaccuucggggccggcgccgcccugcagauccccuucgcgaugcagauggccuaccgguucaacggcaucggggucacccagaacgugcucuacgagaaccagaagcugaucgccaaccaguucaacagcgccaucggcaagauccaggacucccugagcuccaccgccagcgcgcucgggaagcugcaggacguggucaaccagaacgcccaggcccugaacacgcucgugaagcagcuguccagcaacuucggcgccaucuccagcgugcugaacgacauccucucccgccuggacaaggucgaggccgaggugcagaucgaccggcugaucaccgggcgccuccagagccugcagaccuacgugacccagcagcugauccgggcggccgagauccgcgccagcgccaaccucgccgcgaccaagauguccgagugcguccugggccagagcaagcggguggacuucugcggcaagggguaccaccugauguccuucccccagugcgccccgcacggcguggucuuccuccacgugacguacguccccgcccaggagaagaacuucaccaccgcccccgcgaucugccacgacgggaaggcccacuucccccgcgagggcguguucguguccaacgggacccacugguucgucacgcagcggaacuucuacgagccgcagaucaucaccaccgacaacaccuucgugagcggcaacugcgacguggucaucggcaucgugaacaacacgguguacgacccccugcagcccgagcuggacuccuucaaggaggagcucgacaaguacuucaagaaccacaccagccccgacgucgaccugggggacaucuccggcaucaacgccagcguggugaacauccagaaggagaucgaccgccugaacgaggucgccaagaaccucaacgagucccugaucgaccugcaggagcucgggaaguacgagcaguacaucaagggcggcgggagcgggggcgggcagaucuacgagggcaagcugaccgccgaggggcuccgcuucggcaucguggccagccgguucaaccacgcgcuggucgaccgccugguggagggggccaucgacgccaucgugcggcacggcgggcgcgaggaggacaucacccucguccgggugcccggcuccugggagaucccgguggccgccggcgagcuggcccgcaaggaggacaucgacgcggucaucgccaucggggugcugauccggggcgccacgccccacuucgacuacaucgccagcgagguguccaaggggcucgcggaccugagccuggagcuccgcaagcccaucaccuucggcgucaucaccgccgacacccuggagcaggccaucgagcgggccgggacgaagcacggcaacaagggcugggaggccgcgcuguccgccaucgagauggccaaccucuucaagagccugcgcuga

SEQ ID NO: 11862 - RNA, 4140 nt, Artificial Sequence
  SARS-CoV-2/Wuhan/WIV05/2019__EPI_ISL_402128 spike protein CDS gc (1-1211) Ferritin construct
auguucguguuccugguccuccugccccuggugagcucccagugcgugaaccucaccacccgcacgcagcugccgcccgccuacaccaacagcuucacccggggcgucuacuaccccgacaagguguuccgcuccagcgugcugcacuccacccaggaccucuuccugcccuucuucagcaacgucacgugguuccacgccauccacguguccgggaccaacggcaccaagcgguucgacaacccggugcugcccuucaacgacggggucuacuucgcgagcaccgagaaguccaacaucauccgcggcuggaucuucgggacgacccucgacagcaagacccagucccugcugaucgugaacaacgccaccaacguggucaucaaggugugcgaguuccaguucugcaacgaccccuuccucggcguguacuaccacaagaacaacaagagcuggauggaguccgaguuccgggucuacagcuccgccaacaacugcacguucgaguacgugagccagcccuuccugauggaccuggagggcaagcaggggaacuucaagaaccuccgcgaguucguguucaagaacaucgacggcuacuucaagaucuacuccaagcacaccccgaucaaccugguccgggaccugccccagggguucagcgcccucgagccccugguggaccugcccaucggcaucaacaucacccgcuuccagacccuccuggcccugcaccgguccuaccucacgccgggggacagcagcuccggcuggaccgcgggcgccgccgccuacuacgugggguaccugcagccccgcaccuuccugcucaaguacaacgagaacggcaccaucacggacgcggucgacugcgcccuggacccccugagcgagaccaagugcacccucaaguccuucaccguggagaaggggaucuaccagacgagcaacuuccgggugcagcccaccgaguccaucguccgcuucccgaacaucaccaaccugugccccuucggcgagguguucaacgccacccgguucgccagcgucuacgccuggaaccgcaagcggaucuccaacugcguggcggacuacagcgugcuguacaacuccgccagcuucuccacguucaagugcuacggcgucagccccaccaagcucaacgaccugugcuucaccaacguguacgccgacuccuucgugauccgcggggacgagguccggcagaucgcccccggccagaccgggaagaucgccgacuacaacuacaagcugccggacgacuucacgggcugcgugaucgcguggaacagcaacaaccucgacuccaaggucgggggcaacuacaacuaccuguaccgccuguuccgcaagagcaaccucaagcccuucgagcgggacaucuccaccgagaucuaccaggccggcagcacccccugcaacgggguggagggcuucaacugcuacuucccccugcaguccuacggguuccagccgaccaacggcgugggguaccagcccuaccggguggucgugcugagcuucgagcuccugcacgcccccgccacggugugcggccccaagaaguccaccaaccuggucaagaacaagugcgugaacuucaacuucaacggccucaccgggaccggcgugcugaccgagagcaacaagaaguuccugccguuccagcaguucgggcgcgacaucgccgacacgaccgacgcgguccgcgacccccagacccuggagauccucgacaucacccccugcagcuucggcgggguguccgugaucacgccgggcaccaacaccagcaaccaggucgccgugcuguaccaggacgugaacugcaccgagguccccguggccauccacgccgaccagcugacgcccaccuggcggguguacuccaccggcagcaacgucuuccagacccgcgccgggugccucaucggcgcggagcacgugaacaacuccuacgagugcgacauccccaucggggccggcaucugcgccagcuaccagacgcagaccaacuccccgcggcgcgcccggagcguggcgucccagagcaucaucgccuacaccaugucccugggcgccgagaacagcgucgccuacuccaacaacagcaucgccauccccaccaacuucacgaucuccgugaccaccgagauccugcccgugagcaugaccaagacgagcgucgacugcaccauguacaucugcggggacuccaccgagugcagcaaccuccugcugcaguacggcuccuucugcacccagcucaaccgcgcgcugacggggaucgccguggagcaggacaagaacacccaggagguguucgcccaggucaagcagaucuacaagacgcccccgaucaaggacuucggcggguucaacuucagccagauccugcccgaccccuccaagcccagcaagcgguccuucaucgaggaccuccuguucaacaaggugacccuggccgacgccggcuucaucaagcaguacggcgacugccucggggacaucgcggcccgcgaccugaucugcgcccagaaguucaacggccugaccgugcucccgccccugcugaccgacgagaugaucgcccaguacaccagcgcccuccuggcggggaccaucacguccggcuggaccuucggggccggcgccgcccugcagauccccuucgcgaugcagauggccuaccgguucaacggcaucggggucacccagaacgugcucuacgagaaccagaagcugaucgccaaccaguucaacagcgccaucggcaagauccaggacucccugagcuccaccgccagcgcgcucgggaagcugcaggacguggucaaccagaacgcccaggcccugaacacgcucgugaagcagcuguccagcaacuucggcgccaucuccagcgugcugaacgacauccucucccgccuggacaaggucgaggccgaggugcagaucgaccggcugaucaccgggcgccuccagagccugcagaccuacgugacccagcagcugauccgggcggccgagauccgcgccagcgccaaccucgccgcgaccaagauguccgagugcguccugggccagagcaagcggguggacuucugcggcaagggguaccaccugauguccuucccccagagcgccccgcacggcguggucuuccuccacgugacguacguccccgcccaggagaagaacuucaccaccgcccccgcgaucugccacgacgggaaggcccacuucccccgcgagggcguguucguguccaacgggacccacugguucgucacgcagcggaacuucuacgagccgcagaucaucaccaccgacaacaccuucgugagcggcaacugcgacguggucaucggcaucgugaacaacacgguguacgacccccugcagcccgagcuggacuccuucaaggaggagcucgacaaguacuucaagaaccacaccagccccgacgucgaccugggggacaucuccggcaucaacgccagcguggugaacauccagaaggagaucgaccgccugaacgaggucgccaagaaccucaacgagucccugaucgaccugcaggagcucgggaaguacgagcaguacaucaagggcgggggcgggagcgacaucaucaagcuccugaacgagcaggucaacaaggagaugcaguccagcaaccuguacauguccaugagcuccuggugcuacacccacagccucgacggcgccgggcuguuccuguucgaccacgccgcggaggaguacgagcacgccaagaagcucaucaucuuccugaacgagaacaacgugcccgugcagcugaccuccaucagcgccccggagcacaaguucgagggccucacgcagaucuuccagaaggccuacgagcacgagcagcacaucuccgagagcaucaacaacaucguggaccacgccaucaaguccaaggaccacgcgaccuucaacuuccugcagugguacgucgccgagcagcacgaggaggaggugcuguucaaggacauccucgacaagaucgagcugaucgggaacgagaaccacggccuguaccucgccgaccaguacgugaaggggaucgccaagagccgcaaguccuga

SEQ ID NO: 11863 - RNA, 4140 nt, Artificial Sequence
  SARS-CoV-2/Wuhan/WIV05/2019__EPI_ISL_402128 spike protein CDS gc (1-1211)(K986P_V987P) Ferritin construct
auguucguguuccugguccuccugccccuggugagcucccagugcgugaaccucaccacccgcacgcagcugccgcccgccuacaccaacagcuucacccggggcgucuacuaccccgacaagguguuccgcuccagcgugcugcacuccacccaggaccucuuccugcccuucuucagcaacgucacgugguuccacgccauccacguguccgggaccaacggcaccaagcgguucgacaacccggugcugcccuucaacgacggggucuacuucgcgagcaccgagaaguccaacaucauccgcggcuggaucuucgggacgacccucgacagcaagacccagucccugcugaucgugaacaacgccaccaacguggucaucaaggugugcgaguuccaguucugcaacgaccccuuccucggcguguacuaccacaagaacaacaagagcuggauggaguccgaguuccgggucuacagcuccgccaacaacugcacguucgaguacgugagccagcccuuccugauggaccuggagggcaagcaggggaacuucaagaaccuccgcgaguucguguucaagaacaucgacggcuacuucaagaucuacuccaagcacaccccgaucaaccugguccgggaccugccccagggguucagcgcccucgagccccugguggaccugcccaucggcaucaacaucacccgcuuccagacccuccuggcccugcaccgguccuaccucacgccgggggacagcagcuccggcuggaccgcgggcgccgccgccuacuacgugggguaccugcagccccgcaccuuccugcucaaguacaacgagaacggcaccaucacggacgcggucgacugcgcccuggacccccugagcgagaccaagugcacccucaaguccuucaccguggagaaggggaucuaccagacgagcaacuuccgggugcagcccaccgaguccaucguccgcuucccgaacaucaccaaccugugccccuucggcgagguguucaacgccacccgguucgccagcgucuacgccuggaaccgcaagcggaucuccaacugcguggcggacuacagcgugcuguacaacuccgccagcuucuccacguucaagugcuacggcgucagccccaccaagcucaacgaccugugcuucaccaacguguacgccgacuccuucgugauccgcggggacgagguccggcagaucgcccccggccagaccgggaagaucgccgacuacaacuacaagcugccggacgacuucacgggcugcgugaucgcguggaacagcaacaaccucgacuccaaggucgggggcaacuacaacuaccuguaccgccuguuccgcaagagcaaccucaagcccuucgagcgggacaucuccaccgagaucuaccaggccggcagcacccccugcaacgggguggagggcuucaacugcuacuucccccugcaguccuacggguuccagccgaccaacggcgugggguaccagcccuaccggguggucgugcugagcuucgagcuccugcacgcccccgccacggugugcggccccaagaaguccaccaaccuggucaagaacaagugcgugaacuucaacuucaacggccucaccgggaccggcgugcugaccgagagcaacaagaaguuccugccguuccagcaguucgggcgcgacaucgccgacacgaccgacgcgguccgcgacccccagacccuggagauccucgacaucacccccugcagcuucggcgggguguccgugaucacgccgggcaccaacaccagcaaccaggucgccgugcuguaccaggacgugaacugcaccgagguccccguggccauccacgccgaccagcugacgcccaccuggcggguguacuccaccggcagcaacgucuuccagacccgcgccgggugccucaucggcgcggagcacgugaacaacuccuacgagugcgacauccccaucggggccggcaucugcgccagcuaccagacgcagaccaacuccccgcggcgcgcccggagcguggcgucccagagcaucaucgccuacaccaugucccugggcgccgagaacagcgucgccuacuccaacaacagcaucgccauccccaccaacuucacgaucuccgugaccaccgagauccugcccgugagcaugaccaagacgagcgucgacugcaccauguacaucugcggggacuccaccgagugcagcaaccuccugcugcaguacggcuccuucugcacccagcucaaccgcgcgcugacggggaucgccguggagcaggacaagaacacccaggagguguucgcccaggucaagcagaucuacaagacgcccccgaucaaggacuucggcggguucaacuucagccagauccugcccgaccccuccaagcccagcaagcgguccuucaucgaggaccuccuguucaacaaggugacccuggccgacgccggcuucaucaagcaguacggcgacugccucggggacaucgcggcccgcgaccugaucugcgcccagaaguucaacggccugaccgugcucccgccccugcugaccgacgagaugaucgcccaguacaccagcgcccuccuggcggggaccaucacguccggcuggaccuucggggccggcgccgcccugcagauccccuucgcgaugcagauggccuaccgguucaacggcaucggggucacccagaacgugcucuacgagaaccagaagcugaucgccaaccaguucaacagcgccaucggcaagauccaggacucccugagcuccaccgccagcgcgcucgggaagcugcaggacguggucaaccagaacgcccaggcccugaacacgcucgugaagcagcuguccagcaacuucggcgccaucuccagcgugcugaacgacauccucucccgccuggacccgcccgaggccgaggugcagaucgaccggcugaucaccgggcgccuccagagccugcagaccuacgugacccagcagcugauccgggcggccgagauccgcgccagcgccaaccucgccgcgaccaagauguccgagugcguccugggccagagcaagcggguggacuucugcggcaagggguaccaccugauguccuucccccagagcgccccgcacggcguggucuuccuccacgugacguacguccccgcccaggagaagaacuucaccaccgcccccgcgaucugccacgacgggaaggcccacuucccccgcgagggcguguucguguccaacgggacccacugguucgucacgcagcggaacuucuacgagccgcagaucaucaccaccgacaacaccuucgugagcggcaacugcgacguggucaucggcaucgugaacaacacgguguacgacccccugcagcccgagcuggacuccuucaaggaggagcucgacaaguacuucaagaaccacaccagccccgacgucgaccugggggacaucuccggcaucaacgccagcguggugaacauccagaaggagaucgaccgccugaacgaggucgccaagaaccucaacgagucccugaucgaccugcaggagcucgggaaguacgagcaguacaucaagggcgggggcgggagcgacaucaucaagcuccugaacgagcaggucaacaaggagaugcaguccagcaaccuguacauguccaugagcuccuggugcuacacccacagccucgacggcgccgggcuguuccuguucgaccacgccgcggaggaguacgagcacgccaagaagcucaucaucuuccugaacgagaacaacgugcccgugcagcugaccuccaucagcgccccggagcacaaguucgagggccucacgcagaucuuccagaaggccuacgagcacgagcagcacaucuccgagagcaucaacaacaucguggaccacgccaucaaguccaaggaccacgcgaccuucaacuuccugcagugguacgucgccgagcagcacgaggaggaggugcuguucaaggacauccucgacaagaucgagcugaucgggaacgagaaccacggccuguaccucgccgaccaguacgugaaggggaucgccaagagccgcaaguccuga

SEQ ID NO: 11864 - RNA, 4140 nt, Artificial Sequence
  SARS-CoV-2/Wuhan/WIV05/2019__EPI_ISL_402128 spike protein CDS gc (1-1211)(K986P_V987P_T887WN_A1020W) Ferritin construct
auguucguguuccugguccuccugccccuggugagcucccagugcgugaaccucaccacccgcacgcagcugccgcccgccuacaccaacagcuucacccggggcgucuacuaccccgacaagguguuccgcuccagcgugcugcacuccacccaggaccucuuccugcccuucuucagcaacgucacgugguuccacgccauccacguguccgggaccaacggcaccaagcgguucgacaacccggugcugcccuucaacgacggggucuacuucgcgagcaccgagaaguccaacaucauccgcggcuggaucuucgggacgacccucgacagcaagacccagucccugcugaucgugaacaacgccaccaacguggucaucaaggugugcgaguuccaguucugcaacgaccccuuccucggcguguacuaccacaagaacaacaagagcuggauggaguccgaguuccgggucuacagcuccgccaacaacugcacguucgaguacgugagccagcccuuccugauggaccuggagggcaagcaggggaacuucaagaaccuccgcgaguucguguucaagaacaucgacggcuacuucaagaucuacuccaagcacaccccgaucaaccugguccgggaccugccccagggguucagcgcccucgagccccugguggaccugcccaucggcaucaacaucacccgcuuccagacccuccuggcccugcaccgguccuaccucacgccgggggacagcagcuccggcuggaccgcgggcgccgccgccuacuacgugggguaccugcagccccgcaccuuccugcucaaguacaacgagaacggcaccaucacggacgcggucgacugcgcccuggacccccugagcgagaccaagugcacccucaaguccuucaccguggagaaggggaucuaccagacgagcaacuuccgggugcagcccaccgaguccaucguccgcuucccgaacaucaccaaccugugccccuucggcgagguguucaacgccacccgguucgccagcgucuacgccuggaaccgcaagcggaucuccaacugcguggcggacuacagcgugcuguacaacuccgccagcuucuccacguucaagugcuacggcgucagccccaccaagcucaacgaccugugcuucaccaacguguacgccgacuccuucgugauccgcggggacgagguccggcagaucgcccccggccagaccgggaagaucgccgacuacaacuacaagcugccggacgacuucacgggcugcgugaucgcguggaacagcaacaaccucgacuccaaggucgggggcaacuacaacuaccuguaccgccuguuccgcaagagcaaccucaagcccuucgagcgggacaucuccaccgagaucuaccaggccggcagcacccccugcaacgggguggagggcuucaacugcuacuucccccugcaguccuacggguuccagccgaccaacggcgugggguaccagcccuaccggguggucgugcugagcuucgagcuccugcacgcccccgccacggugugcggccccaagaaguccaccaaccuggucaagaacaagugcgugaacuucaacuucaacggccucaccgggaccggcgugcugaccgagagcaacaagaaguuccugccguuccagcaguucgggcgcgacaucgccgacacgaccgacgcgguccgcgacccccagacccuggagauccucgacaucacccccugcagcuucggcgggguguccgugaucacgccgggcaccaacaccagcaaccaggucgccgugcuguaccaggacgugaacugcaccgagguccccguggccauccacgccgaccagcugacgcccaccuggcggguguacuccaccggcagcaacgucuuccagacccgcgccgggugccucaucggcgcggagcacgugaacaacuccuacgagugcgacauccccaucggggccggcaucugcgccagcuaccagacgcagaccaacuccccgcggcgcgcccggagcguggcgucccagagcaucaucgccuacaccaugucccugggcgccgagaacagcgucgccuacuccaacaacagcaucgccauccccaccaacuucacgaucuccgugaccaccgagauccugcccgugagcaugaccaagacgagcgucgacugcaccauguacaucugcggggacuccaccgagugcagcaaccuccugcugcaguacggcuccuucugcacccagcucaaccgcgcgcugacggggaucgccguggagcaggacaagaacacccaggagguguucgcccaggucaagcagaucuacaagacgcccccgaucaaggacuucggcggguucaacuucagccagauccugcccgaccccuccaagcccagcaagcgguccuucaucgaggaccuccuguucaacaaggugacccuggccgacgccggcuucaucaagcaguacggcgacugccucggggacaucgcggcccgcgaccugaucugcgcccagaaguucaacggccugaccgugcucccgccccugcugaccgacgagaugaucgcccaguacaccagcgcccuccuggcggggaccaucacguccggcuggugguucggggccggcgccgcccugcagauccccuucgcgaugcagauggccuaccgguucaacggcaucggggucacccagaacgugcucuacgagaaccagaagcugaucgccaaccaguucaacagcgccaucggcaagauccaggacucccugagcuccaccgccagcgcgcucgggaagcugcaggacguggucaaccagaacgcccaggcccugaacacgcucgugaagcagcuguccagcaacuucggcgccaucuccagcgugcugaacgacauccucucccgccuggacccgcccgaggccgaggugcagaucgaccggcugaucaccgggcgccuccagagccugcagaccuacgugacccagcagcugauccgggcggccgagauccgcuggagcgccaaccucgccgcgaccaagauguccgagugcguccugggccagagcaagcggguggacuucugcggcaagggguaccaccugauguccuucccccagagcgccccgcacggcguggucuuccuccacgugacguacguccccgcccaggagaagaacuucaccaccgcccccgcgaucugccacgacgggaaggcccacuucccccgcgagggcguguucguguccaacgggacccacugguucgucacgcagcggaacuucuacgagccgcagaucaucaccaccgacaacaccuucgugagcggcaacugcgacguggucaucggcaucgugaacaacacgguguacgacccccugcagcccgagcuggacuccuucaaggaggagcucgacaaguacuucaagaaccacaccagccccgacgucgaccugggggacaucuccggcaucaacgccagcguggugaacauccagaaggagaucgaccgccugaacgaggucgccaagaaccucaacgagucccugaucgaccugcaggagcucgggaaguacgagcaguacaucaagggcgggggcgggagcgacaucaucaagcuccugaacgagcaggucaacaaggagaugcaguccagcaaccuguacauguccaugagcuccuggugcuacacccacagccucgacggcgccgggcuguuccuguucgaccacgccgcggaggaguacgagcacgccaagaagcucaucaucuuccugaacgagaacaacgugcccgugcagcugaccuccaucagcgccccggagcacaaguucgagggccucacgcagaucuuccagaaggccuacgagcacgagcagcacaucuccgagagcaucaacaacaucguggaccacgccaucaaguccaaggaccacgcgaccuucaacuuccugcagugguacgucgccgagcagcacgaggaggaggugcuguucaaggacauccucgacaagaucgagcugaucgggaacgagaaccacggccuguaccucgccgaccaguacgugaaggggaucgccaagagccgcaaguccuga

SEQ ID NO: 11865 - RNA, 4140 nt, Artificial Sequence
  SARS-CoV-2/Wuhan/WIV05/2019__EPI_ISL_402128 spike protein CDS gc (1-1211)(K986P_V987P_P1069F) Ferritin construct
auguucguguuccugguccuccugccccuggugagcucccagugcgugaaccucaccacccgcacgcagcugccgcccgccuacaccaacagcuucacccggggcgucuacuaccccgacaagguguuccgcuccagcgugcugcacuccacccaggaccucuuccugcccuucuucagcaacgucacgugguuccacgccauccacguguccgggaccaacggcaccaagcgguucgacaacccggugcugcccuucaacgacggggucuacuucgcgagcaccgagaaguccaacaucauccgcggcuggaucuucgggacgacccucgacagcaagacccagucccugcugaucgugaacaacgccaccaacguggucaucaaggugugcgaguuccaguucugcaacgaccccuuccucggcguguacuaccacaagaacaacaagagcuggauggaguccgaguuccgggucuacagcuccgccaacaacugcacguucgaguacgugagccagcccuuccugauggaccuggagggcaagcaggggaacuucaagaaccuccgcgaguucguguucaagaacaucgacggcuacuucaagaucuacuccaagcacaccccgaucaaccugguccgggaccugccccagggguucagcgcccucgagccccugguggaccugcccaucggcaucaacaucacccgcuuccagacccuccuggcccugcaccgguccuaccucacgccgggggacagcagcuccggcuggaccgcgggcgccgccgccuacuacgugggguaccugcagccccgcaccuuccugcucaaguacaacgagaacggcaccaucacggacgcggucgacugcgcccuggacccccugagcgagaccaagugcacccucaaguccuucaccguggagaaggggaucuaccagacgagcaacuuccgggugcagcccaccgaguccaucguccgcuucccgaacaucaccaaccugugccccuucggcgagguguucaacgccacccgguucgccagcgucuacgccuggaaccgcaagcggaucuccaacugcguggcggacuacagcgugcuguacaacuccgccagcuucuccacguucaagugcuacggcgucagccccaccaagcucaacgaccugugcuucaccaacguguacgccgacuccuucgugauccgcggggacgagguccggcagaucgcccccggccagaccgggaagaucgccgacuacaacuacaagcugccggacgacuucacgggcugcgugaucgcguggaacagcaacaaccucgacuccaaggucgggggcaacuacaacuaccuguaccgccuguuccgcaagagcaaccucaagcccuucgagcgggacaucuccaccgagaucuaccaggccggcagcacccccugcaacgggguggagggcuucaacugcuacuucccccugcaguccuacggguuccagccgaccaacggcgugggguaccagcccuaccggguggucgugcugagcuucgagcuccugcacgcccccgccacggugugcggccccaagaaguccaccaaccuggucaagaacaagugcgugaacuucaacuucaacggccucaccgggaccggcgugcugaccgagagcaacaagaaguuccugccguuccagcaguucgggcgcgacaucgccgacacgaccgacgcgguccgcgacccccagacccuggagauccucgacaucacccccugcagcuucggcgggguguccgugaucacgccgggcaccaacaccagcaaccaggucgccgugcuguaccaggacgugaacugcaccgagguccccguggccauccacgccgaccagcugacgcccaccuggcggguguacuccaccggcagcaacgucuuccagacccgcgccgggugccucaucggcgcggagcacgugaacaacuccuacgagugcgacauccccaucggggccggcaucugcgccagcuaccagacgcagaccaacuccccgcggcgcgcccggagcguggcgucccagagcaucaucgccuacaccaugucccugggcgccgagaacagcgucgccuacuccaacaacagcaucgccauccccaccaacuucacgaucuccgugaccaccgagauccugcccgugagcaugaccaagacgagcgucgacugcaccauguacaucugcggggacuccaccgagugcagcaaccuccugcugcaguacggcuccuucugcacccagcucaaccgcgcgcugacggggaucgccguggagcaggacaagaacacccaggagguguucgcccaggucaagcagaucuacaagacgcccccgaucaaggacuucggcggguucaacuucagccagauccugcccgaccccuccaagcccagcaagcgguccuucaucgaggaccuccuguucaacaaggugacccuggccgacgccggcuucaucaagcaguacggcgacugccucggggacaucgcggcccgcgaccugaucugcgcccagaaguucaacggccugaccgugcucccgccccugcugaccgacgagaugaucgcccaguacaccagcgcccuccuggcggggaccaucacguccggcuggaccuucggggccggcgccgcccugcagauccccuucgcgaugcagauggccuaccgguucaacggcaucggggucacccagaacgugcucuacgagaaccagaagcugaucgccaaccaguucaacagcgccaucggcaagauccaggacucccugagcuccaccgccagcgcgcucgggaagcugcaggacguggucaaccagaacgcccaggcccugaacacgcucgugaagcagcuguccagcaacuucggcgccaucuccagcgugcugaacgacauccucucccgccuggacccgcccgaggccgaggugcagaucgaccggcugaucaccgggcgccuccagagccugcagaccuacgugacccagcagcugauccgggcggccgagauccgcgccagcgccaaccucgccgcgaccaagauguccgagugcguccugggccagagcaagcggguggacuucugcggcaagggguaccaccugauguccuucccccagagcgccccgcacggcguggucuuccuccacgugacguacgucuucgcccaggagaagaacuucaccaccgcccccgcgaucugccacgacgggaaggcccacuucccccgcgagggcguguucguguccaacgggacccacugguucgucacgcagcggaacuucuacgagccgcagaucaucaccaccgacaacaccuucgugagcggcaacugcgacguggucaucggcaucgugaacaacacgguguacgacccccugcagcccgagcuggacuccuucaaggaggagcucgacaaguacuucaagaaccacaccagccccgacgucgaccugggggacaucuccggcaucaacgccagcguggugaacauccagaaggagaucgaccgccugaacgaggucgccaagaaccucaacgagucccugaucgaccugcaggagcucgggaaguacgagcaguacaucaagggcgggggcgggagcgacaucaucaagcuccugaacgagcaggucaacaaggagaugcaguccagcaaccuguacauguccaugagcuccuggugcuacacccacagccucgacggcgccgggcuguuccuguucgaccacgccgcggaggaguacgagcacgccaagaagcucaucaucuuccugaacgagaacaacgugcccgugcagcugaccuccaucagcgccccggagcacaaguucgagggccucacgcagaucuuccagaaggccuacgagcacgagcagcacaucuccgagagcaucaacaacaucguggaccacgccaucaaguccaaggaccacgcgaccuucaacuuccugcagugguacgucgccgagcagcacgaggaggaggugcuguucaaggacauccucgacaagaucgagcugaucgggaacgagaaccacggccuguaccucgccgaccaguacgugaaggggaucgccaagagccgcaaguccuga

SEQ ID NO: 11866 - RNA, 4140 nt, Artificial Sequence
  SARS-CoV-2/Wuhan/WIV05/2019__EPI_ISL_402128 spike protein CDS gc (1-1211)(K986P_V987P_ H1048Q_H1064N_ H1083N_H1101N) Ferritin construct
auguucguguuccugguccuccugccccuggugagcucccagugcgugaaccucaccacccgcacgcagcugccgcccgccuacaccaacagcuucacccggggcgucuacuaccccgacaagguguuccgcuccagcgugcugcacuccacccaggaccucuuccugcccuucuucagcaacgucacgugguuccacgccauccacguguccgggaccaacggcaccaagcgguucgacaacccggugcugcccuucaacgacggggucuacuucgcgagcaccgagaaguccaacaucauccgcggcuggaucuucgggacgacccucgacagcaagacccagucccugcugaucgugaacaacgccaccaacguggucaucaaggugugcgaguuccaguucugcaacgaccccuuccucggcguguacuaccacaagaacaacaagagcuggauggaguccgaguuccgggucuacagcuccgccaacaacugcacguucgaguacgugagccagcccuuccugauggaccuggagggcaagcaggggaacuucaagaaccuccgcgaguucguguucaagaacaucgacggcuacuucaagaucuacuccaagcacaccccgaucaaccugguccgggaccugccccagggguucagcgcccucgagccccugguggaccugcccaucggcaucaacaucacccgcuuccagacccuccuggcccugcaccgguccuaccucacgccgggggacagcagcuccggcuggaccgcgggcgccgccgccuacuacgugggguaccugcagccccgcaccuuccugcucaaguacaacgagaacggcaccaucacggacgcggucgacugcgcccuggacccccugagcgagaccaagugcacccucaaguccuucaccguggagaaggggaucuaccagacgagcaacuuccgggugcagcccaccgaguccaucguccgcuucccgaacaucaccaaccugugccccuucggcgagguguucaacgccacccgguucgccagcgucuacgccuggaaccgcaagcggaucuccaacugcguggcggacuacagcgugcuguacaacuccgccagcuucuccacguucaagugcuacggcgucagccccaccaagcucaacgaccugugcuucaccaacguguacgccgacuccuucgugauccgcggggacgagguccggcagaucgcccccggccagaccgggaagaucgccgacuacaacuacaagcugccggacgacuucacgggcugcgugaucgcguggaacagcaacaaccucgacuccaaggucgggggcaacuacaacuaccuguaccgccuguuccgcaagagcaaccucaagcccuucgagcgggacaucuccaccgagaucuaccaggccggcagcacccccugcaacgggguggagggcuucaacugcuacuucccccugcaguccuacggguuccagccgaccaacggcgugggguaccagcccuaccggguggucgugcugagcuucgagcuccugcacgcccccgccacggugugcggccccaagaaguccaccaaccuggucaagaacaagugcgugaacuucaacuucaacggccucaccgggaccggcgugcugaccgagagcaacaagaaguuccugccguuccagcaguucgggcgcgacaucgccgacacgaccgacgcgguccgcgacccccagacccuggagauccucgacaucacccccugcagcuucggcgggguguccgugaucacgccgggcaccaacaccagcaaccaggucgccgugcuguaccaggacgugaacugcaccgagguccccguggccauccacgccgaccagcugacgcccaccuggcggguguacuccaccggcagcaacgucuuccagacccgcgccgggugccucaucggcgcggagcacgugaacaacuccuacgagugcgacauccccaucggggccggcaucugcgccagcuaccagacgcagaccaacuccccgcggcgcgcccggagcguggcgucccagagcaucaucgccuacaccaugucccugggcgccgagaacagcgucgccuacuccaacaacagcaucgccauccccaccaacuucacgaucuccgugaccaccgagauccugcccgugagcaugaccaagacgagcgucgacugcaccauguacaucugcggggacuccaccgagugcagcaaccuccugcugcaguacggcuccuucugcacccagcucaaccgcgcgcugacggggaucgccguggagcaggacaagaacacccaggagguguucgcccaggucaagcagaucuacaagacgcccccgaucaaggacuucggcggguucaacuucagccagauccugcccgaccccuccaagcccagcaagcgguccuucaucgaggaccuccuguucaacaaggugacccuggccgacgccggcuucaucaagcaguacggcgacugccucggggacaucgcggcccgcgaccugaucugcgcccagaaguucaacggccugaccgugcucccgccccugcugaccgacgagaugaucgcccaguacaccagcgcccuccuggcggggaccaucacguccggcuggaccuucggggccggcgccgcccugcagauccccuucgcgaugcagauggccuaccgguucaacggcaucggggucacccagaacgugcucuacgagaaccagaagcugaucgccaaccaguucaacagcgccaucggcaagauccaggacucccugagcuccaccgccagcgcgcucgggaagcugcaggacguggucaaccagaacgcccaggcccugaacacgcucgugaagcagcuguccagcaacuucggcgccaucuccagcgugcugaacgacauccucucccgccuggacccgcccgaggccgaggugcagaucgaccggcugaucaccgggcgccuccagagccugcagaccuacgugacccagcagcugauccgggcggccgagauccgcgccagcgccaaccucgccgcgaccaagauguccgagugcguccugggccagagcaagcggguggacuucugcggcaagggguaccagcugauguccuucccccagagcgccccgcacggcguggucuuccucaacgugacguacguccccgcccaggagaagaacuucaccaccgcccccgcgaucugcaacgacgggaaggcccacuucccccgcgagggcguguucguguccaacgggaccaacugguucgucacgcagcggaacuucuacgagccgcagaucaucaccaccgacaacaccuucgugagcggcaacugcgacguggucaucggcaucgugaacaacacgguguacgacccccugcagcccgagcuggacuccuucaaggaggagcucgacaaguacuucaagaaccacaccagccccgacgucgaccugggggacaucuccggcaucaacgccagcguggugaacauccagaaggagaucgaccgccugaacgaggucgccaagaaccucaacgagucccugaucgaccugcaggagcucgggaaguacgagcaguacaucaagggcgggggcgggagcgacaucaucaagcuccugaacgagcaggucaacaaggagaugcaguccagcaaccuguacauguccaugagcuccuggugcuacacccacagccucgacggcgccgggcuguuccuguucgaccacgccgcggaggaguacgagcacgccaagaagcucaucaucuuccugaacgagaacaacgugcccgugcagcugaccuccaucagcgccccggagcacaaguucgagggccucacgcagaucuuccagaaggccuacgagcacgagcagcacaucuccgagagcaucaacaacaucguggaccacgccaucaaguccaaggaccacgcgaccuucaacuuccugcagugguacgucgccgagcagcacgaggaggaggugcuguucaaggacauccucgacaagaucgagcugaucgggaacgagaaccacggccuguaccucgccgaccaguacgugaaggggaucgccaagagccgcaaguccuga

SEQ ID NO: 11867 - RNA, 4140 nt, Artificial Sequence
  SARS-CoV-2/Wuhan/WIV05/2019__EPI_ISL_402128 spike protein CDS gc (1-1211)(I712C_T1077C) Ferritin construct
auguucguguuccugguccuccugccccuggugagcucccagugcgugaaccucaccacccgcacgcagcugccgcccgccuacaccaacagcuucacccggggcgucuacuaccccgacaagguguuccgcuccagcgugcugcacuccacccaggaccucuuccugcccuucuucagcaacgucacgugguuccacgccauccacguguccgggaccaacggcaccaagcgguucgacaacccggugcugcccuucaacgacggggucuacuucgcgagcaccgagaaguccaacaucauccgcggcuggaucuucgggacgacccucgacagcaagacccagucccugcugaucgugaacaacgccaccaacguggucaucaaggugugcgaguuccaguucugcaacgaccccuuccucggcguguacuaccacaagaacaacaagagcuggauggaguccgaguuccgggucuacagcuccgccaacaacugcacguucgaguacgugagccagcccuuccugauggaccuggagggcaagcaggggaacuucaagaaccuccgcgaguucguguucaagaacaucgacggcuacuucaagaucuacuccaagcacaccccgaucaaccugguccgggaccugccccagggguucagcgcccucgagccccugguggaccugcccaucggcaucaacaucacccgcuuccagacccuccuggcccugcaccgguccuaccucacgccgggggacagcagcuccggcuggaccgcgggcgccgccgccuacuacgugggguaccugcagccccgcaccuuccugcucaaguacaacgagaacggcaccaucacggacgcggucgacugcgcccuggacccccugagcgagaccaagugcacccucaaguccuucaccguggagaaggggaucuaccagacgagcaacuuccgggugcagcccaccgaguccaucguccgcuucccgaacaucaccaaccugugccccuucggcgagguguucaacgccacccgguucgccagcgucuacgccuggaaccgcaagcggaucuccaacugcguggcggacuacagcgugcuguacaacuccgccagcuucuccacguucaagugcuacggcgucagccccaccaagcucaacgaccugugcuucaccaacguguacgccgacuccuucgugauccgcggggacgagguccggcagaucgcccccggccagaccgggaagaucgccgacuacaacuacaagcugccggacgacuucacgggcugcgugaucgcguggaacagcaacaaccucgacuccaaggucgggggcaacuacaacuaccuguaccgccuguuccgcaagagcaaccucaagcccuucgagcgggacaucuccaccgagaucuaccaggccggcagcacccccugcaacgggguggagggcuucaacugcuacuucccccugcaguccuacggguuccagccgaccaacggcgugggguaccagcccuaccggguggucgugcugagcuucgagcuccugcacgcccccgccacggugugcggccccaagaaguccaccaaccuggucaagaacaagugcgugaacuucaacuucaacggccucaccgggaccggcgugcugaccgagagcaacaagaaguuccugccguuccagcaguucgggcgcgacaucgccgacacgaccgacgcgguccgcgacccccagacccuggagauccucgacaucacccccugcagcuucggcgggguguccgugaucacgccgggcaccaacaccagcaaccaggucgccgugcuguaccaggacgugaacugcaccgagguccccguggccauccacgccgaccagcugacgcccaccuggcggguguacuccaccggcagcaacgucuuccagacccgcgccgggugccucaucggcgcggagcacgugaacaacuccuacgagugcgacauccccaucggggccggcaucugcgccagcuaccagacgcagaccaacuccccgcggcgcgcccggagcguggcgucccagagcaucaucgccuacaccaugucccugggcgccgagaacagcgucgccuacuccaacaacagcugcgccauccccaccaacuucacgaucuccgugaccaccgagauccugcccgugagcaugaccaagacgagcgucgacugcaccauguacaucugcggggacuccaccgagugcagcaaccuccugcugcaguacggcuccuucugcacccagcucaaccgcgcgcugacggggaucgccguggagcaggacaagaacacccaggagguguucgcccaggucaagcagaucuacaagacgcccccgaucaaggacuucggcggguucaacuucagccagauccugcccgaccccuccaagcccagcaagcgguccuucaucgaggaccuccuguucaacaaggugacccuggccgacgccggcuucaucaagcaguacggcgacugccucggggacaucgcggcccgcgaccugaucugcgcccagaaguucaacggccugaccgugcucccgccccugcugaccgacgagaugaucgcccaguacaccagcgcccuccuggcggggaccaucacguccggcuggaccuucggggccggcgccgcccugcagauccccuucgcgaugcagauggccuaccgguucaacggcaucggggucacccagaacgugcucuacgagaaccagaagcugaucgccaaccaguucaacagcgccaucggcaagauccaggacucccugagcuccaccgccagcgcgcucgggaagcugcaggacguggucaaccagaacgcccaggcccugaacacgcucgugaagcagcuguccagcaacuucggcgccaucuccagcgugcugaacgacauccucucccgccuggacaaggucgaggccgaggugcagaucgaccggcugaucaccgggcgccuccagagccugcagaccuacgugacccagcagcugauccgggcggccgagauccgcgccagcgccaaccucgccgcgaccaagauguccgagugcguccugggccagagcaagcggguggacuucugcggcaagggguaccaccugauguccuucccccagagcgccccgcacggcguggucuuccuccacgugacguacguccccgcccaggagaagaacuucaccugcgcccccgcgaucugccacgacgggaaggcccacuucccccgcgagggcguguucguguccaacgggacccacugguucgucacgcagcggaacuucuacgagccgcagaucaucaccaccgacaacaccuucgugagcggcaacugcgacguggucaucggcaucgugaacaacacgguguacgacccccugcagcccgagcuggacuccuucaaggaggagcucgacaaguacuucaagaaccacaccagccccgacgucgaccugggggacaucuccggcaucaacgccagcguggugaacauccagaaggagaucgaccgccugaacgaggucgccaagaaccucaacgagucccugaucgaccugcaggagcucgggaaguacgagcaguacaucaagggcgggggcgggagcgacaucaucaagcuccugaacgagcaggucaacaaggagaugcaguccagcaaccuguacauguccaugagcuccuggugcuacacccacagccucgacggcgccgggcuguuccuguucgaccacgccgcggaggaguacgagcacgccaagaagcucaucaucuuccugaacgagaacaacgugcccgugcagcugaccuccaucagcgccccggagcacaaguucgagggccucacgcagaucuuccagaaggccuacgagcacgagcagcacaucuccgagagcaucaacaacaucguggaccacgccaucaaguccaaggaccacgcgaccuucaacuuccugcagugguacgucgccgagcagcacgaggaggaggugcuguucaaggacauccucgacaagaucgagcugaucgggaacgagaaccacggccuguaccucgccgaccaguacgugaaggggaucgccaagagccgcaaguccuga

SEQ ID NO: 11868 - RNA, 4140 nt, Artificial Sequence
  SARS-CoV-2/Wuhan/WIV05/2019__EPI_ISL_402128 spike protein CDS gc (1-1211)(I714C_Y1110C) Ferritin construct
auguucguguuccugguccuccugccccuggugagcucccagugcgugaaccucaccacccgcacgcagcugccgcccgccuacaccaacagcuucacccggggcgucuacuaccccgacaagguguuccgcuccagcgugcugcacuccacccaggaccucuuccugcccuucuucagcaacgucacgugguuccacgccauccacguguccgggaccaacggcaccaagcgguucgacaacccggugcugcccuucaacgacggggucuacuucgcgagcaccgagaaguccaacaucauccgcggcuggaucuucgggacgacccucgacagcaagacccagucccugcugaucgugaacaacgccaccaacguggucaucaaggugugcgaguuccaguucugcaacgaccccuuccucggcguguacuaccacaagaacaacaagagcuggauggaguccgaguuccgggucuacagcuccgccaacaacugcacguucgaguacgugagccagcccuuccugauggaccuggagggcaagcaggggaacuucaagaaccuccgcgaguucguguucaagaacaucgacggcuacuucaagaucuacuccaagcacaccccgaucaaccugguccgggaccugccccagggguucagcgcccucgagccccugguggaccugcccaucggcaucaacaucacccgcuuccagacccuccuggcccugcaccgguccuaccucacgccgggggacagcagcuccggcuggaccgcgggcgccgccgccuacuacgugggguaccugcagccccgcaccuuccugcucaaguacaacgagaacggcaccaucacggacgcggucgacugcgcccuggacccccugagcgagaccaagugcacccucaaguccuucaccguggagaaggggaucuaccagacgagcaacuuccgggugcagcccaccgaguccaucguccgcuucccgaacaucaccaaccugugccccuucggcgagguguucaacgccacccgguucgccagcgucuacgccuggaaccgcaagcggaucuccaacugcguggcggacuacagcgugcuguacaacuccgccagcuucuccacguucaagugcuacggcgucagccccaccaagcucaacgaccugugcuucaccaacguguacgccgacuccuucgugauccgcggggacgagguccggcagaucgcccccggccagaccgggaagaucgccgacuacaacuacaagcugccggacgacuucacgggcugcgugaucgcguggaacagcaacaaccucgacuccaaggucgggggcaacuacaacuaccuguaccgccuguuccgcaagagcaaccucaagcccuucgagcgggacaucuccaccgagaucuaccaggccggcagcacccccugcaacgggguggagggcuucaacugcuacuucccccugcaguccuacggguuccagccgaccaacggcgugggguaccagcccuaccggguggucgugcugagcuucgagcuccugcacgcccccgccacggugugcggccccaagaaguccaccaaccuggucaagaacaagugcgugaacuucaacuucaacggccucaccgggaccggcgugcugaccgagagcaacaagaaguuccugccguuccagcaguucgggcgcgacaucgccgacacgaccgacgcgguccgcgacccccagacccuggagauccucgacaucacccccugcagcuucggcgggguguccgugaucacgccgggcaccaacaccagcaaccaggucgccgugcuguaccaggacgugaacugcaccgagguccccguggccauccacgccgaccagcugacgcccaccuggcggguguacuccaccggcagcaacgucuuccagacccgcgccgggugccucaucggcgcggagcacgugaacaacuccuacgagugcgacauccccaucggggccggcaucugcgccagcuaccagacgcagaccaacuccccgcggcgcgcccggagcguggcgucccagagcaucaucgccuacaccaugucccugggcgccgagaacagcgucgccuacuccaacaacagcaucgccugccccaccaacuucacgaucuccgugaccaccgagauccugcccgugagcaugaccaagacgagcgucgacugcaccauguacaucugcggggacuccaccgagugcagcaaccuccugcugcaguacggcuccuucugcacccagcucaaccgcgcgcugacggggaucgccguggagcaggacaagaacacccaggagguguucgcccaggucaagcagaucuacaagacgcccccgaucaaggacuucggcggguucaacuucagccagauccugcccgaccccuccaagcccagcaagcgguccuucaucgaggaccuccuguucaacaaggugacccuggccgacgccggcuucaucaagcaguacggcgacugccucggggacaucgcggcccgcgaccugaucugcgcccagaaguucaacggccugaccgugcucccgccccugcugaccgacgagaugaucgcccaguacaccagcgcccuccuggcggggaccaucacguccggcuggaccuucggggccggcgccgcccugcagauccccuucgcgaugcagauggccuaccgguucaacggcaucggggucacccagaacgugcucuacgagaaccagaagcugaucgccaaccaguucaacagcgccaucggcaagauccaggacucccugagcuccaccgccagcgcgcucgggaagcugcaggacguggucaaccagaacgcccaggcccugaacacgcucgugaagcagcuguccagcaacuucggcgccaucuccagcgugcugaacgacauccucucccgccuggacaaggucgaggccgaggugcagaucgaccggcugaucaccgggcgccuccagagccugcagaccuacgugacccagcagcugauccgggcggccgagauccgcgccagcgccaaccucgccgcgaccaagauguccgagugcguccugggccagagcaagcggguggacuucugcggcaagggguaccaccugauguccuucccccagagcgccccgcacggcguggucuuccuccacgugacguacguccccgcccaggagaagaacuucaccaccgcccccgcgaucugccacgacgggaaggcccacuucccccgcgagggcguguucguguccaacgggacccacugguucgucacgcagcggaacuucugcgagccgcagaucaucaccaccgacaacaccuucgugagcggcaacugcgacguggucaucggcaucgugaacaacacgguguacgacccccugcagcccgagcuggacuccuucaaggaggagcucgacaaguacuucaagaaccacaccagccccgacgucgaccugggggacaucuccggcaucaacgccagcguggugaacauccagaaggagaucgaccgccugaacgaggucgccaagaaccucaacgagucccugaucgaccugcaggagcucgggaaguacgagcaguacaucaagggcgggggcgggagcgacaucaucaagcuccugaacgagcaggucaacaaggagaugcaguccagcaaccuguacauguccaugagcuccuggugcuacacccacagccucgacggcgccgggcuguuccuguucgaccacgccgcggaggaguacgagcacgccaagaagcucaucaucuuccugaacgagaacaacgugcccgugcagcugaccuccaucagcgccccggagcacaaguucgagggccucacgcagaucuuccagaaggccuacgagcacgagcagcacaucuccgagagcaucaacaacaucguggaccacgccaucaaguccaaggaccacgcgaccuucaacuuccugcagugguacgucgccgagcagcacgaggaggaggugcuguucaaggacauccucgacaagaucgagcugaucgggaacgagaaccacggccuguaccucgccgaccaguacgugaaggggaucgccaagagccgcaaguccuga

SEQ ID NO: 11869 - RNA, 4140 nt, Artificial Sequence
  SARS-CoV-2/Wuhan/WIV05/2019__EPI_ISL_402128 spike protein CDS gc (1-1211)(P715C_P1069C) Ferritin construct
auguucguguuccugguccuccugccccuggugagcucccagugcgugaaccucaccacccgcacgcagcugccgcccgccuacaccaacagcuucacccggggcgucuacuaccccgacaagguguuccgcuccagcgugcugcacuccacccaggaccucuuccugcccuucuucagcaacgucacgugguuccacgccauccacguguccgggaccaacggcaccaagcgguucgacaacccggugcugcccuucaacgacggggucuacuucgcgagcaccgagaaguccaacaucauccgcggcuggaucuucgggacgacccucgacagcaagacccagucccugcugaucgugaacaacgccaccaacguggucaucaaggugugcgaguuccaguucugcaacgaccccuuccucggcguguacuaccacaagaacaacaagagcuggauggaguccgaguuccgggucuacagcuccgccaacaacugcacguucgaguacgugagccagcccuuccugauggaccuggagggcaagcaggggaacuucaagaaccuccgcgaguucguguucaagaacaucgacggcuacuucaagaucuacuccaagcacaccccgaucaaccugguccgggaccugccccagggguucagcgcccucgagccccugguggaccugcccaucggcaucaacaucacccgcuuccagacccuccuggcccugcaccgguccuaccucacgccgggggacagcagcuccggcuggaccgcgggcgccgccgccuacuacgugggguaccugcagccccgcaccuuccugcucaaguacaacgagaacggcaccaucacggacgcggucgacugcgcccuggacccccugagcgagaccaagugcacccucaaguccuucaccguggagaaggggaucuaccagacgagcaacuuccgggugcagcccaccgaguccaucguccgcuucccgaacaucaccaaccugugccccuucggcgagguguucaacgccacccgguucgccagcgucuacgccuggaaccgcaagcggaucuccaacugcguggcggacuacagcgugcuguacaacuccgccagcuucuccacguucaagugcuacggcgucagccccaccaagcucaacgaccugugcuucaccaacguguacgccgacuccuucgugauccgcggggacgagguccggcagaucgcccccggccagaccgggaagaucgccgacuacaacuacaagcugccggacgacuucacgggcugcgugaucgcguggaacagcaacaaccucgacuccaaggucgggggcaacuacaacuaccuguaccgccuguuccgcaagagcaaccucaagcccuucgagcgggacaucuccaccgagaucuaccaggccggcagcacccccugcaacgggguggagggcuucaacugcuacuucccccugcaguccuacggguuccagccgaccaacggcgugggguaccagcccuaccggguggucgugcugagcuucgagcuccugcacgcccccgccacggugugcggccccaagaaguccaccaaccuggucaagaacaagugcgugaacuucaacuucaacggccucaccgggaccggcgugcugaccgagagcaacaagaaguuccugccguuccagcaguucgggcgcgacaucgccgacacgaccgacgcgguccgcgacccccagacccuggagauccucgacaucacccccugcagcuucggcgggguguccgugaucacgccgggcaccaacaccagcaaccaggucgccgugcuguaccaggacgugaacugcaccgagguccccguggccauccacgccgaccagcugacgcccaccuggcggguguacuccaccggcagcaacgucuuccagacccgcgccgggugccucaucggcgcggagcacgugaacaacuccuacgagugcgacauccccaucggggccggcaucugcgccagcuaccagacgcagaccaacuccccgcggcgcgcccggagcguggcgucccagagcaucaucgccuacaccaugucccugggcgccgagaacagcgucgccuacuccaacaacagcaucgccaucugcaccaacuucacgaucuccgugaccaccgagauccugcccgugagcaugaccaagacgagcgucgacugcaccauguacaucugcggggacuccaccgagugcagcaaccuccugcugcaguacggcuccuucugcacccagcucaaccgcgcgcugacggggaucgccguggagcaggacaagaacacccaggagguguucgcccaggucaagcagaucuacaagacgcccccgaucaaggacuucggcggguucaacuucagccagauccugcccgaccccuccaagcccagcaagcgguccuucaucgaggaccuccuguucaacaaggugacccuggccgacgccggcuucaucaagcaguacggcgacugccucggggacaucgcggcccgcgaccugaucugcgcccagaaguucaacggccugaccgugcucccgccccugcugaccgacgagaugaucgcccaguacaccagcgcccuccuggcggggaccaucacguccggcuggaccuucggggccggcgccgcccugcagauccccuucgcgaugcagauggccuaccgguucaacggcaucggggucacccagaacgugcucuacgagaaccagaagcugaucgccaaccaguucaacagcgccaucggcaagauccaggacucccugagcuccaccgccagcgcgcucgggaagcugcaggacguggucaaccagaacgcccaggcccugaacacgcucgugaagcagcuguccagcaacuucggcgccaucuccagcgugcugaacgacauccucucccgccuggacaaggucgaggccgaggugcagaucgaccggcugaucaccgggcgccuccagagccugcagaccuacgugacccagcagcugauccgggcggccgagauccgcgccagcgccaaccucgccgcgaccaagauguccgagugcguccugggccagagcaagcggguggacuucugcggcaagggguaccaccugauguccuucccccagagcgccccgcacggcguggucuuccuccacgugacguacgucugcgcccaggagaagaacuucaccaccgcccccgcgaucugccacgacgggaaggcccacuucccccgcgagggcguguucguguccaacgggacccacugguucgucacgcagcggaacuucuacgagccgcagaucaucaccaccgacaacaccuucgugagcggcaacugcgacguggucaucggcaucgugaacaacacgguguacgacccccugcagcccgagcuggacuccuucaaggaggagcucgacaaguacuucaagaaccacaccagccccgacgucgaccugggggacaucuccggcaucaacgccagcguggugaacauccagaaggagaucgaccgccugaacgaggucgccaagaaccucaacgagucccugaucgaccugcaggagcucgggaaguacgagcaguacaucaagggcgggggcgggagcgacaucaucaagcuccugaacgagcaggucaacaaggagaugcaguccagcaaccuguacauguccaugagcuccuggugcuacacccacagccucgacggcgccgggcuguuccuguucgaccacgccgcggaggaguacgagcacgccaagaagcucaucaucuuccugaacgagaacaacgugcccgugcagcugaccuccaucagcgccccggagcacaaguucgagggccucacgcagaucuuccagaaggccuacgagcacgagcagcacaucuccgagagcaucaacaacaucguggaccacgccaucaaguccaaggaccacgcgaccuucaacuuccugcagugguacgucgccgagcagcacgaggaggaggugcuguucaaggacauccucgacaagaucgagcugaucgggaacgagaaccacggccuguaccucgccgaccaguacgugaaggggaucgccaagagccgcaaguccuga

SEQ ID NO: 11870 - RNA, 4140 nt, Artificial Sequence
  SARS-CoV-2/Wuhan/WIV05/2019__EPI_ISL_402128 spike protein CDS gc (1-1211)(G889C_L1034C) Ferritin construct
auguucguguuccugguccuccugccccuggugagcucccagugcgugaaccucaccacccgcacgcagcugccgcccgccuacaccaacagcuucacccggggcgucuacuaccccgacaagguguuccgcuccagcgugcugcacuccacccaggaccucuuccugcccuucuucagcaacgucacgugguuccacgccauccacguguccgggaccaacggcaccaagcgguucgacaacccggugcugcccuucaacgacggggucuacuucgcgagcaccgagaaguccaacaucauccgcggcuggaucuucgggacgacccucgacagcaagacccagucccugcugaucgugaacaacgccaccaacguggucaucaaggugugcgaguuccaguucugcaacgaccccuuccucggcguguacuaccacaagaacaacaagagcuggauggaguccgaguuccgggucuacagcuccgccaacaacugcacguucgaguacgugagccagcccuuccugauggaccuggagggcaagcaggggaacuucaagaaccuccgcgaguucguguucaagaacaucgacggcuacuucaagaucuacuccaagcacaccccgaucaaccugguccgggaccugccccagggguucagcgcccucgagccccugguggaccugcccaucggcaucaacaucacccgcuuccagacccuccuggcccugcaccgguccuaccucacgccgggggacagcagcuccggcuggaccgcgggcgccgccgccuacuacgugggguaccugcagccccgcaccuuccugcucaaguacaacgagaacggcaccaucacggacgcggucgacugcgcccuggacccccugagcgagaccaagugcacccucaaguccuucaccguggagaaggggaucuaccagacgagcaacuuccgggugcagcccaccgaguccaucguccgcuucccgaacaucaccaaccugugccccuucggcgagguguucaacgccacccgguucgccagcgucuacgccuggaaccgcaagcggaucuccaacugcguggcggacuacagcgugcuguacaacuccgccagcuucuccacguucaagugcuacggcgucagccccaccaagcucaacgaccugugcuucaccaacguguacgccgacuccuucgugauccgcggggacgagguccggcagaucgcccccggccagaccgggaagaucgccgacuacaacuacaagcugccggacgacuucacgggcugcgugaucgcguggaacagcaacaaccucgacuccaaggucgggggcaacuacaacuaccuguaccgccuguuccgcaagagcaaccucaagcccuucgagcgggacaucuccaccgagaucuaccaggccggcagcacccccugcaacgggguggagggcuucaacugcuacuucccccugcaguccuacggguuccagccgaccaacggcgugggguaccagcccuaccggguggucgugcugagcuucgagcuccugcacgcccccgccacggugugcggccccaagaaguccaccaaccuggucaagaacaagugcgugaacuucaacuucaacggccucaccgggaccggcgugcugaccgagagcaacaagaaguuccugccguuccagcaguucgggcgcgacaucgccgacacgaccgacgcgguccgcgacccccagacccuggagauccucgacaucacccccugcagcuucggcgggguguccgugaucacgccgggcaccaacaccagcaaccaggucgccgugcuguaccaggacgugaacugcaccgagguccccguggccauccacgccgaccagcugacgcccaccuggcggguguacuccaccggcagcaacgucuuccagacccgcgccgggugccucaucggcgcggagcacgugaacaacuccuacgagugcgacauccccaucggggccggcaucugcgccagcuaccagacgcagaccaacuccccgcggcgcgcccggagcguggcgucccagagcaucaucgccuacaccaugucccugggcgccgagaacagcgucgccuacuccaacaacagcaucgccauccccaccaacuucacgaucuccgugaccaccgagauccugcccgugagcaugaccaagacgagcgucgacugcaccauguacaucugcggggacuccaccgagugcagcaaccuccugcugcaguacggcuccuucugcacccagcucaaccgcgcgcugacggggaucgccguggagcaggacaagaacacccaggagguguucgcccaggucaagcagaucuacaagacgcccccgaucaaggacuucggcggguucaacuucagccagauccugcccgaccccuccaagcccagcaagcgguccuucaucgaggaccuccuguucaacaaggugacccuggccgacgccggcuucaucaagcaguacggcgacugccucggggacaucgcggcccgcgaccugaucugcgcccagaaguucaacggccugaccgugcucccgccccugcugaccgacgagaugaucgcccaguacaccagcgcccuccuggcggggaccaucacguccggcuggaccuucugcgccggcgccgcccugcagauccccuucgcgaugcagauggccuaccgguucaacggcaucggggucacccagaacgugcucuacgagaaccagaagcugaucgccaaccaguucaacagcgccaucggcaagauccaggacucccugagcuccaccgccagcgcgcucgggaagcugcaggacguggucaaccagaacgcccaggcccugaacacgcucgugaagcagcuguccagcaacuucggcgccaucuccagcgugcugaacgacauccucucccgccuggacaaggucgaggccgaggugcagaucgaccggcugaucaccgggcgccuccagagccugcagaccuacgugacccagcagcugauccgggcggccgagauccgcgccagcgccaaccucgccgcgaccaagauguccgagugcgucugcggccagagcaagcggguggacuucugcggcaagggguaccaccugauguccuucccccagagcgccccgcacggcguggucuuccuccacgugacguacguccccgcccaggagaagaacuucaccaccgcccccgcgaucugccacgacgggaaggcccacuucccccgcgagggcguguucguguccaacgggacccacugguucgucacgcagcggaacuucuacgagccgcagaucaucaccaccgacaacaccuucgugagcggcaacugcgacguggucaucggcaucgugaacaacacgguguacgacccccugcagcccgagcuggacuccuucaaggaggagcucgacaaguacuucaagaaccacaccagccccgacgucgaccugggggacaucuccggcaucaacgccagcguggugaacauccagaaggagaucgaccgccugaacgaggucgccaagaaccucaacgagucccugaucgaccugcaggagcucgggaaguacgagcaguacaucaagggcgggggcgggagcgacaucaucaagcuccugaacgagcaggucaacaaggagaugcaguccagcaaccuguacauguccaugagcuccuggugcuacacccacagccucgacggcgccgggcuguuccuguucgaccacgccgcggaggaguacgagcacgccaagaagcucaucaucuuccugaacgagaacaacgugcccgugcagcugaccuccaucagcgccccggagcacaaguucgagggccucacgcagaucuuccagaaggccuacgagcacgagcagcacaucuccgagagcaucaacaacaucguggaccacgccaucaaguccaaggaccacgcgaccuucaacuuccugcagugguacgucgccgagcagcacgaggaggaggugcuguucaaggacauccucgacaagaucgagcugaucgggaacgagaaccacggccuguaccucgccgaccaguacgugaaggggaucgccaagagccgcaaguccuga

SEQ ID NO: 11871 - RNA, 4140 nt, Artificial Sequence
  SARS-CoV-2/Wuhan/WIV05/2019__EPI_ISL_402128 spike protein CDS gc (1-1211)(I909C_Y1047C) Ferritin construct
auguucguguuccugguccuccugccccuggugagcucccagugcgugaaccucaccacccgcacgcagcugccgcccgccuacaccaacagcuucacccggggcgucuacuaccccgacaagguguuccgcuccagcgugcugcacuccacccaggaccucuuccugcccuucuucagcaacgucacgugguuccacgccauccacguguccgggaccaacggcaccaagcgguucgacaacccggugcugcccuucaacgacggggucuacuucgcgagcaccgagaaguccaacaucauccgcggcuggaucuucgggacgacccucgacagcaagacccagucccugcugaucgugaacaacgccaccaacguggucaucaaggugugcgaguuccaguucugcaacgaccccuuccucggcguguacuaccacaagaacaacaagagcuggauggaguccgaguuccgggucuacagcuccgccaacaacugcacguucgaguacgugagccagcccuuccugauggaccuggagggcaagcaggggaacuucaagaaccuccgcgaguucguguucaagaacaucgacggcuacuucaagaucuacuccaagcacaccccgaucaaccugguccgggaccugccccagggguucagcgcccucgagccccugguggaccugcccaucggcaucaacaucacccgcuuccagacccuccuggcccugcaccgguccuaccucacgccgggggacagcagcuccggcuggaccgcgggcgccgccgccuacuacgugggguaccugcagccccgcaccuuccugcucaaguacaacgagaacggcaccaucacggacgcggucgacugcgcccuggacccccugagcgagaccaagugcacccucaaguccuucaccguggagaaggggaucuaccagacgagcaacuuccgggugcagcccaccgaguccaucguccgcuucccgaacaucaccaaccugugccccuucggcgagguguucaacgccacccgguucgccagcgucuacgccuggaaccgcaagcggaucuccaacugcguggcggacuacagcgugcuguacaacuccgccagcuucuccacguucaagugcuacggcgucagccccaccaagcucaacgaccugugcuucaccaacguguacgccgacuccuucgugauccgcggggacgagguccggcagaucgcccccggccagaccgggaagaucgccgacuacaacuacaagcugccggacgacuucacgggcugcgugaucgcguggaacagcaacaaccucgacuccaaggucgggggcaacuacaacuaccuguaccgccuguuccgcaagagcaaccucaagcccuucgagcgggacaucuccaccgagaucuaccaggccggcagcacccccugcaacgggguggagggcuucaacugcuacuucccccugcaguccuacggguuccagccgaccaacggcgugggguaccagcccuaccggguggucgugcugagcuucgagcuccugcacgcccccgccacggugugcggccccaagaaguccaccaaccuggucaagaacaagugcgugaacuucaacuucaacggccucaccgggaccggcgugcugaccgagagcaacaagaaguuccugccguuccagcaguucgggcgcgacaucgccgacacgaccgacgcgguccgcgacccccagacccuggagauccucgacaucacccccugcagcuucggcgggguguccgugaucacgccgggcaccaacaccagcaaccaggucgccgugcuguaccaggacgugaacugcaccgagguccccguggccauccacgccgaccagcugacgcccaccuggcggguguacuccaccggcagcaacgucuuccagacccgcgccgggugccucaucggcgcggagcacgugaacaacuccuacgagugcgacauccccaucggggccggcaucugcgccagcuaccagacgcagaccaacuccccgcggcgcgcccggagcguggcgucccagagcaucaucgccuacaccaugucccugggcgccgagaacagcgucgccuacuccaacaacagcaucgccauccccaccaacuucacgaucuccgugaccaccgagauccugcccgugagcaugaccaagacgagcgucgacugcaccauguacaucugcggggacuccaccgagugcagcaaccuccugcugcaguacggcuccuucugcacccagcucaaccgcgcgcugacggggaucgccguggagcaggacaagaacacccaggagguguucgcccaggucaagcagaucuacaagacgcccccgaucaaggacuucggcggguucaacuucagccagauccugcccgaccccuccaagcccagcaagcgguccuucaucgaggaccuccuguucaacaaggugacccuggccgacgccggcuucaucaagcaguacggcgacugccucggggacaucgcggcccgcgaccugaucugcgcccagaaguucaacggccugaccgugcucccgccccugcugaccgacgagaugaucgcccaguacaccagcgcccuccuggcggggaccaucacguccggcuggaccuucggggccggcgccgcccugcagauccccuucgcgaugcagauggccuaccgguucaacggcugcggggucacccagaacgugcucuacgagaaccagaagcugaucgccaaccaguucaacagcgccaucggcaagauccaggacucccugagcuccaccgccagcgcgcucgggaagcugcaggacguggucaaccagaacgcccaggcccugaacacgcucgugaagcagcuguccagcaacuucggcgccaucuccagcgugcugaacgacauccucucccgccuggacaaggucgaggccgaggugcagaucgaccggcugaucaccgggcgccuccagagccugcagaccuacgugacccagcagcugauccgggcggccgagauccgcgccagcgccaaccucgccgcgaccaagauguccgagugcguccugggccagagcaagcggguggacuucugcggcaaggggugccaccugauguccuucccccagagcgccccgcacggcguggucuuccuccacgugacguacguccccgcccaggagaagaacuucaccaccgcccccgcgaucugccacgacgggaaggcccacuucccccgcgagggcguguucguguccaacgggacccacugguucgucacgcagcggaacuucuacgagccgcagaucaucaccaccgacaacaccuucgugagcggcaacugcgacguggucaucggcaucgugaacaacacgguguacgacccccugcagcccgagcuggacuccuucaaggaggagcucgacaaguacuucaagaaccacaccagccccgacgucgaccugggggacaucuccggcaucaacgccagcguggugaacauccagaaggagaucgaccgccugaacgaggucgccaagaaccucaacgagucccugaucgaccugcaggagcucgggaaguacgagcaguacaucaagggcgggggcgggagcgacaucaucaagcuccugaacgagcaggucaacaaggagaugcaguccagcaaccuguacauguccaugagcuccuggugcuacacccacagccucgacggcgccgggcuguuccuguucgaccacgccgcggaggaguacgagcacgccaagaagcucaucaucuuccugaacgagaacaacgugcccgugcagcugaccuccaucagcgccccggagcacaaguucgagggccucacgcagaucuuccagaaggccuacgagcacgagcagcacaucuccgagagcaucaacaacaucguggaccacgccaucaaguccaaggaccacgcgaccuucaacuuccugcagugguacgucgccgagcagcacgaggaggaggugcuguucaaggacauccucgacaagaucgagcugaucgggaacgagaaccacggccuguaccucgccgaccaguacgugaaggggaucgccaagagccgcaaguccuga

SEQ ID NO: 11872 - RNA, 4140 nt, Artificial Sequence
  SARS-CoV-2/Wuhan/WIV05/2019__EPI_ISL_402128 spike protein CDS gc (1-1211)(Q965C_S1003C) Ferritin construct
auguucguguuccugguccuccugccccuggugagcucccagugcgugaaccucaccacccgcacgcagcugccgcccgccuacaccaacagcuucacccggggcgucuacuaccccgacaagguguuccgcuccagcgugcugcacuccacccaggaccucuuccugcccuucuucagcaacgucacgugguuccacgccauccacguguccgggaccaacggcaccaagcgguucgacaacccggugcugcccuucaacgacggggucuacuucgcgagcaccgagaaguccaacaucauccgcggcuggaucuucgggacgacccucgacagcaagacccagucccugcugaucgugaacaacgccaccaacguggucaucaaggugugcgaguuccaguucugcaacgaccccuuccucggcguguacuaccacaagaacaacaagagcuggauggaguccgaguuccgggucuacagcuccgccaacaacugcacguucgaguacgugagccagcccuuccugauggaccuggagggcaagcaggggaacuucaagaaccuccgcgaguucguguucaagaacaucgacggcuacuucaagaucuacuccaagcacaccccgaucaaccugguccgggaccugccccagggguucagcgcccucgagccccugguggaccugcccaucggcaucaacaucacccgcuuccagacccuccuggcccugcaccgguccuaccucacgccgggggacagcagcuccggcuggaccgcgggcgccgccgccuacuacgugggguaccugcagccccgcaccuuccugcucaaguacaacgagaacggcaccaucacggacgcggucgacugcgcccuggacccccugagcgagaccaagugcacccucaaguccuucaccguggagaaggggaucuaccagacgagcaacuuccgggugcagcccaccgaguccaucguccgcuucccgaacaucaccaaccugugccccuucggcgagguguucaacgccacccgguucgccagcgucuacgccuggaaccgcaagcggaucuccaacugcguggcggacuacagcgugcuguacaacuccgccagcuucuccacguucaagugcuacggcgucagccccaccaagcucaacgaccugugcuucaccaacguguacgccgacuccuucgugauccgcggggacgagguccggcagaucgcccccggccagaccgggaagaucgccgacuacaacuacaagcugccggacgacuucacgggcugcgugaucgcguggaacagcaacaaccucgacuccaaggucgggggcaacuacaacuaccuguaccgccuguuccgcaagagcaaccucaagcccuucgagcgggacaucuccaccgagaucuaccaggccggcagcacccccugcaacgggguggagggcuucaacugcuacuucccccugcaguccuacggguuccagccgaccaacggcgugggguaccagcccuaccggguggucgugcugagcuucgagcuccugcacgcccccgccacggugugcggccccaagaaguccaccaaccuggucaagaacaagugcgugaacuucaacuucaacggccucaccgggaccggcgugcugaccgagagcaacaagaaguuccugccguuccagcaguucgggcgcgacaucgccgacacgaccgacgcgguccgcgacccccagacccuggagauccucgacaucacccccugcagcuucggcgggguguccgugaucacgccgggcaccaacaccagcaaccaggucgccgugcuguaccaggacgugaacugcaccgagguccccguggccauccacgccgaccagcugacgcccaccuggcggguguacuccaccggcagcaacgucuuccagacccgcgccgggugccucaucggcgcggagcacgugaacaacuccuacgagugcgacauccccaucggggccggcaucugcgccagcuaccagacgcagaccaacuccccgcggcgcgcccggagcguggcgucccagagcaucaucgccuacaccaugucccugggcgccgagaacagcgucgccuacuccaacaacagcaucgccauccccaccaacuucacgaucuccgugaccaccgagauccugcccgugagcaugaccaagacgagcgucgacugcaccauguacaucugcggggacuccaccgagugcagcaaccuccugcugcaguacggcuccuucugcacccagcucaaccgcgcgcugacggggaucgccguggagcaggacaagaacacccaggagguguucgcccaggucaagcagaucuacaagacgcccccgaucaaggacuucggcggguucaacuucagccagauccugcccgaccccuccaagcccagcaagcgguccuucaucgaggaccuccuguucaacaaggugacccuggccgacgccggcuucaucaagcaguacggcgacugccucggggacaucgcggcccgcgaccugaucugcgcccagaaguucaacggccugaccgugcucccgccccugcugaccgacgagaugaucgcccaguacaccagcgcccuccuggcggggaccaucacguccggcuggaccuucggggccggcgccgcccugcagauccccuucgcgaugcagauggccuaccgguucaacggcaucggggucacccagaacgugcucuacgagaaccagaagcugaucgccaaccaguucaacagcgccaucggcaagauccaggacucccugagcuccaccgccagcgcgcucgggaagcugcaggacguggucaaccagaacgcccaggcccugaacacgcucgugaagugccuguccagcaacuucggcgccaucuccagcgugcugaacgacauccucucccgccuggacaaggucgaggccgaggugcagaucgaccggcugaucaccgggcgccuccagugccugcagaccuacgugacccagcagcugauccgggcggccgagauccgcgccagcgccaaccucgccgcgaccaagauguccgagugcguccugggccagagcaagcggguggacuucugcggcaagggguaccaccugauguccuucccccagagcgccccgcacggcguggucuuccuccacgugacguacguccccgcccaggagaagaacuucaccaccgcccccgcgaucugccacgacgggaaggcccacuucccccgcgagggcguguucguguccaacgggacccacugguucgucacgcagcggaacuucuacgagccgcagaucaucaccaccgacaacaccuucgugagcggcaacugcgacguggucaucggcaucgugaacaacacgguguacgacccccugcagcccgagcuggacuccuucaaggaggagcucgacaaguacuucaagaaccacaccagccccgacgucgaccugggggacaucuccggcaucaacgccagcguggugaacauccagaaggagaucgaccgccugaacgaggucgccaagaaccucaacgagucccugaucgaccugcaggagcucgggaaguacgagcaguacaucaagggcgggggcgggagcgacaucaucaagcuccugaacgagcaggucaacaaggagaugcaguccagcaaccuguacauguccaugagcuccuggugcuacacccacagccucgacggcgccgggcuguuccuguucgaccacgccgcggaggaguacgagcacgccaagaagcucaucaucuuccugaacgagaacaacgugcccgugcagcugaccuccaucagcgccccggagcacaaguucgagggccucacgcagaucuuccagaaggccuacgagcacgagcagcacaucuccgagagcaucaacaacaucguggaccacgccaucaaguccaaggaccacgcgaccuucaacuuccugcagugguacgucgccgagcagcacgaggaggaggugcuguucaaggacauccucgacaagaucgagcugaucgggaacgagaaccacggccuguaccucgccgaccaguacgugaaggggaucgccaagagccgcaaguccuga

SEQ ID NO: 11873 - RNA, 4140 nt, Artificial Sequence
  SARS-CoV-2/Wuhan/WIV05/2019__EPI_ISL_402128 spike protein CDS gc (1-1211)(F970C_G999C) Ferritin construct
auguucguguuccugguccuccugccccuggugagcucccagugcgugaaccucaccacccgcacgcagcugccgcccgccuacaccaacagcuucacccggggcgucuacuaccccgacaagguguuccgcuccagcgugcugcacuccacccaggaccucuuccugcccuucuucagcaacgucacgugguuccacgccauccacguguccgggaccaacggcaccaagcgguucgacaacccggugcugcccuucaacgacggggucuacuucgcgagcaccgagaaguccaacaucauccgcggcuggaucuucgggacgacccucgacagcaagacccagucccugcugaucgugaacaacgccaccaacguggucaucaaggugugcgaguuccaguucugcaacgaccccuuccucggcguguacuaccacaagaacaacaagagcuggauggaguccgaguuccgggucuacagcuccgccaacaacugcacguucgaguacgugagccagcccuuccugauggaccuggagggcaagcaggggaacuucaagaaccuccgcgaguucguguucaagaacaucgacggcuacuucaagaucuacuccaagcacaccccgaucaaccugguccgggaccugccccagggguucagcgcccucgagccccugguggaccugcccaucggcaucaacaucacccgcuuccagacccuccuggcccugcaccgguccuaccucacgccgggggacagcagcuccggcuggaccgcgggcgccgccgccuacuacgugggguaccugcagccccgcaccuuccugcucaaguacaacgagaacggcaccaucacggacgcggucgacugcgcccuggacccccugagcgagaccaagugcacccucaaguccuucaccguggagaaggggaucuaccagacgagcaacuuccgggugcagcccaccgaguccaucguccgcuucccgaacaucaccaaccugugccccuucggcgagguguucaacgccacccgguucgccagcgucuacgccuggaaccgcaagcggaucuccaacugcguggcggacuacagcgugcuguacaacuccgccagcuucuccacguucaagugcuacggcgucagccccaccaagcucaacgaccugugcuucaccaacguguacgccgacuccuucgugauccgcggggacgagguccggcagaucgcccccggccagaccgggaagaucgccgacuacaacuacaagcugccggacgacuucacgggcugcgugaucgcguggaacagcaacaaccucgacuccaaggucgggggcaacuacaacuaccuguaccgccuguuccgcaagagcaaccucaagcccuucgagcgggacaucuccaccgagaucuaccaggccggcagcacccccugcaacgggguggagggcuucaacugcuacuucccccugcaguccuacggguuccagccgaccaacggcgugggguaccagcccuaccggguggucgugcugagcuucgagcuccugcacgcccccgccacggugugcggccccaagaaguccaccaaccuggucaagaacaagugcgugaacuucaacuucaacggccucaccgggaccggcgugcugaccgagagcaacaagaaguuccugccguuccagcaguucgggcgcgacaucgccgacacgaccgacgcgguccgcgacccccagacccuggagauccucgacaucacccccugcagcuucggcgggguguccgugaucacgccgggcaccaacaccagcaaccaggucgccgugcuguaccaggacgugaacugcaccgagguccccguggccauccacgccgaccagcugacgcccaccuggcggguguacuccaccggcagcaacgucuuccagacccgcgccgggugccucaucggcgcggagcacgugaacaacuccuacgagugcgacauccccaucggggccggcaucugcgccagcuaccagacgcagaccaacuccccgcggcgcgcccggagcguggcgucccagagcaucaucgccuacaccaugucccugggcgccgagaacagcgucgccuacuccaacaacagcaucgccauccccaccaacuucacgaucuccgugaccaccgagauccugcccgugagcaugaccaagacgagcgucgacugcaccauguacaucugcggggacuccaccgagugcagcaaccuccugcugcaguacggcuccuucugcacccagcucaaccgcgcgcugacggggaucgccguggagcaggacaagaacacccaggagguguucgcccaggucaagcagaucuacaagacgcccccgaucaaggacuucggcggguucaacuucagccagauccugcccgaccccuccaagcccagcaagcgguccuucaucgaggaccuccuguucaacaaggugacccuggccgacgccggcuucaucaagcaguacggcgacugccucggggacaucgcggcccgcgaccugaucugcgcccagaaguucaacggccugaccgugcucccgccccugcugaccgacgagaugaucgcccaguacaccagcgcccuccuggcggggaccaucacguccggcuggaccuucggggccggcgccgcccugcagauccccuucgcgaugcagauggccuaccgguucaacggcaucggggucacccagaacgugcucuacgagaaccagaagcugaucgccaaccaguucaacagcgccaucggcaagauccaggacucccugagcuccaccgccagcgcgcucgggaagcugcaggacguggucaaccagaacgcccaggcccugaacacgcucgugaagcagcuguccagcaacugcggcgccaucuccagcgugcugaacgacauccucucccgccuggacaaggucgaggccgaggugcagaucgaccggcugaucaccugucgccuccagagccugcagaccuacgugacccagcagcugauccgggcggccgagauccgcgccagcgccaaccucgccgcgaccaagauguccgagugcguccugggccagagcaagcggguggacuucugcggcaagggguaccaccugauguccuucccccagagcgccccgcacggcguggucuuccuccacgugacguacguccccgcccaggagaagaacuucaccaccgcccccgcgaucugccacgacgggaaggcccacuucccccgcgagggcguguucguguccaacgggacccacugguucgucacgcagcggaacuucuacgagccgcagaucaucaccaccgacaacaccuucgugagcggcaacugcgacguggucaucggcaucgugaacaacacgguguacgacccccugcagcccgagcuggacuccuucaaggaggagcucgacaaguacuucaagaaccacaccagccccgacgucgaccugggggacaucuccggcaucaacgccagcguggugaacauccagaaggagaucgaccgccugaacgaggucgccaagaaccucaacgagucccugaucgaccugcaggagcucgggaaguacgagcaguacaucaagggcgggggcgggagcgacaucaucaagcuccugaacgagcaggucaacaaggagaugcaguccagcaaccuguacauguccaugagcuccuggugcuacacccacagccucgacggcgccgggcuguuccuguucgaccacgccgcggaggaguacgagcacgccaagaagcucaucaucuuccugaacgagaacaacgugcccgugcagcugaccuccaucagcgccccggagcacaaguucgagggccucacgcagaucuuccagaaggccuacgagcacgagcagcacaucuccgagagcaucaacaacaucguggaccacgccaucaaguccaaggaccacgcgaccuucaacuuccugcagugguacgucgccgagcagcacgaggaggaggugcuguucaaggacauccucgacaagaucgagcugaucgggaacgagaaccacggccuguaccucgccgaccaguacgugaaggggaucgccaagagccgcaaguccuga

SEQ ID NO: 11874 - RNA, 4140 nt, Artificial Sequence
  SARS-CoV-2/Wuhan/WIV05/2019__EPI_ISL_402128 spike protein CDS gc (1-1211)(A972C_R995C) Ferritin construct
auguucguguuccugguccuccugccccuggugagcucccagugcgugaaccucaccacccgcacgcagcugccgcccgccuacaccaacagcuucacccggggcgucuacuaccccgacaagguguuccgcuccagcgugcugcacuccacccaggaccucuuccugcccuucuucagcaacgucacgugguuccacgccauccacguguccgggaccaacggcaccaagcgguucgacaacccggugcugcccuucaacgacggggucuacuucgcgagcaccgagaaguccaacaucauccgcggcuggaucuucgggacgacccucgacagcaagacccagucccugcugaucgugaacaacgccaccaacguggucaucaaggugugcgaguuccaguucugcaacgaccccuuccucggcguguacuaccacaagaacaacaagagcuggauggaguccgaguuccgggucuacagcuccgccaacaacugcacguucgaguacgugagccagcccuuccugauggaccuggagggcaagcaggggaacuucaagaaccuccgcgaguucguguucaagaacaucgacggcuacuucaagaucuacuccaagcacaccccgaucaaccugguccgggaccugccccagggguucagcgcccucgagccccugguggaccugcccaucggcaucaacaucacccgcuuccagacccuccuggcccugcaccgguccuaccucacgccgggggacagcagcuccggcuggaccgcgggcgccgccgccuacuacgugggguaccugcagccccgcaccuuccugcucaaguacaacgagaacggcaccaucacggacgcggucgacugcgcccuggacccccugagcgagaccaagugcacccucaaguccuucaccguggagaaggggaucuaccagacgagcaacuuccgggugcagcccaccgaguccaucguccgcuucccgaacaucaccaaccugugccccuucggcgagguguucaacgccacccgguucgccagcgucuacgccuggaaccgcaagcggaucuccaacugcguggcggacuacagcgugcuguacaacuccgccagcuucuccacguucaagugcuacggcgucagccccaccaagcucaacgaccugugcuucaccaacguguacgccgacuccuucgugauccgcggggacgagguccggcagaucgcccccggccagaccgggaagaucgccgacuacaacuacaagcugccggacgacuucacgggcugcgugaucgcguggaacagcaacaaccucgacuccaaggucgggggcaacuacaacuaccuguaccgccuguuccgcaagagcaaccucaagcccuucgagcgggacaucuccaccgagaucuaccaggccggcagcacccccugcaacgggguggagggcuucaacugcuacuucccccugcaguccuacggguuccagccgaccaacggcgugggguaccagcccuaccggguggucgugcugagcuucgagcuccugcacgcccccgccacggugugcggccccaagaaguccaccaaccuggucaagaacaagugcgugaacuucaacuucaacggccucaccgggaccggcgugcugaccgagagcaacaagaaguuccugccguuccagcaguucgggcgcgacaucgccgacacgaccgacgcgguccgcgacccccagacccuggagauccucgacaucacccccugcagcuucggcgggguguccgugaucacgccgggcaccaacaccagcaaccaggucgccgugcuguaccaggacgugaacugcaccgagguccccguggccauccacgccgaccagcugacgcccaccuggcggguguacuccaccggcagcaacgucuuccagacccgcgccgggugccucaucggcgcggagcacgugaacaacuccuacgagugcgacauccccaucggggccggcaucugcgccagcuaccagacgcagaccaacuccccgcggcgcgcccggagcguggcgucccagagcaucaucgccuacaccaugucccugggcgccgagaacagcgucgccuacuccaacaacagcaucgccauccccaccaacuucacgaucuccgugaccaccgagauccugcccgugagcaugaccaagacgagcgucgacugcaccauguacaucugcggggacuccaccgagugcagcaaccuccugcugcaguacggcuccuucugcacccagcucaaccgcgcgcugacggggaucgccguggagcaggacaagaacacccaggagguguucgcccaggucaagcagaucuacaagacgcccccgaucaaggacuucggcggguucaacuucagccagauccugcccgaccccuccaagcccagcaagcgguccuucaucgaggaccuccuguucaacaaggugacccuggccgacgccggcuucaucaagcaguacggcgacugccucggggacaucgcggcccgcgaccugaucugcgcccagaaguucaacggccugaccgugcucccgccccugcugaccgacgagaugaucgcccaguacaccagcgcccuccuggcggggaccaucacguccggcuggaccuucggggccggcgccgcccugcagauccccuucgcgaugcagauggccuaccgguucaacggcaucggggucacccagaacgugcucuacgagaaccagaagcugaucgccaaccaguucaacagcgccaucggcaagauccaggacucccugagcuccaccgccagcgcgcucgggaagcugcaggacguggucaaccagaacgcccaggcccugaacacgcucgugaagcagcuguccagcaacuucggcugcaucuccagcgugcugaacgacauccucucccgccuggacaaggucgaggccgaggugcagaucgacugccugaucaccgggcgccuccagagccugcagaccuacgugacccagcagcugauccgggcggccgagauccgcgccagcgccaaccucgccgcgaccaagauguccgagugcguccugggccagagcaagcggguggacuucugcggcaagggguaccaccugauguccuucccccagagcgccccgcacggcguggucuuccuccacgugacguacguccccgcccaggagaagaacuucaccaccgcccccgcgaucugccacgacgggaaggcccacuucccccgcgagggcguguucguguccaacgggacccacugguucgucacgcagcggaacuucuacgagccgcagaucaucaccaccgacaacaccuucgugagcggcaacugcgacguggucaucggcaucgugaacaacacgguguacgacccccugcagcccgagcuggacuccuucaaggaggagcucgacaaguacuucaagaaccacaccagccccgacgucgaccugggggacaucuccggcaucaacgccagcguggugaacauccagaaggagaucgaccgccugaacgaggucgccaagaaccucaacgagucccugaucgaccugcaggagcucgggaaguacgagcaguacaucaagggcgggggcgggagcgacaucaucaagcuccugaacgagcaggucaacaaggagaugcaguccagcaaccuguacauguccaugagcuccuggugcuacacccacagccucgacggcgccgggcuguuccuguucgaccacgccgcggaggaguacgagcacgccaagaagcucaucaucuuccugaacgagaacaacgugcccgugcagcugaccuccaucagcgccccggagcacaaguucgagggccucacgcagaucuuccagaaggccuacgagcacgagcagcacaucuccgagagcaucaacaacaucguggaccacgccaucaaguccaaggaccacgcgaccuucaacuuccugcagugguacgucgccgagcagcacgaggaggaggugcuguucaaggacauccucgacaagaucgagcugaucgggaacgagaaccacggccuguaccucgccgaccaguacgugaaggggaucgccaagagccgcaaguccuga

SEQ ID NO: 11875 - RNA, 4140 nt, Artificial Sequence
  SARS-CoV-2/Wuhan/WIV05/2019__EPI_ISL_402128 spike protein CDS gc (1-1211)(A890C_V1040C) Ferritin construct
auguucguguuccugguccuccugccccuggugagcucccagugcgugaaccucaccacccgcacgcagcugccgcccgccuacaccaacagcuucacccggggcgucuacuaccccgacaagguguuccgcuccagcgugcugcacuccacccaggaccucuuccugcccuucuucagcaacgucacgugguuccacgccauccacguguccgggaccaacggcaccaagcgguucgacaacccggugcugcccuucaacgacggggucuacuucgcgagcaccgagaaguccaacaucauccgcggcuggaucuucgggacgacccucgacagcaagacccagucccugcugaucgugaacaacgccaccaacguggucaucaaggugugcgaguuccaguucugcaacgaccccuuccucggcguguacuaccacaagaacaacaagagcuggauggaguccgaguuccgggucuacagcuccgccaacaacugcacguucgaguacgugagccagcccuuccugauggaccuggagggcaagcaggggaacuucaagaaccuccgcgaguucguguucaagaacaucgacggcuacuucaagaucuacuccaagcacaccccgaucaaccugguccgggaccugccccagggguucagcgcccucgagccccugguggaccugcccaucggcaucaacaucacccgcuuccagacccuccuggcccugcaccgguccuaccucacgccgggggacagcagcuccggcuggaccgcgggcgccgccgccuacuacgugggguaccugcagccccgcaccuuccugcucaaguacaacgagaacggcaccaucacggacgcggucgacugcgcccuggacccccugagcgagaccaagugcacccucaaguccuucaccguggagaaggggaucuaccagacgagcaacuuccgggugcagcccaccgaguccaucguccgcuucccgaacaucaccaaccugugccccuucggcgagguguucaacgccacccgguucgccagcgucuacgccuggaaccgcaagcggaucuccaacugcguggcggacuacagcgugcuguacaacuccgccagcuucuccacguucaagugcuacggcgucagccccaccaagcucaacgaccugugcuucaccaacguguacgccgacuccuucgugauccgcggggacgagguccggcagaucgcccccggccagaccgggaagaucgccgacuacaacuacaagcugccggacgacuucacgggcugcgugaucgcguggaacagcaacaaccucgacuccaaggucgggggcaacuacaacuaccuguaccgccuguuccgcaagagcaaccucaagcccuucgagcgggacaucuccaccgagaucuaccaggccggcagcacccccugcaacgggguggagggcuucaacugcuacuucccccugcaguccuacggguuccagccgaccaacggcgugggguaccagcccuaccggguggucgugcugagcuucgagcuccugcacgcccccgccacggugugcggccccaagaaguccaccaaccuggucaagaacaagugcgugaacuucaacuucaacggccucaccgggaccggcgugcugaccgagagcaacaagaaguuccugccguuccagcaguucgggcgcgacaucgccgacacgaccgacgcgguccgcgacccccagacccuggagauccucgacaucacccccugcagcuucggcgggguguccgugaucacgccgggcaccaacaccagcaaccaggucgccgugcuguaccaggacgugaacugcaccgagguccccguggccauccacgccgaccagcugacgcccaccuggcggguguacuccaccggcagcaacgucuuccagacccgcgccgggugccucaucggcgcggagcacgugaacaacuccuacgagugcgacauccccaucggggccggcaucugcgccagcuaccagacgcagaccaacuccccgcggcgcgcccggagcguggcgucccagagcaucaucgccuacaccaugucccugggcgccgagaacagcgucgccuacuccaacaacagcaucgccauccccaccaacuucacgaucuccgugaccaccgagauccugcccgugagcaugaccaagacgagcgucgacugcaccauguacaucugcggggacuccaccgagugcagcaaccuccugcugcaguacggcuccuucugcacccagcucaaccgcgcgcugacggggaucgccguggagcaggacaagaacacccaggagguguucgcccaggucaagcagaucuacaagacgcccccgaucaaggacuucggcggguucaacuucagccagauccugcccgaccccuccaagcccagcaagcgguccuucaucgaggaccuccuguucaacaaggugacccuggccgacgccggcuucaucaagcaguacggcgacugccucggggacaucgcggcccgcgaccugaucugcgcccagaaguucaacggccugaccgugcucccgccccugcugaccgacgagaugaucgcccaguacaccagcgcccuccuggcggggaccaucacguccggcuggaccuucgggugcggcgccgcccugcagauccccuucgcgaugcagauggccuaccgguucaacggcaucggggucacccagaacgugcucuacgagaaccagaagcugaucgccaaccaguucaacagcgccaucggcaagauccaggacucccugagcuccaccgccagcgcgcucgggaagcugcaggacguggucaaccagaacgcccaggcccugaacacgcucgugaagcagcuguccagcaacuucggcgccaucuccagcgugcugaacgacauccucucccgccuggacaaggucgaggccgaggugcagaucgaccggcugaucaccgggcgccuccagagccugcagaccuacgugacccagcagcugauccgggcggccgagauccgcgccagcgccaaccucgccgcgaccaagauguccgagugcguccugggccagagcaagcggugcgacuucugcggcaagggguaccaccugauguccuucccccagagcgccccgcacggcguggucuuccuccacgugacguacguccccgcccaggagaagaacuucaccaccgcccccgcgaucugccacgacgggaaggcccacuucccccgcgagggcguguucguguccaacgggacccacugguucgucacgcagcggaacuucuacgagccgcagaucaucaccaccgacaacaccuucgugagcggcaacugcgacguggucaucggcaucgugaacaacacgguguacgacccccugcagcccgagcuggacuccuucaaggaggagcucgacaaguacuucaagaaccacaccagccccgacgucgaccugggggacaucuccggcaucaacgccagcguggugaacauccagaaggagaucgaccgccugaacgaggucgccaagaaccucaacgagucccugaucgaccugcaggagcucgggaaguacgagcaguacaucaagggcgggggcgggagcgacaucaucaagcuccugaacgagcaggucaacaaggagaugcaguccagcaaccuguacauguccaugagcuccuggugcuacacccacagccucgacggcgccgggcuguuccuguucgaccacgccgcggaggaguacgagcacgccaagaagcucaucaucuuccugaacgagaacaacgugcccgugcagcugaccuccaucagcgccccggagcacaaguucgagggccucacgcagaucuuccagaaggccuacgagcacgagcagcacaucuccgagagcaucaacaacaucguggaccacgccaucaaguccaaggaccacgcgaccuucaacuuccugcagugguacgucgccgagcagcacgaggaggaggugcuguucaaggacauccucgacaagaucgagcugaucgggaacgagaaccacggccuguaccucgccgaccaguacgugaaggggaucgccaagagccgcaaguccuga

SEQ ID NO: 11876 - RNA, 4140 nt, Artificial Sequence
  SARS-CoV-2/Wuhan/WIV05/2019__EPI_ISL_402128 spike protein CDS gc (1-1211)(T874C_S1055C) Ferritin construct
auguucguguuccugguccuccugccccuggugagcucccagugcgugaaccucaccacccgcacgcagcugccgcccgccuacaccaacagcuucacccggggcgucuacuaccccgacaagguguuccgcuccagcgugcugcacuccacccaggaccucuuccugcccuucuucagcaacgucacgugguuccacgccauccacguguccgggaccaacggcaccaagcgguucgacaacccggugcugcccuucaacgacggggucuacuucgcgagcaccgagaaguccaacaucauccgcggcuggaucuucgggacgacccucgacagcaagacccagucccugcugaucgugaacaacgccaccaacguggucaucaaggugugcgaguuccaguucugcaacgaccccuuccucggcguguacuaccacaagaacaacaagagcuggauggaguccgaguuccgggucuacagcuccgccaacaacugcacguucgaguacgugagccagcccuuccugauggaccuggagggcaagcaggggaacuucaagaaccuccgcgaguucguguucaagaacaucgacggcuacuucaagaucuacuccaagcacaccccgaucaaccugguccgggaccugccccagggguucagcgcccucgagccccugguggaccugcccaucggcaucaacaucacccgcuuccagacccuccuggcccugcaccgguccuaccucacgccgggggacagcagcuccggcuggaccgcgggcgccgccgccuacuacgugggguaccugcagccccgcaccuuccugcucaaguacaacgagaacggcaccaucacggacgcggucgacugcgcccuggacccccugagcgagaccaagugcacccucaaguccuucaccguggagaaggggaucuaccagacgagcaacuuccgggugcagcccaccgaguccaucguccgcuucccgaacaucaccaaccugugccccuucggcgagguguucaacgccacccgguucgccagcgucuacgccuggaaccgcaagcggaucuccaacugcguggcggacuacagcgugcuguacaacuccgccagcuucuccacguucaagugcuacggcgucagccccaccaagcucaacgaccugugcuucaccaacguguacgccgacuccuucgugauccgcggggacgagguccggcagaucgcccccggccagaccgggaagaucgccgacuacaacuacaagcugccggacgacuucacgggcugcgugaucgcguggaacagcaacaaccucgacuccaaggucgggggcaacuacaacuaccuguaccgccuguuccgcaagagcaaccucaagcccuucgagcgggacaucuccaccgagaucuaccaggccggcagcacccccugcaacgggguggagggcuucaacugcuacuucccccugcaguccuacggguuccagccgaccaacggcgugggguaccagcccuaccggguggucgugcugagcuucgagcuccugcacgcccccgccacggugugcggccccaagaaguccaccaaccuggucaagaacaagugcgugaacuucaacuucaacggccucaccgggaccggcgugcugaccgagagcaacaagaaguuccugccguuccagcaguucgggcgcgacaucgccgacacgaccgacgcgguccgcgacccccagacccuggagauccucgacaucacccccugcagcuucggcgggguguccgugaucacgccgggcaccaacaccagcaaccaggucgccgugcuguaccaggacgugaacugcaccgagguccccguggccauccacgccgaccagcugacgcccaccuggcggguguacuccaccggcagcaacgucuuccagacccgcgccgggugccucaucggcgcggagcacgugaacaacuccuacgagugcgacauccccaucggggccggcaucugcgccagcuaccagacgcagaccaacuccccgcggcgcgcccggagcguggcgucccagagcaucaucgccuacaccaugucccugggcgccgagaacagcgucgccuacuccaacaacagcaucgccauccccaccaacuucacgaucuccgugaccaccgagauccugcccgugagcaugaccaagacgagcgucgacugcaccauguacaucugcggggacuccaccgagugcagcaaccuccugcugcaguacggcuccuucugcacccagcucaaccgcgcgcugacggggaucgccguggagcaggacaagaacacccaggagguguucgcccaggucaagcagaucuacaagacgcccccgaucaaggacuucggcggguucaacuucagccagauccugcccgaccccuccaagcccagcaagcgguccuucaucgaggaccuccuguucaacaaggugacccuggccgacgccggcuucaucaagcaguacggcgacugccucggggacaucgcggcccgcgaccugaucugcgcccagaaguucaacggccugaccgugcucccgccccugcugaccgacgagaugaucgcccaguacugcagcgcccuccuggcggggaccaucacguccggcuggaccuucggggccggcgccgcccugcagauccccuucgcgaugcagauggccuaccgguucaacggcaucggggucacccagaacgugcucuacgagaaccagaagcugaucgccaaccaguucaacagcgccaucggcaagauccaggacucccugagcuccaccgccagcgcgcucgggaagcugcaggacguggucaaccagaacgcccaggcccugaacacgcucgugaagcagcuguccagcaacuucggcgccaucuccagcgugcugaacgacauccucucccgccuggacaaggucgaggccgaggugcagaucgaccggcugaucaccgggcgccuccagagccugcagaccuacgugacccagcagcugauccgggcggccgagauccgcgccagcgccaaccucgccgcgaccaagauguccgagugcguccugggccagagcaagcggguggacuucugcggcaagggguaccaccugauguccuucccccagugcgccccgcacggcguggucuuccuccacgugacguacguccccgcccaggagaagaacuucaccaccgcccccgcgaucugccacgacgggaaggcccacuucccccgcgagggcguguucguguccaacgggacccacugguucgucacgcagcggaacuucuacgagccgcagaucaucaccaccgacaacaccuucgugagcggcaacugcgacguggucaucggcaucgugaacaacacgguguacgacccccugcagcccgagcuggacuccuucaaggaggagcucgacaaguacuucaagaaccacaccagccccgacgucgaccugggggacaucuccggcaucaacgccagcguggugaacauccagaaggagaucgaccgccugaacgaggucgccaagaaccucaacgagucccugaucgaccugcaggagcucgggaaguacgagcaguacaucaagggcgggggcgggagcgacaucaucaagcuccugaacgagcaggucaacaaggagaugcaguccagcaaccuguacauguccaugagcuccuggugcuacacccacagccucgacggcgccgggcuguuccuguucgaccacgccgcggaggaguacgagcacgccaagaagcucaucaucuuccugaacgagaacaacgugcccgugcagcugaccuccaucagcgccccggagcacaaguucgagggccucacgcagaucuuccagaaggccuacgagcacgagcagcacaucuccgagagcaucaacaacaucguggaccacgccaucaaguccaaggaccacgcgaccuucaacuuccugcagugguacgucgccgagcagcacgaggaggaggugcuguucaaggacauccucgacaagaucgagcugaucgggaacgagaaccacggccuguaccucgccgaccaguacgugaaggggaucgccaagagccgcaaguccuga

SEQ ID NO: 11877 - RNA, 3726 nt, Artificial Sequence
  SARS-CoV-2/Wuhan/WIV05/2019__EPI_ISL_402128 spike protein CDS gc (1-1211) Foldon construct
auguucguguuccugguccuccugccccuggugagcucccagugcgugaaccucaccacccgcacgcagcugccgcccgccuacaccaacagcuucacccggggcgucuacuaccccgacaagguguuccgcuccagcgugcugcacuccacccaggaccucuuccugcccuucuucagcaacgucacgugguuccacgccauccacguguccgggaccaacggcaccaagcgguucgacaacccggugcugcccuucaacgacggggucuacuucgcgagcaccgagaaguccaacaucauccgcggcuggaucuucgggacgacccucgacagcaagacccagucccugcugaucgugaacaacgccaccaacguggucaucaaggugugcgaguuccaguucugcaacgaccccuuccucggcguguacuaccacaagaacaacaagagcuggauggaguccgaguuccgggucuacagcuccgccaacaacugcacguucgaguacgugagccagcccuuccugauggaccuggagggcaagcaggggaacuucaagaaccuccgcgaguucguguucaagaacaucgacggcuacuucaagaucuacuccaagcacaccccgaucaaccugguccgggaccugccccagggguucagcgcccucgagccccugguggaccugcccaucggcaucaacaucacccgcuuccagacccuccuggcccugcaccgguccuaccucacgccgggggacagcagcuccggcuggaccgcgggcgccgccgccuacuacgugggguaccugcagccccgcaccuuccugcucaaguacaacgagaacggcaccaucacggacgcggucgacugcgcccuggacccccugagcgagaccaagugcacccucaaguccuucaccguggagaaggggaucuaccagacgagcaacuuccgggugcagcccaccgaguccaucguccgcuucccgaacaucaccaaccugugccccuucggcgagguguucaacgccacccgguucgccagcgucuacgccuggaaccgcaagcggaucuccaacugcguggcggacuacagcgugcuguacaacuccgccagcuucuccacguucaagugcuacggcgucagccccaccaagcucaacgaccugugcuucaccaacguguacgccgacuccuucgugauccgcggggacgagguccggcagaucgcccccggccagaccgggaagaucgccgacuacaacuacaagcugccggacgacuucacgggcugcgugaucgcguggaacagcaacaaccucgacuccaaggucgggggcaacuacaacuaccuguaccgccuguuccgcaagagcaaccucaagcccuucgagcgggacaucuccaccgagaucuaccaggccggcagcacccccugcaacgggguggagggcuucaacugcuacuucccccugcaguccuacggguuccagccgaccaacggcgugggguaccagcccuaccggguggucgugcugagcuucgagcuccugcacgcccccgccacggugugcggccccaagaaguccaccaaccuggucaagaacaagugcgugaacuucaacuucaacggccucaccgggaccggcgugcugaccgagagcaacaagaaguuccugccguuccagcaguucgggcgcgacaucgccgacacgaccgacgcgguccgcgacccccagacccuggagauccucgacaucacccccugcagcuucggcgggguguccgugaucacgccgggcaccaacaccagcaaccaggucgccgugcuguaccaggacgugaacugcaccgagguccccguggccauccacgccgaccagcugacgcccaccuggcggguguacuccaccggcagcaacgucuuccagacccgcgccgggugccucaucggcgcggagcacgugaacaacuccuacgagugcgacauccccaucggggccggcaucugcgccagcuaccagacgcagaccaacuccccgcggcgcgcccggagcguggcgucccagagcaucaucgccuacaccaugucccugggcgccgagaacagcgucgccuacuccaacaacagcaucgccauccccaccaacuucacgaucuccgugaccaccgagauccugcccgugagcaugaccaagacgagcgucgacugcaccauguacaucugcggggacuccaccgagugcagcaaccuccugcugcaguacggcuccuucugcacccagcucaaccgcgcgcugacggggaucgccguggagcaggacaagaacacccaggagguguucgcccaggucaagcagaucuacaagacgcccccgaucaaggacuucggcggguucaacuucagccagauccugcccgaccccuccaagcccagcaagcgguccuucaucgaggaccuccuguucaacaaggugacccuggccgacgccggcuucaucaagcaguacggcgacugccucggggacaucgcggcccgcgaccugaucugcgcccagaaguucaacggccugaccgugcucccgccccugcugaccgacgagaugaucgcccaguacaccagcgcccuccuggcggggaccaucacguccggcuggaccuucggggccggcgccgcccugcagauccccuucgcgaugcagauggccuaccgguucaacggcaucggggucacccagaacgugcucuacgagaaccagaagcugaucgccaaccaguucaacagcgccaucggcaagauccaggacucccugagcuccaccgccagcgcgcucgggaagcugcaggacguggucaaccagaacgcccaggcccugaacacgcucgugaagcagcuguccagcaacuucggcgccaucuccagcgugcugaacgacauccucucccgccuggacaaggucgaggccgaggugcagaucgaccggcugaucaccgggcgccuccagagccugcagaccuacgugacccagcagcugauccgggcggccgagauccgcgccagcgccaaccucgccgcgaccaagauguccgagugcguccugggccagagcaagcggguggacuucugcggcaagggguaccaccugauguccuucccccagagcgccccgcacggcguggucuuccuccacgugacguacguccccgcccaggagaagaacuucaccaccgcccccgcgaucugccacgacgggaaggcccacuucccccgcgagggcguguucguguccaacgggacccacugguucgucacgcagcggaacuucuacgagccgcagaucaucaccaccgacaacaccuucgugagcggcaacugcgacguggucaucggcaucgugaacaacacgguguacgacccccugcagcccgagcuggacuccuucaaggaggagcucgacaaguacuucaagaaccacaccagccccgacgucgaccugggggacaucuccggcaucaacgccagcguggugaacauccagaaggagaucgaccgccugaacgaggucgccaagaaccucaacgagucccugaucgaccugcaggagcucgggaaguacgagcaguacaucaagggcgggagcggcuacauccccgaggccccgcgcgacgggcaggccuacgugcggaaggacggcgaguggguccugcucagcaccuuccuguga

SEQ ID NO: 11878 - RNA, 3726 nt, Artificial Sequence
  SARS-CoV-2/Wuhan/WIV05/2019__EPI_ISL_402128 spike protein CDS gc (1-1211)(K986P_V987P) Foldon construct
auguucguguuccugguccuccugccccuggugagcucccagugcgugaaccucaccacccgcacgcagcugccgcccgccuacaccaacagcuucacccggggcgucuacuaccccgacaagguguuccgcuccagcgugcugcacuccacccaggaccucuuccugcccuucuucagcaacgucacgugguuccacgccauccacguguccgggaccaacggcaccaagcgguucgacaacccggugcugcccuucaacgacggggucuacuucgcgagcaccgagaaguccaacaucauccgcggcuggaucuucgggacgacccucgacagcaagacccagucccugcugaucgugaacaacgccaccaacguggucaucaaggugugcgaguuccaguucugcaacgaccccuuccucggcguguacuaccacaagaacaacaagagcuggauggaguccgaguuccgggucuacagcuccgccaacaacugcacguucgaguacgugagccagcccuuccugauggaccuggagggcaagcaggggaacuucaagaaccuccgcgaguucguguucaagaacaucgacggcuacuucaagaucuacuccaagcacaccccgaucaaccugguccgggaccugccccagggguucagcgcccucgagccccugguggaccugcccaucggcaucaacaucacccgcuuccagacccuccuggcccugcaccgguccuaccucacgccgggggacagcagcuccggcuggaccgcgggcgccgccgccuacuacgugggguaccugcagccccgcaccuuccugcucaaguacaacgagaacggcaccaucacggacgcggucgacugcgcccuggacccccugagcgagaccaagugcacccucaaguccuucaccguggagaaggggaucuaccagacgagcaacuuccgggugcagcccaccgaguccaucguccgcuucccgaacaucaccaaccugugccccuucggcgagguguucaacgccacccgguucgccagcgucuacgccuggaaccgcaagcggaucuccaacugcguggcggacuacagcgugcuguacaacuccgccagcuucuccacguucaagugcuacggcgucagccccaccaagcucaacgaccugugcuucaccaacguguacgccgacuccuucgugauccgcggggacgagguccggcagaucgcccccggccagaccgggaagaucgccgacuacaacuacaagcugccggacgacuucacgggcugcgugaucgcguggaacagcaacaaccucgacuccaaggucgggggcaacuacaacuaccuguaccgccuguuccgcaagagcaaccucaagcccuucgagcgggacaucuccaccgagaucuaccaggccggcagcacccccugcaacgggguggagggcuucaacugcuacuucccccugcaguccuacggguuccagccgaccaacggcgugggguaccagcccuaccggguggucgugcugagcuucgagcuccugcacgcccccgccacggugugcggccccaagaaguccaccaaccuggucaagaacaagugcgugaacuucaacuucaacggccucaccgggaccggcgugcugaccgagagcaacaagaaguuccugccguuccagcaguucgggcgcgacaucgccgacacgaccgacgcgguccgcgacccccagacccuggagauccucgacaucacccccugcagcuucggcgggguguccgugaucacgccgggcaccaacaccagcaaccaggucgccgugcuguaccaggacgugaacugcaccgagguccccguggccauccacgccgaccagcugacgcccaccuggcggguguacuccaccggcagcaacgucuuccagacccgcgccgggugccucaucggcgcggagcacgugaacaacuccuacgagugcgacauccccaucggggccggcaucugcgccagcuaccagacgcagaccaacuccccgcggcgcgcccggagcguggcgucccagagcaucaucgccuacaccaugucccugggcgccgagaacagcgucgccuacuccaacaacagcaucgccauccccaccaacuucacgaucuccgugaccaccgagauccugcccgugagcaugaccaagacgagcgucgacugcaccauguacaucugcggggacuccaccgagugcagcaaccuccugcugcaguacggcuccuucugcacccagcucaaccgcgcgcugacggggaucgccguggagcaggacaagaacacccaggagguguucgcccaggucaagcagaucuacaagacgcccccgaucaaggacuucggcggguucaacuucagccagauccugcccgaccccuccaagcccagcaagcgguccuucaucgaggaccuccuguucaacaaggugacccuggccgacgccggcuucaucaagcaguacggcgacugccucggggacaucgcggcccgcgaccugaucugcgcccagaaguucaacggccugaccgugcucccgccccugcugaccgacgagaugaucgcccaguacaccagcgcccuccuggcggggaccaucacguccggcuggaccuucggggccggcgccgcccugcagauccccuucgcgaugcagauggccuaccgguucaacggcaucggggucacccagaacgugcucuacgagaaccagaagcugaucgccaaccaguucaacagcgccaucggcaagauccaggacucccugagcuccaccgccagcgcgcucgggaagcugcaggacguggucaaccagaacgcccaggcccugaacacgcucgugaagcagcuguccagcaacuucggcgccaucuccagcgugcugaacgacauccucucccgccuggacccgcccgaggccgaggugcagaucgaccggcugaucaccgggcgccuccagagccugcagaccuacgugacccagcagcugauccgggcggccgagauccgcgccagcgccaaccucgccgcgaccaagauguccgagugcguccugggccagagcaagcggguggacuucugcggcaagggguaccaccugauguccuucccccagagcgccccgcacggcguggucuuccuccacgugacguacguccccgcccaggagaagaacuucaccaccgcccccgcgaucugccacgacgggaaggcccacuucccccgcgagggcguguucguguccaacgggacccacugguucgucacgcagcggaacuucuacgagccgcagaucaucaccaccgacaacaccuucgugagcggcaacugcgacguggucaucggcaucgugaacaacacgguguacgacccccugcagcccgagcuggacuccuucaaggaggagcucgacaaguacuucaagaaccacaccagccccgacgucgaccugggggacaucuccggcaucaacgccagcguggugaacauccagaaggagaucgaccgccugaacgaggucgccaagaaccucaacgagucccugaucgaccugcaggagcucgggaaguacgagcaguacaucaagggcgggagcggcuacauccccgaggccccgcgcgacgggcaggccuacgugcggaaggacggcgaguggguccugcucagcaccuuccuguga

SEQ ID NO: 11879 - RNA, 3726 nt, Artificial Sequence
  SARS-CoV-2/Wuhan/WIV05/2019__EPI_ISL_402128 spike protein CDS gc (1-1211)(K986P_V987P_T887WN_A1020W) Foldon construct
auguucguguuccugguccuccugccccuggugagcucccagugcgugaaccucaccacccgcacgcagcugccgcccgccuacaccaacagcuucacccggggcgucuacuaccccgacaagguguuccgcuccagcgugcugcacuccacccaggaccucuuccugcccuucuucagcaacgucacgugguuccacgccauccacguguccgggaccaacggcaccaagcgguucgacaacccggugcugcccuucaacgacggggucuacuucgcgagcaccgagaaguccaacaucauccgcggcuggaucuucgggacgacccucgacagcaagacccagucccugcugaucgugaacaacgccaccaacguggucaucaaggugugcgaguuccaguucugcaacgaccccuuccucggcguguacuaccacaagaacaacaagagcuggauggaguccgaguuccgggucuacagcuccgccaacaacugcacguucgaguacgugagccagcccuuccugauggaccuggagggcaagcaggggaacuucaagaaccuccgcgaguucguguucaagaacaucgacggcuacuucaagaucuacuccaagcacaccccgaucaaccugguccgggaccugccccagggguucagcgcccucgagccccugguggaccugcccaucggcaucaacaucacccgcuuccagacccuccuggcccugcaccgguccuaccucacgccgggggacagcagcuccggcuggaccgcgggcgccgccgccuacuacgugggguaccugcagccccgcaccuuccugcucaaguacaacgagaacggcaccaucacggacgcggucgacugcgcccuggacccccugagcgagaccaagugcacccucaaguccuucaccguggagaaggggaucuaccagacgagcaacuuccgggugcagcccaccgaguccaucguccgcuucccgaacaucaccaaccugugccccuucggcgagguguucaacgccacccgguucgccagcgucuacgccuggaaccgcaagcggaucuccaacugcguggcggacuacagcgugcuguacaacuccgccagcuucuccacguucaagugcuacggcgucagccccaccaagcucaacgaccugugcuucaccaacguguacgccgacuccuucgugauccgcggggacgagguccggcagaucgcccccggccagaccgggaagaucgccgacuacaacuacaagcugccggacgacuucacgggcugcgugaucgcguggaacagcaacaaccucgacuccaaggucgggggcaacuacaacuaccuguaccgccuguuccgcaagagcaaccucaagcccuucgagcgggacaucuccaccgagaucuaccaggccggcagcacccccugcaacgggguggagggcuucaacugcuacuucccccugcaguccuacggguuccagccgaccaacggcgugggguaccagcccuaccggguggucgugcugagcuucgagcuccugcacgcccccgccacggugugcggccccaagaaguccaccaaccuggucaagaacaagugcgugaacuucaacuucaacggccucaccgggaccggcgugcugaccgagagcaacaagaaguuccugccguuccagcaguucgggcgcgacaucgccgacacgaccgacgcgguccgcgacccccagacccuggagauccucgacaucacccccugcagcuucggcgggguguccgugaucacgccgggcaccaacaccagcaaccaggucgccgugcuguaccaggacgugaacugcaccgagguccccguggccauccacgccgaccagcugacgcccaccuggcggguguacuccaccggcagcaacgucuuccagacccgcgccgggugccucaucggcgcggagcacgugaacaacuccuacgagugcgacauccccaucggggccggcaucugcgccagcuaccagacgcagaccaacuccccgcggcgcgcccggagcguggcgucccagagcaucaucgccuacaccaugucccugggcgccgagaacagcgucgccuacuccaacaacagcaucgccauccccaccaacuucacgaucuccgugaccaccgagauccugcccgugagcaugaccaagacgagcgucgacugcaccauguacaucugcggggacuccaccgagugcagcaaccuccugcugcaguacggcuccuucugcacccagcucaaccgcgcgcugacggggaucgccguggagcaggacaagaacacccaggagguguucgcccaggucaagcagaucuacaagacgcccccgaucaaggacuucggcggguucaacuucagccagauccugcccgaccccuccaagcccagcaagcgguccuucaucgaggaccuccuguucaacaaggugacccuggccgacgccggcuucaucaagcaguacggcgacugccucggggacaucgcggcccgcgaccugaucugcgcccagaaguucaacggccugaccgugcucccgccccugcugaccgacgagaugaucgcccaguacaccagcgcccuccuggcggggaccaucacguccggcuggugguucggggccggcgccgcccugcagauccccuucgcgaugcagauggccuaccgguucaacggcaucggggucacccagaacgugcucuacgagaaccagaagcugaucgccaaccaguucaacagcgccaucggcaagauccaggacucccugagcuccaccgccagcgcgcucgggaagcugcaggacguggucaaccagaacgcccaggcccugaacacgcucgugaagcagcuguccagcaacuucggcgccaucuccagcgugcugaacgacauccucucccgccuggacccgcccgaggccgaggugcagaucgaccggcugaucaccgggcgccuccagagccugcagaccuacgugacccagcagcugauccgggcggccgagauccgcuggagcgccaaccucgccgcgaccaagauguccgagugcguccugggccagagcaagcggguggacuucugcggcaagggguaccaccugauguccuucccccagagcgccccgcacggcguggucuuccuccacgugacguacguccccgcccaggagaagaacuucaccaccgcccccgcgaucugccacgacgggaaggcccacuucccccgcgagggcguguucguguccaacgggacccacugguucgucacgcagcggaacuucuacgagccgcagaucaucaccaccgacaacaccuucgugagcggcaacugcgacguggucaucggcaucgugaacaacacgguguacgacccccugcagcccgagcuggacuccuucaaggaggagcucgacaaguacuucaagaaccacaccagccccgacgucgaccugggggacaucuccggcaucaacgccagcguggugaacauccagaaggagaucgaccgccugaacgaggucgccaagaaccucaacgagucccugaucgaccugcaggagcucgggaaguacgagcaguacaucaagggcgggagcggcuacauccccgaggccccgcgcgacgggcaggccuacgugcggaaggacggcgaguggguccugcucagcaccuuccuguga

SEQ ID NO: 11880 - RNA, 3726 nt, Artificial Sequence
  SARS-CoV-2/Wuhan/WIV05/2019__EPI_ISL_402128 spike protein CDS gc (1-1211)(K986P_V987P_P1069F) Foldon construct
auguucguguuccugguccuccugccccuggugagcucccagugcgugaaccucaccacccgcacgcagcugccgcccgccuacaccaacagcuucacccggggcgucuacuaccccgacaagguguuccgcuccagcgugcugcacuccacccaggaccucuuccugcccuucuucagcaacgucacgugguuccacgccauccacguguccgggaccaacggcaccaagcgguucgacaacccggugcugcccuucaacgacggggucuacuucgcgagcaccgagaaguccaacaucauccgcggcuggaucuucgggacgacccucgacagcaagacccagucccugcugaucgugaacaacgccaccaacguggucaucaaggugugcgaguuccaguucugcaacgaccccuuccucggcguguacuaccacaagaacaacaagagcuggauggaguccgaguuccgggucuacagcuccgccaacaacugcacguucgaguacgugagccagcccuuccugauggaccuggagggcaagcaggggaacuucaagaaccuccgcgaguucguguucaagaacaucgacggcuacuucaagaucuacuccaagcacaccccgaucaaccugguccgggaccugccccagggguucagcgcccucgagccccugguggaccugcccaucggcaucaacaucacccgcuuccagacccuccuggcccugcaccgguccuaccucacgccgggggacagcagcuccggcuggaccgcgggcgccgccgccuacuacgugggguaccugcagccccgcaccuuccugcucaaguacaacgagaacggcaccaucacggacgcggucgacugcgcccuggacccccugagcgagaccaagugcacccucaaguccuucaccguggagaaggggaucuaccagacgagcaacuuccgggugcagcccaccgaguccaucguccgcuucccgaacaucaccaaccugugccccuucggcgagguguucaacgccacccgguucgccagcgucuacgccuggaaccgcaagcggaucuccaacugcguggcggacuacagcgugcuguacaacuccgccagcuucuccacguucaagugcuacggcgucagccccaccaagcucaacgaccugugcuucaccaacguguacgccgacuccuucgugauccgcggggacgagguccggcagaucgcccccggccagaccgggaagaucgccgacuacaacuacaagcugccggacgacuucacgggcugcgugaucgcguggaacagcaacaaccucgacuccaaggucgggggcaacuacaacuaccuguaccgccuguuccgcaagagcaaccucaagcccuucgagcgggacaucuccaccgagaucuaccaggccggcagcacccccugcaacgggguggagggcuucaacugcuacuucccccugcaguccuacggguuccagccgaccaacggcgugggguaccagcccuaccggguggucgugcugagcuucgagcuccugcacgcccccgccacggugugcggccccaagaaguccaccaaccuggucaagaacaagugcgugaacuucaacuucaacggccucaccgggaccggcgugcugaccgagagcaacaagaaguuccugccguuccagcaguucgggcgcgacaucgccgacacgaccgacgcgguccgcgacccccagacccuggagauccucgacaucacccccugcagcuucggcgggguguccgugaucacgccgggcaccaacaccagcaaccaggucgccgugcuguaccaggacgugaacugcaccgagguccccguggccauccacgccgaccagcugacgcccaccuggcggguguacuccaccggcagcaacgucuuccagacccgcgccgggugccucaucggcgcggagcacgugaacaacuccuacgagugcgacauccccaucggggccggcaucugcgccagcuaccagacgcagaccaacuccccgcggcgcgcccggagcguggcgucccagagcaucaucgccuacaccaugucccugggcgccgagaacagcgucgccuacuccaacaacagcaucgccauccccaccaacuucacgaucuccgugaccaccgagauccugcccgugagcaugaccaagacgagcgucgacugcaccauguacaucugcggggacuccaccgagugcagcaaccuccugcugcaguacggcuccuucugcacccagcucaaccgcgcgcugacggggaucgccguggagcaggacaagaacacccaggagguguucgcccaggucaagcagaucuacaagacgcccccgaucaaggacuucggcggguucaacuucagccagauccugcccgaccccuccaagcccagcaagcgguccuucaucgaggaccuccuguucaacaaggugacccuggccgacgccggcuucaucaagcaguacggcgacugccucggggacaucgcggcccgcgaccugaucugcgcccagaaguucaacggccugaccgugcucccgccccugcugaccgacgagaugaucgcccaguacaccagcgcccuccuggcggggaccaucacguccggcuggaccuucggggccggcgccgcccugcagauccccuucgcgaugcagauggccuaccgguucaacggcaucggggucacccagaacgugcucuacgagaaccagaagcugaucgccaaccaguucaacagcgccaucggcaagauccaggacucccugagcuccaccgccagcgcgcucgggaagcugcaggacguggucaaccagaacgcccaggcccugaacacgcucgugaagcagcuguccagcaacuucggcgccaucuccagcgugcugaacgacauccucucccgccuggacccgcccgaggccgaggugcagaucgaccggcugaucaccgggcgccuccagagccugcagaccuacgugacccagcagcugauccgggcggccgagauccgcgccagcgccaaccucgccgcgaccaagauguccgagugcguccugggccagagcaagcggguggacuucugcggcaagggguaccaccugauguccuucccccagagcgccccgcacggcguggucuuccuccacgugacguacgucuucgcccaggagaagaacuucaccaccgcccccgcgaucugccacgacgggaaggcccacuucccccgcgagggcguguucguguccaacgggacccacugguucgucacgcagcggaacuucuacgagccgcagaucaucaccaccgacaacaccuucgugagcggcaacugcgacguggucaucggcaucgugaacaacacgguguacgacccccugcagcccgagcuggacuccuucaaggaggagcucgacaaguacuucaagaaccacaccagccccgacgucgaccugggggacaucuccggcaucaacgccagcguggugaacauccagaaggagaucgaccgccugaacgaggucgccaagaaccucaacgagucccugaucgaccugcaggagcucgggaaguacgagcaguacaucaagggcgggagcggcuacauccccgaggccccgcgcgacgggcaggccuacgugcggaaggacggcgaguggguccugcucagcaccuuccuguga

SEQ ID NO: 11881 - RNA, 3726 nt, Artificial Sequence
  SARS-CoV-2/Wuhan/WIV05/2019__EPI_ISL_402128 spike protein CDS gc (1-1211)(K986P_V987P_ H1048Q_H1064N_ H1083N_H1101N) Foldon construct
auguucguguuccugguccuccugccccuggugagcucccagugcgugaaccucaccacccgcacgcagcugccgcccgccuacaccaacagcuucacccggggcgucuacuaccccgacaagguguuccgcuccagcgugcugcacuccacccaggaccucuuccugcccuucuucagcaacgucacgugguuccacgccauccacguguccgggaccaacggcaccaagcgguucgacaacccggugcugcccuucaacgacggggucuacuucgcgagcaccgagaaguccaacaucauccgcggcuggaucuucgggacgacccucgacagcaagacccagucccugcugaucgugaacaacgccaccaacguggucaucaaggugugcgaguuccaguucugcaacgaccccuuccucggcguguacuaccacaagaacaacaagagcuggauggaguccgaguuccgggucuacagcuccgccaacaacugcacguucgaguacgugagccagcccuuccugauggaccuggagggcaagcaggggaacuucaagaaccuccgcgaguucguguucaagaacaucgacggcuacuucaagaucuacuccaagcacaccccgaucaaccugguccgggaccugccccagggguucagcgcccucgagccccugguggaccugcccaucggcaucaacaucacccgcuuccagacccuccuggcccugcaccgguccuaccucacgccgggggacagcagcuccggcuggaccgcgggcgccgccgccuacuacgugggguaccugcagccccgcaccuuccugcucaaguacaacgagaacggcaccaucacggacgcggucgacugcgcccuggacccccugagcgagaccaagugcacccucaaguccuucaccguggagaaggggaucuaccagacgagcaacuuccgggugcagcccaccgaguccaucguccgcuucccgaacaucaccaaccugugccccuucggcgagguguucaacgccacccgguucgccagcgucuacgccuggaaccgcaagcggaucuccaacugcguggcggacuacagcgugcuguacaacuccgccagcuucuccacguucaagugcuacggcgucagccccaccaagcucaacgaccugugcuucaccaacguguacgccgacuccuucgugauccgcggggacgagguccggcagaucgcccccggccagaccgggaagaucgccgacuacaacuacaagcugccggacgacuucacgggcugcgugaucgcguggaacagcaacaaccucgacuccaaggucgggggcaacuacaacuaccuguaccgccuguuccgcaagagcaaccucaagcccuucgagcgggacaucuccaccgagaucuaccaggccggcagcacccccugcaacgggguggagggcuucaacugcuacuucccccugcaguccuacggguuccagccgaccaacggcgugggguaccagcccuaccggguggucgugcugagcuucgagcuccugcacgcccccgccacggugugcggccccaagaaguccaccaaccuggucaagaacaagugcgugaacuucaacuucaacggccucaccgggaccggcgugcugaccgagagcaacaagaaguuccugccguuccagcaguucgggcgcgacaucgccgacacgaccgacgcgguccgcgacccccagacccuggagauccucgacaucacccccugcagcuucggcgggguguccgugaucacgccgggcaccaacaccagcaaccaggucgccgugcuguaccaggacgugaacugcaccgagguccccguggccauccacgccgaccagcugacgcccaccuggcggguguacuccaccggcagcaacgucuuccagacccgcgccgggugccucaucggcgcggagcacgugaacaacuccuacgagugcgacauccccaucggggccggcaucugcgccagcuaccagacgcagaccaacuccccgcggcgcgcccggagcguggcgucccagagcaucaucgccuacaccaugucccugggcgccgagaacagcgucgccuacuccaacaacagcaucgccauccccaccaacuucacgaucuccgugaccaccgagauccugcccgugagcaugaccaagacgagcgucgacugcaccauguacaucugcggggacuccaccgagugcagcaaccuccugcugcaguacggcuccuucugcacccagcucaaccgcgcgcugacggggaucgccguggagcaggacaagaacacccaggagguguucgcccaggucaagcagaucuacaagacgcccccgaucaaggacuucggcggguucaacuucagccagauccugcccgaccccuccaagcccagcaagcgguccuucaucgaggaccuccuguucaacaaggugacccuggccgacgccggcuucaucaagcaguacggcgacugccucggggacaucgcggcccgcgaccugaucugcgcccagaaguucaacggccugaccgugcucccgccccugcugaccgacgagaugaucgcccaguacaccagcgcccuccuggcggggaccaucacguccggcuggaccuucggggccggcgccgcccugcagauccccuucgcgaugcagauggccuaccgguucaacggcaucggggucacccagaacgugcucuacgagaaccagaagcugaucgccaaccaguucaacagcgccaucggcaagauccaggacucccugagcuccaccgccagcgcgcucgggaagcugcaggacguggucaaccagaacgcccaggcccugaacacgcucgugaagcagcuguccagcaacuucggcgccaucuccagcgugcugaacgacauccucucccgccuggacccgcccgaggccgaggugcagaucgaccggcugaucaccgggcgccuccagagccugcagaccuacgugacccagcagcugauccgggcggccgagauccgcgccagcgccaaccucgccgcgaccaagauguccgagugcguccugggccagagcaagcggguggacuucugcggcaagggguaccagcugauguccuucccccagagcgccccgcacggcguggucuuccucaacgugacguacguccccgcccaggagaagaacuucaccaccgcccccgcgaucugcaacgacgggaaggcccacuucccccgcgagggcguguucguguccaacgggaccaacugguucgucacgcagcggaacuucuacgagccgcagaucaucaccaccgacaacaccuucgugagcggcaacugcgacguggucaucggcaucgugaacaacacgguguacgacccccugcagcccgagcuggacuccuucaaggaggagcucgacaaguacuucaagaaccacaccagccccgacgucgaccugggggacaucuccggcaucaacgccagcguggugaacauccagaaggagaucgaccgccugaacgaggucgccaagaaccucaacgagucccugaucgaccugcaggagcucgggaaguacgagcaguacaucaagggcgggagcggcuacauccccgaggccccgcgcgacgggcaggccuacgugcggaaggacggcgaguggguccugcucagcaccuuccuguga

SEQ ID NO: 11882 - RNA, 3726 nt, Artificial Sequence
  SARS-CoV-2/Wuhan/WIV05/2019__EPI_ISL_402128 spike protein CDS gc (1-1211)(I712C_T1077C) Foldon construct
auguucguguuccugguccuccugccccuggugagcucccagugcgugaaccucaccacccgcacgcagcugccgcccgccuacaccaacagcuucacccggggcgucuacuaccccgacaagguguuccgcuccagcgugcugcacuccacccaggaccucuuccugcccuucuucagcaacgucacgugguuccacgccauccacguguccgggaccaacggcaccaagcgguucgacaacccggugcugcccuucaacgacggggucuacuucgcgagcaccgagaaguccaacaucauccgcggcuggaucuucgggacgacccucgacagcaagacccagucccugcugaucgugaacaacgccaccaacguggucaucaaggugugcgaguuccaguucugcaacgaccccuuccucggcguguacuaccacaagaacaacaagagcuggauggaguccgaguuccgggucuacagcuccgccaacaacugcacguucgaguacgugagccagcccuuccugauggaccuggagggcaagcaggggaacuucaagaaccuccgcgaguucguguucaagaacaucgacggcuacuucaagaucuacuccaagcacaccccgaucaaccugguccgggaccugccccagggguucagcgcccucgagccccugguggaccugcccaucggcaucaacaucacccgcuuccagacccuccuggcccugcaccgguccuaccucacgccgggggacagcagcuccggcuggaccgcgggcgccgccgccuacuacgugggguaccugcagccccgcaccuuccugcucaaguacaacgagaacggcaccaucacggacgcggucgacugcgcccuggacccccugagcgagaccaagugcacccucaaguccuucaccguggagaaggggaucuaccagacgagcaacuuccgggugcagcccaccgaguccaucguccgcuucccgaacaucaccaaccugugccccuucggcgagguguucaacgccacccgguucgccagcgucuacgccuggaaccgcaagcggaucuccaacugcguggcggacuacagcgugcuguacaacuccgccagcuucuccacguucaagugcuacggcgucagccccaccaagcucaacgaccugugcuucaccaacguguacgccgacuccuucgugauccgcggggacgagguccggcagaucgcccccggccagaccgggaagaucgccgacuacaacuacaagcugccggacgacuucacgggcugcgugaucgcguggaacagcaacaaccucgacuccaaggucgggggcaacuacaacuaccuguaccgccuguuccgcaagagcaaccucaagcccuucgagcgggacaucuccaccgagaucuaccaggccggcagcacccccugcaacgggguggagggcuucaacugcuacuucccccugcaguccuacggguuccagccgaccaacggcgugggguaccagcccuaccggguggucgugcugagcuucgagcuccugcacgcccccgccacggugugcggccccaagaaguccaccaaccuggucaagaacaagugcgugaacuucaacuucaacggccucaccgggaccggcgugcugaccgagagcaacaagaaguuccugccguuccagcaguucgggcgcgacaucgccgacacgaccgacgcgguccgcgacccccagacccuggagauccucgacaucacccccugcagcuucggcgggguguccgugaucacgccgggcaccaacaccagcaaccaggucgccgugcuguaccaggacgugaacugcaccgagguccccguggccauccacgccgaccagcugacgcccaccuggcggguguacuccaccggcagcaacgucuuccagacccgcgccgggugccucaucggcgcggagcacgugaacaacuccuacgagugcgacauccccaucggggccggcaucugcgccagcuaccagacgcagaccaacuccccgcggcgcgcccggagcguggcgucccagagcaucaucgccuacaccaugucccugggcgccgagaacagcgucgccuacuccaacaacagcugcgccauccccaccaacuucacgaucuccgugaccaccgagauccugcccgugagcaugaccaagacgagcgucgacugcaccauguacaucugcggggacuccaccgagugcagcaaccuccugcugcaguacggcuccuucugcacccagcucaaccgcgcgcugacggggaucgccguggagcaggacaagaacacccaggagguguucgcccaggucaagcagaucuacaagacgcccccgaucaaggacuucggcggguucaacuucagccagauccugcccgaccccuccaagcccagcaagcgguccuucaucgaggaccuccuguucaacaaggugacccuggccgacgccggcuucaucaagcaguacggcgacugccucggggacaucgcggcccgcgaccugaucugcgcccagaaguucaacggccugaccgugcucccgccccugcugaccgacgagaugaucgcccaguacaccagcgcccuccuggcggggaccaucacguccggcuggaccuucggggccggcgccgcccugcagauccccuucgcgaugcagauggccuaccgguucaacggcaucggggucacccagaacgugcucuacgagaaccagaagcugaucgccaaccaguucaacagcgccaucggcaagauccaggacucccugagcuccaccgccagcgcgcucgggaagcugcaggacguggucaaccagaacgcccaggcccugaacacgcucgugaagcagcuguccagcaacuucggcgccaucuccagcgugcugaacgacauccucucccgccuggacaaggucgaggccgaggugcagaucgaccggcugaucaccgggcgccuccagagccugcagaccuacgugacccagcagcugauccgggcggccgagauccgcgccagcgccaaccucgccgcgaccaagauguccgagugcguccugggccagagcaagcggguggacuucugcggcaagggguaccaccugauguccuucccccagagcgccccgcacggcguggucuuccuccacgugacguacguccccgcccaggagaagaacuucaccugcgcccccgcgaucugccacgacgggaaggcccacuucccccgcgagggcguguucguguccaacgggacccacugguucgucacgcagcggaacuucuacgagccgcagaucaucaccaccgacaacaccuucgugagcggcaacugcgacguggucaucggcaucgugaacaacacgguguacgacccccugcagcccgagcuggacuccuucaaggaggagcucgacaaguacuucaagaaccacaccagccccgacgucgaccugggggacaucuccggcaucaacgccagcguggugaacauccagaaggagaucgaccgccugaacgaggucgccaagaaccucaacgagucccugaucgaccugcaggagcucgggaaguacgagcaguacaucaagggcgggagcggcuacauccccgaggccccgcgcgacgggcaggccuacgugcggaaggacggcgaguggguccugcucagcaccuuccuguga

SEQ ID NO: 11883 - RNA, 3726 nt, Artificial Sequence
  SARS-CoV-2/Wuhan/WIV05/2019__EPI_ISL_402128 spike protein CDS gc (1-1211)(I714C_Y1110C) Foldon construct
auguucguguuccugguccuccugccccuggugagcucccagugcgugaaccucaccacccgcacgcagcugccgcccgccuacaccaacagcuucacccggggcgucuacuaccccgacaagguguuccgcuccagcgugcugcacuccacccaggaccucuuccugcccuucuucagcaacgucacgugguuccacgccauccacguguccgggaccaacggcaccaagcgguucgacaacccggugcugcccuucaacgacggggucuacuucgcgagcaccgagaaguccaacaucauccgcggcuggaucuucgggacgacccucgacagcaagacccagucccugcugaucgugaacaacgccaccaacguggucaucaaggugugcgaguuccaguucugcaacgaccccuuccucggcguguacuaccacaagaacaacaagagcuggauggaguccgaguuccgggucuacagcuccgccaacaacugcacguucgaguacgugagccagcccuuccugauggaccuggagggcaagcaggggaacuucaagaaccuccgcgaguucguguucaagaacaucgacggcuacuucaagaucuacuccaagcacaccccgaucaaccugguccgggaccugccccagggguucagcgcccucgagccccugguggaccugcccaucggcaucaacaucacccgcuuccagacccuccuggcccugcaccgguccuaccucacgccgggggacagcagcuccggcuggaccgcgggcgccgccgccuacuacgugggguaccugcagccccgcaccuuccugcucaaguacaacgagaacggcaccaucacggacgcggucgacugcgcccuggacccccugagcgagaccaagugcacccucaaguccuucaccguggagaaggggaucuaccagacgagcaacuuccgggugcagcccaccgaguccaucguccgcuucccgaacaucaccaaccugugccccuucggcgagguguucaacgccacccgguucgccagcgucuacgccuggaaccgcaagcggaucuccaacugcguggcggacuacagcgugcuguacaacuccgccagcuucuccacguucaagugcuacggcgucagccccaccaagcucaacgaccugugcuucaccaacguguacgccgacuccuucgugauccgcggggacgagguccggcagaucgcccccggccagaccgggaagaucgccgacuacaacuacaagcugccggacgacuucacgggcugcgugaucgcguggaacagcaacaaccucgacuccaaggucgggggcaacuacaacuaccuguaccgccuguuccgcaagagcaaccucaagcccuucgagcgggacaucuccaccgagaucuaccaggccggcagcacccccugcaacgggguggagggcuucaacugcuacuucccccugcaguccuacggguuccagccgaccaacggcgugggguaccagcccuaccggguggucgugcugagcuucgagcuccugcacgcccccgccacggugugcggccccaagaaguccaccaaccuggucaagaacaagugcgugaacuucaacuucaacggccucaccgggaccggcgugcugaccgagagcaacaagaaguuccugccguuccagcaguucgggcgcgacaucgccgacacgaccgacgcgguccgcgacccccagacccuggagauccucgacaucacccccugcagcuucggcgggguguccgugaucacgccgggcaccaacaccagcaaccaggucgccgugcuguaccaggacgugaacugcaccgagguccccguggccauccacgccgaccagcugacgcccaccuggcggguguacuccaccggcagcaacgucuuccagacccgcgccgggugccucaucggcgcggagcacgugaacaacuccuacgagugcgacauccccaucggggccggcaucugcgccagcuaccagacgcagaccaacuccccgcggcgcgcccggagcguggcgucccagagcaucaucgccuacaccaugucccugggcgccgagaacagcgucgccuacuccaacaacagcaucgccugccccaccaacuucacgaucuccgugaccaccgagauccugcccgugagcaugaccaagacgagcgucgacugcaccauguacaucugcggggacuccaccgagugcagcaaccuccugcugcaguacggcuccuucugcacccagcucaaccgcgcgcugacggggaucgccguggagcaggacaagaacacccaggagguguucgcccaggucaagcagaucuacaagacgcccccgaucaaggacuucggcggguucaacuucagccagauccugcccgaccccuccaagcccagcaagcgguccuucaucgaggaccuccuguucaacaaggugacccuggccgacgccggcuucaucaagcaguacggcgacugccucggggacaucgcggcccgcgaccugaucugcgcccagaaguucaacggccugaccgugcucccgccccugcugaccgacgagaugaucgcccaguacaccagcgcccuccuggcggggaccaucacguccggcuggaccuucggggccggcgccgcccugcagauccccuucgcgaugcagauggccuaccgguucaacggcaucggggucacccagaacgugcucuacgagaaccagaagcugaucgccaaccaguucaacagcgccaucggcaagauccaggacucccugagcuccaccgccagcgcgcucgggaagcugcaggacguggucaaccagaacgcccaggcccugaacacgcucgugaagcagcuguccagcaacuucggcgccaucuccagcgugcugaacgacauccucucccgccuggacaaggucgaggccgaggugcagaucgaccggcugaucaccgggcgccuccagagccugcagaccuacgugacccagcagcugauccgggcggccgagauccgcgccagcgccaaccucgccgcgaccaagauguccgagugcguccugggccagagcaagcggguggacuucugcggcaagggguaccaccugauguccuucccccagagcgccccgcacggcguggucuuccuccacgugacguacguccccgcccaggagaagaacuucaccaccgcccccgcgaucugccacgacgggaaggcccacuucccccgcgagggcguguucguguccaacgggacccacugguucgucacgcagcggaacuucugcgagccgcagaucaucaccaccgacaacaccuucgugagcggcaacugcgacguggucaucggcaucgugaacaacacgguguacgacccccugcagcccgagcuggacuccuucaaggaggagcucgacaaguacuucaagaaccacaccagccccgacgucgaccugggggacaucuccggcaucaacgccagcguggugaacauccagaaggagaucgaccgccugaacgaggucgccaagaaccucaacgagucccugaucgaccugcaggagcucgggaaguacgagcaguacaucaagggcgggagcggcuacauccccgaggccccgcgcgacgggcaggccuacgugcggaaggacggcgaguggguccugcucagcaccuuccuguga

SEQ ID NO: 11884 - RNA, 3726 nt, Artificial Sequence
  SARS-CoV-2/Wuhan/WIV05/2019__EPI_ISL_402128 spike protein CDS gc (1-1211)(P715C_P1069C) Foldon construct
auguucguguuccugguccuccugccccuggugagcucccagugcgugaaccucaccacccgcacgcagcugccgcccgccuacaccaacagcuucacccggggcgucuacuaccccgacaagguguuccgcuccagcgugcugcacuccacccaggaccucuuccugcccuucuucagcaacgucacgugguuccacgccauccacguguccgggaccaacggcaccaagcgguucgacaacccggugcugcccuucaacgacggggucuacuucgcgagcaccgagaaguccaacaucauccgcggcuggaucuucgggacgacccucgacagcaagacccagucccugcugaucgugaacaacgccaccaacguggucaucaaggugugcgaguuccaguucugcaacgaccccuuccucggcguguacuaccacaagaacaacaagagcuggauggaguccgaguuccgggucuacagcuccgccaacaacugcacguucgaguacgugagccagcccuuccugauggaccuggagggcaagcaggggaacuucaagaaccuccgcgaguucguguucaagaacaucgacggcuacuucaagaucuacuccaagcacaccccgaucaaccugguccgggaccugccccagggguucagcgcccucgagccccugguggaccugcccaucggcaucaacaucacccgcuuccagacccuccuggcccugcaccgguccuaccucacgccgggggacagcagcuccggcuggaccgcgggcgccgccgccuacuacgugggguaccugcagccccgcaccuuccugcucaaguacaacgagaacggcaccaucacggacgcggucgacugcgcccuggacccccugagcgagaccaagugcacccucaaguccuucaccguggagaaggggaucuaccagacgagcaacuuccgggugcagcccaccgaguccaucguccgcuucccgaacaucaccaaccugugccccuucggcgagguguucaacgccacccgguucgccagcgucuacgccuggaaccgcaagcggaucuccaacugcguggcggacuacagcgugcuguacaacuccgccagcuucuccacguucaagugcuacggcgucagccccaccaagcucaacgaccugugcuucaccaacguguacgccgacuccuucgugauccgcggggacgagguccggcagaucgcccccggccagaccgggaagaucgccgacuacaacuacaagcugccggacgacuucacgggcugcgugaucgcguggaacagcaacaaccucgacuccaaggucgggggcaacuacaacuaccuguaccgccuguuccgcaagagcaaccucaagcccuucgagcgggacaucuccaccgagaucuaccaggccggcagcacccccugcaacgggguggagggcuucaacugcuacuucccccugcaguccuacggguuccagccgaccaacggcgugggguaccagcccuaccggguggucgugcugagcuucgagcuccugcacgcccccgccacggugugcggccccaagaaguccaccaaccuggucaagaacaagugcgugaacuucaacuucaacggccucaccgggaccggcgugcugaccgagagcaacaagaaguuccugccguuccagcaguucgggcgcgacaucgccgacacgaccgacgcgguccgcgacccccagacccuggagauccucgacaucacccccugcagcuucggcgggguguccgugaucacgccgggcaccaacaccagcaaccaggucgccgugcuguaccaggacgugaacugcaccgagguccccguggccauccacgccgaccagcugacgcccaccuggcggguguacuccaccggcagcaacgucuuccagacccgcgccgggugccucaucggcgcggagcacgugaacaacuccuacgagugcgacauccccaucggggccggcaucugcgccagcuaccagacgcagaccaacuccccgcggcgcgcccggagcguggcgucccagagcaucaucgccuacaccaugucccugggcgccgagaacagcgucgccuacuccaacaacagcaucgccaucugcaccaacuucacgaucuccgugaccaccgagauccugcccgugagcaugaccaagacgagcgucgacugcaccauguacaucugcggggacuccaccgagugcagcaaccuccugcugcaguacggcuccuucugcacccagcucaaccgcgcgcugacggggaucgccguggagcaggacaagaacacccaggagguguucgcccaggucaagcagaucuacaagacgcccccgaucaaggacuucggcggguucaacuucagccagauccugcccgaccccuccaagcccagcaagcgguccuucaucgaggaccuccuguucaacaaggugacccuggccgacgccggcuucaucaagcaguacggcgacugccucggggacaucgcggcccgcgaccugaucugcgcccagaaguucaacggccugaccgugcucccgccccugcugaccgacgagaugaucgcccaguacaccagcgcccuccuggcggggaccaucacguccggcuggaccuucggggccggcgccgcccugcagauccccuucgcgaugcagauggccuaccgguucaacggcaucggggucacccagaacgugcucuacgagaaccagaagcugaucgccaaccaguucaacagcgccaucggcaagauccaggacucccugagcuccaccgccagcgcgcucgggaagcugcaggacguggucaaccagaacgcccaggcccugaacacgcucgugaagcagcuguccagcaacuucggcgccaucuccagcgugcugaacgacauccucucccgccuggacaaggucgaggccgaggugcagaucgaccggcugaucaccgggcgccuccagagccugcagaccuacgugacccagcagcugauccgggcggccgagauccgcgccagcgccaaccucgccgcgaccaagauguccgagugcguccugggccagagcaagcggguggacuucugcggcaagggguaccaccugauguccuucccccagagcgccccgcacggcguggucuuccuccacgugacguacgucugcgcccaggagaagaacuucaccaccgcccccgcgaucugccacgacgggaaggcccacuucccccgcgagggcguguucguguccaacgggacccacugguucgucacgcagcggaacuucuacgagccgcagaucaucaccaccgacaacaccuucgugagcggcaacugcgacguggucaucggcaucgugaacaacacgguguacgacccccugcagcccgagcuggacuccuucaaggaggagcucgacaaguacuucaagaaccacaccagccccgacgucgaccugggggacaucuccggcaucaacgccagcguggugaacauccagaaggagaucgaccgccugaacgaggucgccaagaaccucaacgagucccugaucgaccugcaggagcucgggaaguacgagcaguacaucaagggcgggagcggcuacauccccgaggccccgcgcgacgggcaggccuacgugcggaaggacggcgaguggguccugcucagcaccuuccuguga

SEQ ID NO: 11885 - RNA, 3726 nt, Artificial Sequence
  SARS-CoV-2/Wuhan/WIV05/2019__EPI_ISL_402128 spike protein CDS gc (1-1211)(G889C_L1034C) Foldon construct
auguucguguuccugguccuccugccccuggugagcucccagugcgugaaccucaccacccgcacgcagcugccgcccgccuacaccaacagcuucacccggggcgucuacuaccccgacaagguguuccgcuccagcgugcugcacuccacccaggaccucuuccugcccuucuucagcaacgucacgugguuccacgccauccacguguccgggaccaacggcaccaagcgguucgacaacccggugcugcccuucaacgacggggucuacuucgcgagcaccgagaaguccaacaucauccgcggcuggaucuucgggacgacccucgacagcaagacccagucccugcugaucgugaacaacgccaccaacguggucaucaaggugugcgaguuccaguucugcaacgaccccuuccucggcguguacuaccacaagaacaacaagagcuggauggaguccgaguuccgggucuacagcuccgccaacaacugcacguucgaguacgugagccagcccuuccugauggaccuggagggcaagcaggggaacuucaagaaccuccgcgaguucguguucaagaacaucgacggcuacuucaagaucuacuccaagcacaccccgaucaaccugguccgggaccugccccagggguucagcgcccucgagccccugguggaccugcccaucggcaucaacaucacccgcuuccagacccuccuggcccugcaccgguccuaccucacgccgggggacagcagcuccggcuggaccgcgggcgccgccgccuacuacgugggguaccugcagccccgcaccuuccugcucaaguacaacgagaacggcaccaucacggacgcggucgacugcgcccuggacccccugagcgagaccaagugcacccucaaguccuucaccguggagaaggggaucuaccagacgagcaacuuccgggugcagcccaccgaguccaucguccgcuucccgaacaucaccaaccugugccccuucggcgagguguucaacgccacccgguucgccagcgucuacgccuggaaccgcaagcggaucuccaacugcguggcggacuacagcgugcuguacaacuccgccagcuucuccacguucaagugcuacggcgucagccccaccaagcucaacgaccugugcuucaccaacguguacgccgacuccuucgugauccgcggggacgagguccggcagaucgcccccggccagaccgggaagaucgccgacuacaacuacaagcugccggacgacuucacgggcugcgugaucgcguggaacagcaacaaccucgacuccaaggucgggggcaacuacaacuaccuguaccgccuguuccgcaagagcaaccucaagcccuucgagcgggacaucuccaccgagaucuaccaggccggcagcacccccugcaacgggguggagggcuucaacugcuacuucccccugcaguccuacggguuccagccgaccaacggcgugggguaccagcccuaccggguggucgugcugagcuucgagcuccugcacgcccccgccacggugugcggccccaagaaguccaccaaccuggucaagaacaagugcgugaacuucaacuucaacggccucaccgggaccggcgugcugaccgagagcaacaagaaguuccugccguuccagcaguucgggcgcgacaucgccgacacgaccgacgcgguccgcgacccccagacccuggagauccucgacaucacccccugcagcuucggcgggguguccgugaucacgccgggcaccaacaccagcaaccaggucgccgugcuguaccaggacgugaacugcaccgagguccccguggccauccacgccgaccagcugacgcccaccuggcggguguacuccaccggcagcaacgucuuccagacccgcgccgggugccucaucggcgcggagcacgugaacaacuccuacgagugcgacauccccaucggggccggcaucugcgccagcuaccagacgcagaccaacuccccgcggcgcgcccggagcguggcgucccagagcaucaucgccuacaccaugucccugggcgccgagaacagcgucgccuacuccaacaacagcaucgccauccccaccaacuucacgaucuccgugaccaccgagauccugcccgugagcaugaccaagacgagcgucgacugcaccauguacaucugcggggacuccaccgagugcagcaaccuccugcugcaguacggcuccuucugcacccagcucaaccgcgcgcugacggggaucgccguggagcaggacaagaacacccaggagguguucgcccaggucaagcagaucuacaagacgcccccgaucaaggacuucggcggguucaacuucagccagauccugcccgaccccuccaagcccagcaagcgguccuucaucgaggaccuccuguucaacaaggugacccuggccgacgccggcuucaucaagcaguacggcgacugccucggggacaucgcggcccgcgaccugaucugcgcccagaaguucaacggccugaccgugcucccgccccugcugaccgacgagaugaucgcccaguacaccagcgcccuccuggcggggaccaucacguccggcuggaccuucugcgccggcgccgcccugcagauccccuucgcgaugcagauggccuaccgguucaacggcaucggggucacccagaacgugcucuacgagaaccagaagcugaucgccaaccaguucaacagcgccaucggcaagauccaggacucccugagcuccaccgccagcgcgcucgggaagcugcaggacguggucaaccagaacgcccaggcccugaacacgcucgugaagcagcuguccagcaacuucggcgccaucuccagcgugcugaacgacauccucucccgccuggacaaggucgaggccgaggugcagaucgaccggcugaucaccgggcgccuccagagccugcagaccuacgugacccagcagcugauccgggcggccgagauccgcgccagcgccaaccucgccgcgaccaagauguccgagugcgucugcggccagagcaagcggguggacuucugcggcaagggguaccaccugauguccuucccccagagcgccccgcacggcguggucuuccuccacgugacguacguccccgcccaggagaagaacuucaccaccgcccccgcgaucugccacgacgggaaggcccacuucccccgcgagggcguguucguguccaacgggacccacugguucgucacgcagcggaacuucuacgagccgcagaucaucaccaccgacaacaccuucgugagcggcaacugcgacguggucaucggcaucgugaacaacacgguguacgacccccugcagcccgagcuggacuccuucaaggaggagcucgacaaguacuucaagaaccacaccagccccgacgucgaccugggggacaucuccggcaucaacgccagcguggugaacauccagaaggagaucgaccgccugaacgaggucgccaagaaccucaacgagucccugaucgaccugcaggagcucgggaaguacgagcaguacaucaagggcgggagcggcuacauccccgaggccccgcgcgacgggcaggccuacgugcggaaggacggcgaguggguccugcucagcaccuuccuguga

SEQ ID NO: 11886 - RNA, 3726 nt, Artificial Sequence
  SARS-CoV-2/Wuhan/WIV05/2019__EPI_ISL_402128 spike protein CDS gc (1-1211)(I909C_Y1047C) Foldon construct
auguucguguuccugguccuccugccccuggugagcucccagugcgugaaccucaccacccgcacgcagcugccgcccgccuacaccaacagcuucacccggggcgucuacuaccccgacaagguguuccgcuccagcgugcugcacuccacccaggaccucuuccugcccuucuucagcaacgucacgugguuccacgccauccacguguccgggaccaacggcaccaagcgguucgacaacccggugcugcccuucaacgacggggucuacuucgcgagcaccgagaaguccaacaucauccgcggcuggaucuucgggacgacccucgacagcaagacccagucccugcugaucgugaacaacgccaccaacguggucaucaaggugugcgaguuccaguucugcaacgaccccuuccucggcguguacuaccacaagaacaacaagagcuggauggaguccgaguuccgggucuacagcuccgccaacaacugcacguucgaguacgugagccagcccuuccugauggaccuggagggcaagcaggggaacuucaagaaccuccgcgaguucguguucaagaacaucgacggcuacuucaagaucuacuccaagcacaccccgaucaaccugguccgggaccugccccagggguucagcgcccucgagccccugguggaccugcccaucggcaucaacaucacccgcuuccagacccuccuggcccugcaccgguccuaccucacgccgggggacagcagcuccggcuggaccgcgggcgccgccgccuacuacgugggguaccugcagccccgcaccuuccugcucaaguacaacgagaacggcaccaucacggacgcggucgacugcgcccuggacccccugagcgagaccaagugcacccucaaguccuucaccguggagaaggggaucuaccagacgagcaacuuccgggugcagcccaccgaguccaucguccgcuucccgaacaucaccaaccugugccccuucggcgagguguucaacgccacccgguucgccagcgucuacgccuggaaccgcaagcggaucuccaacugcguggcggacuacagcgugcuguacaacuccgccagcuucuccacguucaagugcuacggcgucagccccaccaagcucaacgaccugugcuucaccaacguguacgccgacuccuucgugauccgcggggacgagguccggcagaucgcccccggccagaccgggaagaucgccgacuacaacuacaagcugccggacgacuucacgggcugcgugaucgcguggaacagcaacaaccucgacuccaaggucgggggcaacuacaacuaccuguaccgccuguuccgcaagagcaaccucaagcccuucgagcgggacaucuccaccgagaucuaccaggccggcagcacccccugcaacgggguggagggcuucaacugcuacuucccccugcaguccuacggguuccagccgaccaacggcgugggguaccagcccuaccggguggucgugcugagcuucgagcuccugcacgcccccgccacggugugcggccccaagaaguccaccaaccuggucaagaacaagugcgugaacuucaacuucaacggccucaccgggaccggcgugcugaccgagagcaacaagaaguuccugccguuccagcaguucgggcgcgacaucgccgacacgaccgacgcgguccgcgacccccagacccuggagauccucgacaucacccccugcagcuucggcgggguguccgugaucacgccgggcaccaacaccagcaaccaggucgccgugcuguaccaggacgugaacugcaccgagguccccguggccauccacgccgaccagcugacgcccaccuggcggguguacuccaccggcagcaacgucuuccagacccgcgccgggugccucaucggcgcggagcacgugaacaacuccuacgagugcgacauccccaucggggccggcaucugcgccagcuaccagacgcagaccaacuccccgcggcgcgcccggagcguggcgucccagagcaucaucgccuacaccaugucccugggcgccgagaacagcgucgccuacuccaacaacagcaucgccauccccaccaacuucacgaucuccgugaccaccgagauccugcccgugagcaugaccaagacgagcgucgacugcaccauguacaucugcggggacuccaccgagugcagcaaccuccugcugcaguacggcuccuucugcacccagcucaaccgcgcgcugacggggaucgccguggagcaggacaagaacacccaggagguguucgcccaggucaagcagaucuacaagacgcccccgaucaaggacuucggcggguucaacuucagccagauccugcccgaccccuccaagcccagcaagcgguccuucaucgaggaccuccuguucaacaaggugacccuggccgacgccggcuucaucaagcaguacggcgacugccucggggacaucgcggcccgcgaccugaucugcgcccagaaguucaacggccugaccgugcucccgccccugcugaccgacgagaugaucgcccaguacaccagcgcccuccuggcggggaccaucacguccggcuggaccuucggggccggcgccgcccugcagauccccuucgcgaugcagauggccuaccgguucaacggcugcggggucacccagaacgugcucuacgagaaccagaagcugaucgccaaccaguucaacagcgccaucggcaagauccaggacucccugagcuccaccgccagcgcgcucgggaagcugcaggacguggucaaccagaacgcccaggcccugaacacgcucgugaagcagcuguccagcaacuucggcgccaucuccagcgugcugaacgacauccucucccgccuggacaaggucgaggccgaggugcagaucgaccggcugaucaccgggcgccuccagagccugcagaccuacgugacccagcagcugauccgggcggccgagauccgcgccagcgccaaccucgccgcgaccaagauguccgagugcguccugggccagagcaagcggguggacuucugcggcaaggggugccaccugauguccuucccccagagcgccccgcacggcguggucuuccuccacgugacguacguccccgcccaggagaagaacuucaccaccgcccccgcgaucugccacgacgggaaggcccacuucccccgcgagggcguguucguguccaacgggacccacugguucgucacgcagcggaacuucuacgagccgcagaucaucaccaccgacaacaccuucgugagcggcaacugcgacguggucaucggcaucgugaacaacacgguguacgacccccugcagcccgagcuggacuccuucaaggaggagcucgacaaguacuucaagaaccacaccagccccgacgucgaccugggggacaucuccggcaucaacgccagcguggugaacauccagaaggagaucgaccgccugaacgaggucgccaagaaccucaacgagucccugaucgaccugcaggagcucgggaaguacgagcaguacaucaagggcgggagcggcuacauccccgaggccccgcgcgacgggcaggccuacgugcggaaggacggcgaguggguccugcucagcaccuuccuguga

SEQ ID NO: 11887 - RNA, 3726 nt, Artificial Sequence
  SARS-CoV-2/Wuhan/WIV05/2019__EPI_ISL_402128 spike protein CDS gc (1-1211)(Q965C_S1003C) Foldon construct
auguucguguuccugguccuccugccccuggugagcucccagugcgugaaccucaccacccgcacgcagcugccgcccgccuacaccaacagcuucacccggggcgucuacuaccccgacaagguguuccgcuccagcgugcugcacuccacccaggaccucuuccugcccuucuucagcaacgucacgugguuccacgccauccacguguccgggaccaacggcaccaagcgguucgacaacccggugcugcccuucaacgacggggucuacuucgcgagcaccgagaaguccaacaucauccgcggcuggaucuucgggacgacccucgacagcaagacccagucccugcugaucgugaacaacgccaccaacguggucaucaaggugugcgaguuccaguucugcaacgaccccuuccucggcguguacuaccacaagaacaacaagagcuggauggaguccgaguuccgggucuacagcuccgccaacaacugcacguucgaguacgugagccagcccuuccugauggaccuggagggcaagcaggggaacuucaagaaccuccgcgaguucguguucaagaacaucgacggcuacuucaagaucuacuccaagcacaccccgaucaaccugguccgggaccugccccagggguucagcgcccucgagccccugguggaccugcccaucggcaucaacaucacccgcuuccagacccuccuggcccugcaccgguccuaccucacgccgggggacagcagcuccggcuggaccgcgggcgccgccgccuacuacgugggguaccugcagccccgcaccuuccugcucaaguacaacgagaacggcaccaucacggacgcggucgacugcgcccuggacccccugagcgagaccaagugcacccucaaguccuucaccguggagaaggggaucuaccagacgagcaacuuccgggugcagcccaccgaguccaucguccgcuucccgaacaucaccaaccugugccccuucggcgagguguucaacgccacccgguucgccagcgucuacgccuggaaccgcaagcggaucuccaacugcguggcggacuacagcgugcuguacaacuccgccagcuucuccacguucaagugcuacggcgucagccccaccaagcucaacgaccugugcuucaccaacguguacgccgacuccuucgugauccgcggggacgagguccggcagaucgcccccggccagaccgggaagaucgccgacuacaacuacaagcugccggacgacuucacgggcugcgugaucgcguggaacagcaacaaccucgacuccaaggucgggggcaacuacaacuaccuguaccgccuguuccgcaagagcaaccucaagcccuucgagcgggacaucuccaccgagaucuaccaggccggcagcacccccugcaacgggguggagggcuucaacugcuacuucccccugcaguccuacggguuccagccgaccaacggcgugggguaccagcccuaccggguggucgugcugagcuucgagcuccugcacgcccccgccacggugugcggccccaagaaguccaccaaccuggucaagaacaagugcgugaacuucaacuucaacggccucaccgggaccggcgugcugaccgagagcaacaagaaguuccugccguuccagcaguucgggcgcgacaucgccgacacgaccgacgcgguccgcgacccccagacccuggagauccucgacaucacccccugcagcuucggcgggguguccgugaucacgccgggcaccaacaccagcaaccaggucgccgugcuguaccaggacgugaacugcaccgagguccccguggccauccacgccgaccagcugacgcccaccuggcggguguacuccaccggcagcaacgucuuccagacccgcgccgggugccucaucggcgcggagcacgugaacaacuccuacgagugcgacauccccaucggggccggcaucugcgccagcuaccagacgcagaccaacuccccgcggcgcgcccggagcguggcgucccagagcaucaucgccuacaccaugucccugggcgccgagaacagcgucgccuacuccaacaacagcaucgccauccccaccaacuucacgaucuccgugaccaccgagauccugcccgugagcaugaccaagacgagcgucgacugcaccauguacaucugcggggacuccaccgagugcagcaaccuccugcugcaguacggcuccuucugcacccagcucaaccgcgcgcugacggggaucgccguggagcaggacaagaacacccaggagguguucgcccaggucaagcagaucuacaagacgcccccgaucaaggacuucggcggguucaacuucagccagauccugcccgaccccuccaagcccagcaagcgguccuucaucgaggaccuccuguucaacaaggugacccuggccgacgccggcuucaucaagcaguacggcgacugccucggggacaucgcggcccgcgaccugaucugcgcccagaaguucaacggccugaccgugcucccgccccugcugaccgacgagaugaucgcccaguacaccagcgcccuccuggcggggaccaucacguccggcuggaccuucggggccggcgccgcccugcagauccccuucgcgaugcagauggccuaccgguucaacggcaucggggucacccagaacgugcucuacgagaaccagaagcugaucgccaaccaguucaacagcgccaucggcaagauccaggacucccugagcuccaccgccagcgcgcucgggaagcugcaggacguggucaaccagaacgcccaggcccugaacacgcucgugaagugccuguccagcaacuucggcgccaucuccagcgugcugaacgacauccucucccgccuggacaaggucgaggccgaggugcagaucgaccggcugaucaccgggcgccuccagugccugcagaccuacgugacccagcagcugauccgggcggccgagauccgcgccagcgccaaccucgccgcgaccaagauguccgagugcguccugggccagagcaagcggguggacuucugcggcaagggguaccaccugauguccuucccccagagcgccccgcacggcguggucuuccuccacgugacguacguccccgcccaggagaagaacuucaccaccgcccccgcgaucugccacgacgggaaggcccacuucccccgcgagggcguguucguguccaacgggacccacugguucgucacgcagcggaacuucuacgagccgcagaucaucaccaccgacaacaccuucgugagcggcaacugcgacguggucaucggcaucgugaacaacacgguguacgacccccugcagcccgagcuggacuccuucaaggaggagcucgacaaguacuucaagaaccacaccagccccgacgucgaccugggggacaucuccggcaucaacgccagcguggugaacauccagaaggagaucgaccgccugaacgaggucgccaagaaccucaacgagucccugaucgaccugcaggagcucgggaaguacgagcaguacaucaagggcgggagcggcuacauccccgaggccccgcgcgacgggcaggccuacgugcggaaggacggcgaguggguccugcucagcaccuuccuguga

SEQ ID NO: 11888 - RNA, 3726 nt, Artificial Sequence
  SARS-CoV-2/Wuhan/WIV05/2019__EPI_ISL_402128 spike protein CDS gc (1-1211)(F970C_G999C) Foldon construct
auguucguguuccugguccuccugccccuggugagcucccagugcgugaaccucaccacccgcacgcagcugccgcccgccuacaccaacagcuucacccggggcgucuacuaccccgacaagguguuccgcuccagcgugcugcacuccacccaggaccucuuccugcccuucuucagcaacgucacgugguuccacgccauccacguguccgggaccaacggcaccaagcgguucgacaacccggugcugcccuucaacgacggggucuacuucgcgagcaccgagaaguccaacaucauccgcggcuggaucuucgggacgacccucgacagcaagacccagucccugcugaucgugaacaacgccaccaacguggucaucaaggugugcgaguuccaguucugcaacgaccccuuccucggcguguacuaccacaagaacaacaagagcuggauggaguccgaguuccgggucuacagcuccgccaacaacugcacguucgaguacgugagccagcccuuccugauggaccuggagggcaagcaggggaacuucaagaaccuccgcgaguucguguucaagaacaucgacggcuacuucaagaucuacuccaagcacaccccgaucaaccugguccgggaccugccccagggguucagcgcccucgagccccugguggaccugcccaucggcaucaacaucacccgcuuccagacccuccuggcccugcaccgguccuaccucacgccgggggacagcagcuccggcuggaccgcgggcgccgccgccuacuacgugggguaccugcagccccgcaccuuccugcucaaguacaacgagaacggcaccaucacggacgcggucgacugcgcccuggacccccugagcgagaccaagugcacccucaaguccuucaccguggagaaggggaucuaccagacgagcaacuuccgggugcagcccaccgaguccaucguccgcuucccgaacaucaccaaccugugccccuucggcgagguguucaacgccacccgguucgccagcgucuacgccuggaaccgcaagcggaucuccaacugcguggcggacuacagcgugcuguacaacuccgccagcuucuccacguucaagugcuacggcgucagccccaccaagcucaacgaccugugcuucaccaacguguacgccgacuccuucgugauccgcggggacgagguccggcagaucgcccccggccagaccgggaagaucgccgacuacaacuacaagcugccggacgacuucacgggcugcgugaucgcguggaacagcaacaaccucgacuccaaggucgggggcaacuacaacuaccuguaccgccuguuccgcaagagcaaccucaagcccuucgagcgggacaucuccaccgagaucuaccaggccggcagcacccccugcaacgggguggagggcuucaacugcuacuucccccugcaguccuacggguuccagccgaccaacggcgugggguaccagcccuaccggguggucgugcugagcuucgagcuccugcacgcccccgccacggugugcggccccaagaaguccaccaaccuggucaagaacaagugcgugaacuucaacuucaacggccucaccgggaccggcgugcugaccgagagcaacaagaaguuccugccguuccagcaguucgggcgcgacaucgccgacacgaccgacgcgguccgcgacccccagacccuggagauccucgacaucacccccugcagcuucggcgggguguccgugaucacgccgggcaccaacaccagcaaccaggucgccgugcuguaccaggacgugaacugcaccgagguccccguggccauccacgccgaccagcugacgcccaccuggcggguguacuccaccggcagcaacgucuuccagacccgcgccgggugccucaucggcgcggagcacgugaacaacuccuacgagugcgacauccccaucggggccggcaucugcgccagcuaccagacgcagaccaacuccccgcggcgcgcccggagcguggcgucccagagcaucaucgccuacaccaugucccugggcgccgagaacagcgucgccuacuccaacaacagcaucgccauccccaccaacuucacgaucuccgugaccaccgagauccugcccgugagcaugaccaagacgagcgucgacugcaccauguacaucugcggggacuccaccgagugcagcaaccuccugcugcaguacggcuccuucugcacccagcucaaccgcgcgcugacggggaucgccguggagcaggacaagaacacccaggagguguucgcccaggucaagcagaucuacaagacgcccccgaucaaggacuucggcggguucaacuucagccagauccugcccgaccccuccaagcccagcaagcgguccuucaucgaggaccuccuguucaacaaggugacccuggccgacgccggcuucaucaagcaguacggcgacugccucggggacaucgcggcccgcgaccugaucugcgcccagaaguucaacggccugaccgugcucccgccccugcugaccgacgagaugaucgcccaguacaccagcgcccuccuggcggggaccaucacguccggcuggaccuucggggccggcgccgcccugcagauccccuucgcgaugcagauggccuaccgguucaacggcaucggggucacccagaacgugcucuacgagaaccagaagcugaucgccaaccaguucaacagcgccaucggcaagauccaggacucccugagcuccaccgccagcgcgcucgggaagcugcaggacguggucaaccagaacgcccaggcccugaacacgcucgugaagcagcuguccagcaacugcggcgccaucuccagcgugcugaacgacauccucucccgccuggacaaggucgaggccgaggugcagaucgaccggcugaucaccugucgccuccagagccugcagaccuacgugacccagcagcugauccgggcggccgagauccgcgccagcgccaaccucgccgcgaccaagauguccgagugcguccugggccagagcaagcggguggacuucugcggcaagggguaccaccugauguccuucccccagagcgccccgcacggcguggucuuccuccacgugacguacguccccgcccaggagaagaacuucaccaccgcccccgcgaucugccacgacgggaaggcccacuucccccgcgagggcguguucguguccaacgggacccacugguucgucacgcagcggaacuucuacgagccgcagaucaucaccaccgacaacaccuucgugagcggcaacugcgacguggucaucggcaucgugaacaacacgguguacgacccccugcagcccgagcuggacuccuucaaggaggagcucgacaaguacuucaagaaccacaccagccccgacgucgaccugggggacaucuccggcaucaacgccagcguggugaacauccagaaggagaucgaccgccugaacgaggucgccaagaaccucaacgagucccugaucgaccugcaggagcucgggaaguacgagcaguacaucaagggcgggagcggcuacauccccgaggccccgcgcgacgggcaggccuacgugcggaaggacggcgaguggguccugcucagcaccuuccuguga

SEQ ID NO: 11889 - RNA, 3726 nt, Artificial Sequence
  SARS-CoV-2/Wuhan/WIV05/2019__EPI_ISL_402128 spike protein CDS gc (1-1211)(A972C_R995C) Foldon construct
auguucguguuccugguccuccugccccuggugagcucccagugcgugaaccucaccacccgcacgcagcugccgcccgccuacaccaacagcuucacccggggcgucuacuaccccgacaagguguuccgcuccagcgugcugcacuccacccaggaccucuuccugcccuucuucagcaacgucacgugguuccacgccauccacguguccgggaccaacggcaccaagcgguucgacaacccggugcugcccuucaacgacggggucuacuucgcgagcaccgagaaguccaacaucauccgcggcuggaucuucgggacgacccucgacagcaagacccagucccugcugaucgugaacaacgccaccaacguggucaucaaggugugcgaguuccaguucugcaacgaccccuuccucggcguguacuaccacaagaacaacaagagcuggauggaguccgaguuccgggucuacagcuccgccaacaacugcacguucgaguacgugagccagcccuuccugauggaccuggagggcaagcaggggaacuucaagaaccuccgcgaguucguguucaagaacaucgacggcuacuucaagaucuacuccaagcacaccccgaucaaccugguccgggaccugccccagggguucagcgcccucgagccccugguggaccugcccaucggcaucaacaucacccgcuuccagacccuccuggcccugcaccgguccuaccucacgccgggggacagcagcuccggcuggaccgcgggcgccgccgccuacuacgugggguaccugcagccccgcaccuuccugcucaaguacaacgagaacggcaccaucacggacgcggucgacugcgcccuggacccccugagcgagaccaagugcacccucaaguccuucaccguggagaaggggaucuaccagacgagcaacuuccgggugcagcccaccgaguccaucguccgcuucccgaacaucaccaaccugugccccuucggcgagguguucaacgccacccgguucgccagcgucuacgccuggaaccgcaagcggaucuccaacugcguggcggacuacagcgugcuguacaacuccgccagcuucuccacguucaagugcuacggcgucagccccaccaagcucaacgaccugugcuucaccaacguguacgccgacuccuucgugauccgcggggacgagguccggcagaucgcccccggccagaccgggaagaucgccgacuacaacuacaagcugccggacgacuucacgggcugcgugaucgcguggaacagcaacaaccucgacuccaaggucgggggcaacuacaacuaccuguaccgccuguuccgcaagagcaaccucaagcccuucgagcgggacaucuccaccgagaucuaccaggccggcagcacccccugcaacgggguggagggcuucaacugcuacuucccccugcaguccuacggguuccagccgaccaacggcgugggguaccagcccuaccggguggucgugcugagcuucgagcuccugcacgcccccgccacggugugcggccccaagaaguccaccaaccuggucaagaacaagugcgugaacuucaacuucaacggccucaccgggaccggcgugcugaccgagagcaacaagaaguuccugccguuccagcaguucgggcgcgacaucgccgacacgaccgacgcgguccgcgacccccagacccuggagauccucgacaucacccccugcagcuucggcgggguguccgugaucacgccgggcaccaacaccagcaaccaggucgccgugcuguaccaggacgugaacugcaccgagguccccguggccauccacgccgaccagcugacgcccaccuggcggguguacuccaccggcagcaacgucuuccagacccgcgccgggugccucaucggcgcggagcacgugaacaacuccuacgagugcgacauccccaucggggccggcaucugcgccagcuaccagacgcagaccaacuccccgcggcgcgcccggagcguggcgucccagagcaucaucgccuacaccaugucccugggcgccgagaacagcgucgccuacuccaacaacagcaucgccauccccaccaacuucacgaucuccgugaccaccgagauccugcccgugagcaugaccaagacgagcgucgacugcaccauguacaucugcggggacuccaccgagugcagcaaccuccugcugcaguacggcuccuucugcacccagcucaaccgcgcgcugacggggaucgccguggagcaggacaagaacacccaggagguguucgcccaggucaagcagaucuacaagacgcccccgaucaaggacuucggcggguucaacuucagccagauccugcccgaccccuccaagcccagcaagcgguccuucaucgaggaccuccuguucaacaaggugacccuggccgacgccggcuucaucaagcaguacggcgacugccucggggacaucgcggcccgcgaccugaucugcgcccagaaguucaacggccugaccgugcucccgccccugcugaccgacgagaugaucgcccaguacaccagcgcccuccuggcggggaccaucacguccggcuggaccuucggggccggcgccgcccugcagauccccuucgcgaugcagauggccuaccgguucaacggcaucggggucacccagaacgugcucuacgagaaccagaagcugaucgccaaccaguucaacagcgccaucggcaagauccaggacucccugagcuccaccgccagcgcgcucgggaagcugcaggacguggucaaccagaacgcccaggcccugaacacgcucgugaagcagcuguccagcaacuucggcugcaucuccagcgugcugaacgacauccucucccgccuggacaaggucgaggccgaggugcagaucgacugccugaucaccgggcgccuccagagccugcagaccuacgugacccagcagcugauccgggcggccgagauccgcgccagcgccaaccucgccgcgaccaagauguccgagugcguccugggccagagcaagcggguggacuucugcggcaagggguaccaccugauguccuucccccagagcgccccgcacggcguggucuuccuccacgugacguacguccccgcccaggagaagaacuucaccaccgcccccgcgaucugccacgacgggaaggcccacuucccccgcgagggcguguucguguccaacgggacccacugguucgucacgcagcggaacuucuacgagccgcagaucaucaccaccgacaacaccuucgugagcggcaacugcgacguggucaucggcaucgugaacaacacgguguacgacccccugcagcccgagcuggacuccuucaaggaggagcucgacaaguacuucaagaaccacaccagccccgacgucgaccugggggacaucuccggcaucaacgccagcguggugaacauccagaaggagaucgaccgccugaacgaggucgccaagaaccucaacgagucccugaucgaccugcaggagcucgggaaguacgagcaguacaucaagggcgggagcggcuacauccccgaggccccgcgcgacgggcaggccuacgugcggaaggacggcgaguggguccugcucagcaccuuccuguga

SEQ ID NO: 11890 - RNA, 3726 nt, Artificial Sequence
  SARS-CoV-2/Wuhan/WIV05/2019__EPI_ISL_402128 spike protein CDS gc (1-1211)(A890C_V1040C) Foldon construct
auguucguguuccugguccuccugccccuggugagcucccagugcgugaaccucaccacccgcacgcagcugccgcccgccuacaccaacagcuucacccggggcgucuacuaccccgacaagguguuccgcuccagcgugcugcacuccacccaggaccucuuccugcccuucuucagcaacgucacgugguuccacgccauccacguguccgggaccaacggcaccaagcgguucgacaacccggugcugcccuucaacgacggggucuacuucgcgagcaccgagaaguccaacaucauccgcggcuggaucuucgggacgacccucgacagcaagacccagucccugcugaucgugaacaacgccaccaacguggucaucaaggugugcgaguuccaguucugcaacgaccccuuccucggcguguacuaccacaagaacaacaagagcuggauggaguccgaguuccgggucuacagcuccgccaacaacugcacguucgaguacgugagccagcccuuccugauggaccuggagggcaagcaggggaacuucaagaaccuccgcgaguucguguucaagaacaucgacggcuacuucaagaucuacuccaagcacaccccgaucaaccugguccgggaccugccccagggguucagcgcccucgagccccugguggaccugcccaucggcaucaacaucacccgcuuccagacccuccuggcccugcaccgguccuaccucacgccgggggacagcagcuccggcuggaccgcgggcgccgccgccuacuacgugggguaccugcagccccgcaccuuccugcucaaguacaacgagaacggcaccaucacggacgcggucgacugcgcccuggacccccugagcgagaccaagugcacccucaaguccuucaccguggagaaggggaucuaccagacgagcaacuuccgggugcagcccaccgaguccaucguccgcuucccgaacaucaccaaccugugccccuucggcgagguguucaacgccacccgguucgccagcgucuacgccuggaaccgcaagcggaucuccaacugcguggcggacuacagcgugcuguacaacuccgccagcuucuccacguucaagugcuacggcgucagccccaccaagcucaacgaccugugcuucaccaacguguacgccgacuccuucgugauccgcggggacgagguccggcagaucgcccccggccagaccgggaagaucgccgacuacaacuacaagcugccggacgacuucacgggcugcgugaucgcguggaacagcaacaaccucgacuccaaggucgggggcaacuacaacuaccuguaccgccuguuccgcaagagcaaccucaagcccuucgagcgggacaucuccaccgagaucuaccaggccggcagcacccccugcaacgggguggagggcuucaacugcuacuucccccugcaguccuacggguuccagccgaccaacggcgugggguaccagcccuaccggguggucgugcugagcuucgagcuccugcacgcccccgccacggugugcggccccaagaaguccaccaaccuggucaagaacaagugcgugaacuucaacuucaacggccucaccgggaccggcgugcugaccgagagcaacaagaaguuccugccguuccagcaguucgggcgcgacaucgccgacacgaccgacgcgguccgcgacccccagacccuggagauccucgacaucacccccugcagcuucggcgggguguccgugaucacgccgggcaccaacaccagcaaccaggucgccgugcuguaccaggacgugaacugcaccgagguccccguggccauccacgccgaccagcugacgcccaccuggcggguguacuccaccggcagcaacgucuuccagacccgcgccgggugccucaucggcgcggagcacgugaacaacuccuacgagugcgacauccccaucggggccggcaucugcgccagcuaccagacgcagaccaacuccccgcggcgcgcccggagcguggcgucccagagcaucaucgccuacaccaugucccugggcgccgagaacagcgucgccuacuccaacaacagcaucgccauccccaccaacuucacgaucuccgugaccaccgagauccugcccgugagcaugaccaagacgagcgucgacugcaccauguacaucugcggggacuccaccgagugcagcaaccuccugcugcaguacggcuccuucugcacccagcucaaccgcgcgcugacggggaucgccguggagcaggacaagaacacccaggagguguucgcccaggucaagcagaucuacaagacgcccccgaucaaggacuucggcggguucaacuucagccagauccugcccgaccccuccaagcccagcaagcgguccuucaucgaggaccuccuguucaacaaggugacccuggccgacgccggcuucaucaagcaguacggcgacugccucggggacaucgcggcccgcgaccugaucugcgcccagaaguucaacggccugaccgugcucccgccccugcugaccgacgagaugaucgcccaguacaccagcgcccuccuggcggggaccaucacguccggcuggaccuucgggugcggcgccgcccugcagauccccuucgcgaugcagauggccuaccgguucaacggcaucggggucacccagaacgugcucuacgagaaccagaagcugaucgccaaccaguucaacagcgccaucggcaagauccaggacucccugagcuccaccgccagcgcgcucgggaagcugcaggacguggucaaccagaacgcccaggcccugaacacgcucgugaagcagcuguccagcaacuucggcgccaucuccagcgugcugaacgacauccucucccgccuggacaaggucgaggccgaggugcagaucgaccggcugaucaccgggcgccuccagagccugcagaccuacgugacccagcagcugauccgggcggccgagauccgcgccagcgccaaccucgccgcgaccaagauguccgagugcguccugggccagagcaagcggugcgacuucugcggcaagggguaccaccugauguccuucccccagagcgccccgcacggcguggucuuccuccacgugacguacguccccgcccaggagaagaacuucaccaccgcccccgcgaucugccacgacgggaaggcccacuucccccgcgagggcguguucguguccaacgggacccacugguucgucacgcagcggaacuucuacgagccgcagaucaucaccaccgacaacaccuucgugagcggcaacugcgacguggucaucggcaucgugaacaacacgguguacgacccccugcagcccgagcuggacuccuucaaggaggagcucgacaaguacuucaagaaccacaccagccccgacgucgaccugggggacaucuccggcaucaacgccagcguggugaacauccagaaggagaucgaccgccugaacgaggucgccaagaaccucaacgagucccugaucgaccugcaggagcucgggaaguacgagcaguacaucaagggcgggagcggcuacauccccgaggccccgcgcgacgggcaggccuacgugcggaaggacggcgaguggguccugcucagcaccuuccuguga

SEQ ID NO: 11891 - RNA, 3726 nt, Artificial Sequence
  SARS-CoV-2/Wuhan/WIV05/2019__EPI_ISL_402128 spike protein CDS gc (1-1211)(T874C_S1055C) Foldon construct
auguucguguuccugguccuccugccccuggugagcucccagugcgugaaccucaccacccgcacgcagcugccgcccgccuacaccaacagcuucacccggggcgucuacuaccccgacaagguguuccgcuccagcgugcugcacuccacccaggaccucuuccugcccuucuucagcaacgucacgugguuccacgccauccacguguccgggaccaacggcaccaagcgguucgacaacccggugcugcccuucaacgacggggucuacuucgcgagcaccgagaaguccaacaucauccgcggcuggaucuucgggacgacccucgacagcaagacccagucccugcugaucgugaacaacgccaccaacguggucaucaaggugugcgaguuccaguucugcaacgaccccuuccucggcguguacuaccacaagaacaacaagagcuggauggaguccgaguuccgggucuacagcuccgccaacaacugcacguucgaguacgugagccagcccuuccugauggaccuggagggcaagcaggggaacuucaagaaccuccgcgaguucguguucaagaacaucgacggcuacuucaagaucuacuccaagcacaccccgaucaaccugguccgggaccugccccagggguucagcgcccucgagccccugguggaccugcccaucggcaucaacaucacccgcuuccagacccuccuggcccugcaccgguccuaccucacgccgggggacagcagcuccggcuggaccgcgggcgccgccgccuacuacgugggguaccugcagccccgcaccuuccugcucaaguacaacgagaacggcaccaucacggacgcggucgacugcgcccuggacccccugagcgagaccaagugcacccucaaguccuucaccguggagaaggggaucuaccagacgagcaacuuccgggugcagcccaccgaguccaucguccgcuucccgaacaucaccaaccugugccccuucggcgagguguucaacgccacccgguucgccagcgucuacgccuggaaccgcaagcggaucuccaacugcguggcggacuacagcgugcuguacaacuccgccagcuucuccacguucaagugcuacggcgucagccccaccaagcucaacgaccugugcuucaccaacguguacgccgacuccuucgugauccgcggggacgagguccggcagaucgcccccggccagaccgggaagaucgccgacuacaacuacaagcugccggacgacuucacgggcugcgugaucgcguggaacagcaacaaccucgacuccaaggucgggggcaacuacaacuaccuguaccgccuguuccgcaagagcaaccucaagcccuucgagcgggacaucuccaccgagaucuaccaggccggcagcacccccugcaacgggguggagggcuucaacugcuacuucccccugcaguccuacggguuccagccgaccaacggcgugggguaccagcccuaccggguggucgugcugagcuucgagcuccugcacgcccccgccacggugugcggccccaagaaguccaccaaccuggucaagaacaagugcgugaacuucaacuucaacggccucaccgggaccggcgugcugaccgagagcaacaagaaguuccugccguuccagcaguucgggcgcgacaucgccgacacgaccgacgcgguccgcgacccccagacccuggagauccucgacaucacccccugcagcuucggcgggguguccgugaucacgccgggcaccaacaccagcaaccaggucgccgugcuguaccaggacgugaacugcaccgagguccccguggccauccacgccgaccagcugacgcccaccuggcggguguacuccaccggcagcaacgucuuccagacccgcgccgggugccucaucggcgcggagcacgugaacaacuccuacgagugcgacauccccaucggggccggcaucugcgccagcuaccagacgcagaccaacuccccgcggcgcgcccggagcguggcgucccagagcaucaucgccuacaccaugucccugggcgccgagaacagcgucgccuacuccaacaacagcaucgccauccccaccaacuucacgaucuccgugaccaccgagauccugcccgugagcaugaccaagacgagcgucgacugcaccauguacaucugcggggacuccaccgagugcagcaaccuccugcugcaguacggcuccuucugcacccagcucaaccgcgcgcugacggggaucgccguggagcaggacaagaacacccaggagguguucgcccaggucaagcagaucuacaagacgcccccgaucaaggacuucggcggguucaacuucagccagauccugcccgaccccuccaagcccagcaagcgguccuucaucgaggaccuccuguucaacaaggugacccuggccgacgccggcuucaucaagcaguacggcgacugccucggggacaucgcggcccgcgaccugaucugcgcccagaaguucaacggccugaccgugcucccgccccugcugaccgacgagaugaucgcccaguacugcagcgcccuccuggcggggaccaucacguccggcuggaccuucggggccggcgccgcccugcagauccccuucgcgaugcagauggccuaccgguucaacggcaucggggucacccagaacgugcucuacgagaaccagaagcugaucgccaaccaguucaacagcgccaucggcaagauccaggacucccugagcuccaccgccagcgcgcucgggaagcugcaggacguggucaaccagaacgcccaggcccugaacacgcucgugaagcagcuguccagcaacuucggcgccaucuccagcgugcugaacgacauccucucccgccuggacaaggucgaggccgaggugcagaucgaccggcugaucaccgggcgccuccagagccugcagaccuacgugacccagcagcugauccgggcggccgagauccgcgccagcgccaaccucgccgcgaccaagauguccgagugcguccugggccagagcaagcggguggacuucugcggcaagggguaccaccugauguccuucccccagugcgccccgcacggcguggucuuccuccacgugacguacguccccgcccaggagaagaacuucaccaccgcccccgcgaucugccacgacgggaaggcccacuucccccgcgagggcguguucguguccaacgggacccacugguucgucacgcagcggaacuucuacgagccgcagaucaucaccaccgacaacaccuucgugagcggcaacugcgacguggucaucggcaucgugaacaacacgguguacgacccccugcagcccgagcuggacuccuucaaggaggagcucgacaaguacuucaagaaccacaccagccccgacgucgaccugggggacaucuccggcaucaacgccagcguggugaacauccagaaggagaucgaccgccugaacgaggucgccaagaaccucaacgagucccugaucgaccugcaggagcucgggaaguacgagcaguacaucaagggcgggagcggcuacauccccgaggccccgcgcgacgggcaggccuacgugcggaaggacggcgaguggguccugcucagcaccuuccuguga

SEQ ID NO: 11892 - RNA, 4098 nt, Artificial Sequence
  SARS-CoV-2/Wuhan/WIV05/2019__EPI_ISL_402128 spike protein CDS gc (1-1211) WhcAg construct
auguucguguuccugguccuccugccccuggugagcucccagugcgugaaccucaccacccgcacgcagcugccgcccgccuacaccaacagcuucacccggggcgucuacuaccccgacaagguguuccgcuccagcgugcugcacuccacccaggaccucuuccugcccuucuucagcaacgucacgugguuccacgccauccacguguccgggaccaacggcaccaagcgguucgacaacccggugcugcccuucaacgacggggucuacuucgcgagcaccgagaaguccaacaucauccgcggcuggaucuucgggacgacccucgacagcaagacccagucccugcugaucgugaacaacgccaccaacguggucaucaaggugugcgaguuccaguucugcaacgaccccuuccucggcguguacuaccacaagaacaacaagagcuggauggaguccgaguuccgggucuacagcuccgccaacaacugcacguucgaguacgugagccagcccuuccugauggaccuggagggcaagcaggggaacuucaagaaccuccgcgaguucguguucaagaacaucgacggcuacuucaagaucuacuccaagcacaccccgaucaaccugguccgggaccugccccagggguucagcgcccucgagccccugguggaccugcccaucggcaucaacaucacccgcuuccagacccuccuggcccugcaccgguccuaccucacgccgggggacagcagcuccggcuggaccgcgggcgccgccgccuacuacgugggguaccugcagccccgcaccuuccugcucaaguacaacgagaacggcaccaucacggacgcggucgacugcgcccuggacccccugagcgagaccaagugcacccucaaguccuucaccguggagaaggggaucuaccagacgagcaacuuccgggugcagcccaccgaguccaucguccgcuucccgaacaucaccaaccugugccccuucggcgagguguucaacgccacccgguucgccagcgucuacgccuggaaccgcaagcggaucuccaacugcguggcggacuacagcgugcuguacaacuccgccagcuucuccacguucaagugcuacggcgucagccccaccaagcucaacgaccugugcuucaccaacguguacgccgacuccuucgugauccgcggggacgagguccggcagaucgcccccggccagaccgggaagaucgccgacuacaacuacaagcugccggacgacuucacgggcugcgugaucgcguggaacagcaacaaccucgacuccaaggucgggggcaacuacaacuaccuguaccgccuguuccgcaagagcaaccucaagcccuucgagcgggacaucuccaccgagaucuaccaggccggcagcacccccugcaacgggguggagggcuucaacugcuacuucccccugcaguccuacggguuccagccgaccaacggcgugggguaccagcccuaccggguggucgugcugagcuucgagcuccugcacgcccccgccacggugugcggccccaagaaguccaccaaccuggucaagaacaagugcgugaacuucaacuucaacggccucaccgggaccggcgugcugaccgagagcaacaagaaguuccugccguuccagcaguucgggcgcgacaucgccgacacgaccgacgcgguccgcgacccccagacccuggagauccucgacaucacccccugcagcuucggcgggguguccgugaucacgccgggcaccaacaccagcaaccaggucgccgugcuguaccaggacgugaacugcaccgagguccccguggccauccacgccgaccagcugacgcccaccuggcggguguacuccaccggcagcaacgucuuccagacccgcgccgggugccucaucggcgcggagcacgugaacaacuccuacgagugcgacauccccaucggggccggcaucugcgccagcuaccagacgcagaccaacuccccgcggcgcgcccggagcguggcgucccagagcaucaucgccuacaccaugucccugggcgccgagaacagcgucgccuacuccaacaacagcaucgccauccccaccaacuucacgaucuccgugaccaccgagauccugcccgugagcaugaccaagacgagcgucgacugcaccauguacaucugcggggacuccaccgagugcagcaaccuccugcugcaguacggcuccuucugcacccagcucaaccgcgcgcugacggggaucgccguggagcaggacaagaacacccaggagguguucgcccaggucaagcagaucuacaagacgcccccgaucaaggacuucggcggguucaacuucagccagauccugcccgaccccuccaagcccagcaagcgguccuucaucgaggaccuccuguucaacaaggugacccuggccgacgccggcuucaucaagcaguacggcgacugccucggggacaucgcggcccgcgaccugaucugcgcccagaaguucaacggccugaccgugcucccgccccugcugaccgacgagaugaucgcccaguacaccagcgcccuccuggcggggaccaucacguccggcuggaccuucggggccggcgccgcccugcagauccccuucgcgaugcagauggccuaccgguucaacggcaucggggucacccagaacgugcucuacgagaaccagaagcugaucgccaaccaguucaacagcgccaucggcaagauccaggacucccugagcuccaccgccagcgcgcucgggaagcugcaggacguggucaaccagaacgcccaggcccugaacacgcucgugaagcagcuguccagcaacuucggcgccaucuccagcgugcugaacgacauccucucccgccuggacaaggucgaggccgaggugcagaucgaccggcugaucaccgggcgccuccagagccugcagaccuacgugacccagcagcugauccgggcggccgagauccgcgccagcgccaaccucgccgcgaccaagauguccgagugcguccugggccagagcaagcggguggacuucugcggcaagggguaccaccugauguccuucccccagagcgccccgcacggcguggucuuccuccacgugacguacguccccgcccaggagaagaacuucaccaccgcccccgcgaucugccacgacgggaaggcccacuucccccgcgagggcguguucguguccaacgggacccacugguucgucacgcagcggaacuucuacgagccgcagaucaucaccaccgacaacaccuucgugagcggcaacugcgacguggucaucggcaucgugaacaacacgguguacgacccccugcagcccgagcuggacuccuucaaggaggagcucgacaaguacuucaagaaccacaccagccccgacgucgaccugggggacaucuccggcaucaacgccagcguggugaacauccagaaggagaucgaccgccugaacgaggucgccaagaaccucaacgagucccugaucgaccugcaggagcucgggaaguacgagcaguacaucaagggcgggggcgggagcgacaucgaccccuacaaggaguucggcagcuccuaccagcugcucaacuuccugccccuggacuucuuccccgaccucaacgcccugguggacaccgccaccgcgcuguacgaggaggagcucacggggcgcgagcacugcagcccccaccacaccgccauccggcaggcccuggucugcugggacgagcugaccaagcucaucgccuggauguccagcaacaucaccuccgagcagguccgcacgaucaucgugaaccacgucaacgacaccuggggccugaaggugcggcagagccugugguuccaccucuccugccugaccuucgggcagcacaccgugcaggaguuccuggucagcuucggcguguggauccgcacgcccgccccguaccggccgcccaacgcgccgauccucuccacccugccggagcacaccgugaucugcuga

SEQ ID NO: 11893 - RNA, 4098 nt, Artificial Sequence
  SARS-CoV-2/Wuhan/WIV05/2019__EPI_ISL_402128 spike protein CDS gc (1-1211)(K986P_V987P) WhcAg construct
auguucguguuccugguccuccugccccuggugagcucccagugcgugaaccucaccacccgcacgcagcugccgcccgccuacaccaacagcuucacccggggcgucuacuaccccgacaagguguuccgcuccagcgugcugcacuccacccaggaccucuuccugcccuucuucagcaacgucacgugguuccacgccauccacguguccgggaccaacggcaccaagcgguucgacaacccggugcugcccuucaacgacggggucuacuucgcgagcaccgagaaguccaacaucauccgcggcuggaucuucgggacgacccucgacagcaagacccagucccugcugaucgugaacaacgccaccaacguggucaucaaggugugcgaguuccaguucugcaacgaccccuuccucggcguguacuaccacaagaacaacaagagcuggauggaguccgaguuccgggucuacagcuccgccaacaacugcacguucgaguacgugagccagcccuuccugauggaccuggagggcaagcaggggaacuucaagaaccuccgcgaguucguguucaagaacaucgacggcuacuucaagaucuacuccaagcacaccccgaucaaccugguccgggaccugccccagggguucagcgcccucgagccccugguggaccugcccaucggcaucaacaucacccgcuuccagacccuccuggcccugcaccgguccuaccucacgccgggggacagcagcuccggcuggaccgcgggcgccgccgccuacuacgugggguaccugcagccccgcaccuuccugcucaaguacaacgagaacggcaccaucacggacgcggucgacugcgcccuggacccccugagcgagaccaagugcacccucaaguccuucaccguggagaaggggaucuaccagacgagcaacuuccgggugcagcccaccgaguccaucguccgcuucccgaacaucaccaaccugugccccuucggcgagguguucaacgccacccgguucgccagcgucuacgccuggaaccgcaagcggaucuccaacugcguggcggacuacagcgugcuguacaacuccgccagcuucuccacguucaagugcuacggcgucagccccaccaagcucaacgaccugugcuucaccaacguguacgccgacuccuucgugauccgcggggacgagguccggcagaucgcccccggccagaccgggaagaucgccgacuacaacuacaagcugccggacgacuucacgggcugcgugaucgcguggaacagcaacaaccucgacuccaaggucgggggcaacuacaacuaccuguaccgccuguuccgcaagagcaaccucaagcccuucgagcgggacaucuccaccgagaucuaccaggccggcagcacccccugcaacgggguggagggcuucaacugcuacuucccccugcaguccuacggguuccagccgaccaacggcgugggguaccagcccuaccggguggucgugcugagcuucgagcuccugcacgcccccgccacggugugcggccccaagaaguccaccaaccuggucaagaacaagugcgugaacuucaacuucaacggccucaccgggaccggcgugcugaccgagagcaacaagaaguuccugccguuccagcaguucgggcgcgacaucgccgacacgaccgacgcgguccgcgacccccagacccuggagauccucgacaucacccccugcagcuucggcgggguguccgugaucacgccgggcaccaacaccagcaaccaggucgccgugcuguaccaggacgugaacugcaccgagguccccguggccauccacgccgaccagcugacgcccaccuggcggguguacuccaccggcagcaacgucuuccagacccgcgccgggugccucaucggcgcggagcacgugaacaacuccuacgagugcgacauccccaucggggccggcaucugcgccagcuaccagacgcagaccaacuccccgcggcgcgcccggagcguggcgucccagagcaucaucgccuacaccaugucccugggcgccgagaacagcgucgccuacuccaacaacagcaucgccauccccaccaacuucacgaucuccgugaccaccgagauccugcccgugagcaugaccaagacgagcgucgacugcaccauguacaucugcggggacuccaccgagugcagcaaccuccugcugcaguacggcuccuucugcacccagcucaaccgcgcgcugacggggaucgccguggagcaggacaagaacacccaggagguguucgcccaggucaagcagaucuacaagacgcccccgaucaaggacuucggcggguucaacuucagccagauccugcccgaccccuccaagcccagcaagcgguccuucaucgaggaccuccuguucaacaaggugacccuggccgacgccggcuucaucaagcaguacggcgacugccucggggacaucgcggcccgcgaccugaucugcgcccagaaguucaacggccugaccgugcucccgccccugcugaccgacgagaugaucgcccaguacaccagcgcccuccuggcggggaccaucacguccggcuggaccuucggggccggcgccgcccugcagauccccuucgcgaugcagauggccuaccgguucaacggcaucggggucacccagaacgugcucuacgagaaccagaagcugaucgccaaccaguucaacagcgccaucggcaagauccaggacucccugagcuccaccgccagcgcgcucgggaagcugcaggacguggucaaccagaacgcccaggcccugaacacgcucgugaagcagcuguccagcaacuucggcgccaucuccagcgugcugaacgacauccucucccgccuggacccgcccgaggccgaggugcagaucgaccggcugaucaccgggcgccuccagagccugcagaccuacgugacccagcagcugauccgggcggccgagauccgcgccagcgccaaccucgccgcgaccaagauguccgagugcguccugggccagagcaagcggguggacuucugcggcaagggguaccaccugauguccuucccccagagcgccccgcacggcguggucuuccuccacgugacguacguccccgcccaggagaagaacuucaccaccgcccccgcgaucugccacgacgggaaggcccacuucccccgcgagggcguguucguguccaacgggacccacugguucgucacgcagcggaacuucuacgagccgcagaucaucaccaccgacaacaccuucgugagcggcaacugcgacguggucaucggcaucgugaacaacacgguguacgacccccugcagcccgagcuggacuccuucaaggaggagcucgacaaguacuucaagaaccacaccagccccgacgucgaccugggggacaucuccggcaucaacgccagcguggugaacauccagaaggagaucgaccgccugaacgaggucgccaagaaccucaacgagucccugaucgaccugcaggagcucgggaaguacgagcaguacaucaagggcgggggcgggagcgacaucgaccccuacaaggaguucggcagcuccuaccagcugcucaacuuccugccccuggacuucuuccccgaccucaacgcccugguggacaccgccaccgcgcuguacgaggaggagcucacggggcgcgagcacugcagcccccaccacaccgccauccggcaggcccuggucugcugggacgagcugaccaagcucaucgccuggauguccagcaacaucaccuccgagcagguccgcacgaucaucgugaaccacgucaacgacaccuggggccugaaggugcggcagagccugugguuccaccucuccugccugaccuucgggcagcacaccgugcaggaguuccuggucagcuucggcguguggauccgcacgcccgccccguaccggccgcccaacgcgccgauccucuccacccugccggagcacaccgugaucugcuga

SEQ ID NO: 11894 - RNA, 4098 nt, Artificial Sequence
  SARS-CoV-2/Wuhan/WIV05/2019__EPI_ISL_402128 spike protein CDS gc (1-1211)(K986P_V987P_T887WN_A1020W) WhcAg construct
auguucguguuccugguccuccugccccuggugagcucccagugcgugaaccucaccacccgcacgcagcugccgcccgccuacaccaacagcuucacccggggcgucuacuaccccgacaagguguuccgcuccagcgugcugcacuccacccaggaccucuuccugcccuucuucagcaacgucacgugguuccacgccauccacguguccgggaccaacggcaccaagcgguucgacaacccggugcugcccuucaacgacggggucuacuucgcgagcaccgagaaguccaacaucauccgcggcuggaucuucgggacgacccucgacagcaagacccagucccugcugaucgugaacaacgccaccaacguggucaucaaggugugcgaguuccaguucugcaacgaccccuuccucggcguguacuaccacaagaacaacaagagcuggauggaguccgaguuccgggucuacagcuccgccaacaacugcacguucgaguacgugagccagcccuuccugauggaccuggagggcaagcaggggaacuucaagaaccuccgcgaguucguguucaagaacaucgacggcuacuucaagaucuacuccaagcacaccccgaucaaccugguccgggaccugccccagggguucagcgcccucgagccccugguggaccugcccaucggcaucaacaucacccgcuuccagacccuccuggcccugcaccgguccuaccucacgccgggggacagcagcuccggcuggaccgcgggcgccgccgccuacuacgugggguaccugcagccccgcaccuuccugcucaaguacaacgagaacggcaccaucacggacgcggucgacugcgcccuggacccccugagcgagaccaagugcacccucaaguccuucaccguggagaaggggaucuaccagacgagcaacuuccgggugcagcccaccgaguccaucguccgcuucccgaacaucaccaaccugugccccuucggcgagguguucaacgccacccgguucgccagcgucuacgccuggaaccgcaagcggaucuccaacugcguggcggacuacagcgugcuguacaacuccgccagcuucuccacguucaagugcuacggcgucagccccaccaagcucaacgaccugugcuucaccaacguguacgccgacuccuucgugauccgcggggacgagguccggcagaucgcccccggccagaccgggaagaucgccgacuacaacuacaagcugccggacgacuucacgggcugcgugaucgcguggaacagcaacaaccucgacuccaaggucgggggcaacuacaacuaccuguaccgccuguuccgcaagagcaaccucaagcccuucgagcgggacaucuccaccgagaucuaccaggccggcagcacccccugcaacgggguggagggcuucaacugcuacuucccccugcaguccuacggguuccagccgaccaacggcgugggguaccagcccuaccggguggucgugcugagcuucgagcuccugcacgcccccgccacggugugcggccccaagaaguccaccaaccuggucaagaacaagugcgugaacuucaacuucaacggccucaccgggaccggcgugcugaccgagagcaacaagaaguuccugccguuccagcaguucgggcgcgacaucgccgacacgaccgacgcgguccgcgacccccagacccuggagauccucgacaucacccccugcagcuucggcgggguguccgugaucacgccgggcaccaacaccagcaaccaggucgccgugcuguaccaggacgugaacugcaccgagguccccguggccauccacgccgaccagcugacgcccaccuggcggguguacuccaccggcagcaacgucuuccagacccgcgccgggugccucaucggcgcggagcacgugaacaacuccuacgagugcgacauccccaucggggccggcaucugcgccagcuaccagacgcagaccaacuccccgcggcgcgcccggagcguggcgucccagagcaucaucgccuacaccaugucccugggcgccgagaacagcgucgccuacuccaacaacagcaucgccauccccaccaacuucacgaucuccgugaccaccgagauccugcccgugagcaugaccaagacgagcgucgacugcaccauguacaucugcggggacuccaccgagugcagcaaccuccugcugcaguacggcuccuucugcacccagcucaaccgcgcgcugacggggaucgccguggagcaggacaagaacacccaggagguguucgcccaggucaagcagaucuacaagacgcccccgaucaaggacuucggcggguucaacuucagccagauccugcccgaccccuccaagcccagcaagcgguccuucaucgaggaccuccuguucaacaaggugacccuggccgacgccggcuucaucaagcaguacggcgacugccucggggacaucgcggcccgcgaccugaucugcgcccagaaguucaacggccugaccgugcucccgccccugcugaccgacgagaugaucgcccaguacaccagcgcccuccuggcggggaccaucacguccggcuggugguucggggccggcgccgcccugcagauccccuucgcgaugcagauggccuaccgguucaacggcaucggggucacccagaacgugcucuacgagaaccagaagcugaucgccaaccaguucaacagcgccaucggcaagauccaggacucccugagcuccaccgccagcgcgcucgggaagcugcaggacguggucaaccagaacgcccaggcccugaacacgcucgugaagcagcuguccagcaacuucggcgccaucuccagcgugcugaacgacauccucucccgccuggacccgcccgaggccgaggugcagaucgaccggcugaucaccgggcgccuccagagccugcagaccuacgugacccagcagcugauccgggcggccgagauccgcuggagcgccaaccucgccgcgaccaagauguccgagugcguccugggccagagcaagcggguggacuucugcggcaagggguaccaccugauguccuucccccagagcgccccgcacggcguggucuuccuccacgugacguacguccccgcccaggagaagaacuucaccaccgcccccgcgaucugccacgacgggaaggcccacuucccccgcgagggcguguucguguccaacgggacccacugguucgucacgcagcggaacuucuacgagccgcagaucaucaccaccgacaacaccuucgugagcggcaacugcgacguggucaucggcaucgugaacaacacgguguacgacccccugcagcccgagcuggacuccuucaaggaggagcucgacaaguacuucaagaaccacaccagccccgacgucgaccugggggacaucuccggcaucaacgccagcguggugaacauccagaaggagaucgaccgccugaacgaggucgccaagaaccucaacgagucccugaucgaccugcaggagcucgggaaguacgagcaguacaucaagggcgggggcgggagcgacaucgaccccuacaaggaguucggcagcuccuaccagcugcucaacuuccugccccuggacuucuuccccgaccucaacgcccugguggacaccgccaccgcgcuguacgaggaggagcucacggggcgcgagcacugcagcccccaccacaccgccauccggcaggcccuggucugcugggacgagcugaccaagcucaucgccuggauguccagcaacaucaccuccgagcagguccgcacgaucaucgugaaccacgucaacgacaccuggggccugaaggugcggcagagccugugguuccaccucuccugccugaccuucgggcagcacaccgugcaggaguuccuggucagcuucggcguguggauccgcacgcccgccccguaccggccgcccaacgcgccgauccucuccacccugccggagcacaccgugaucugcuga

SEQ ID NO: 11895 - RNA, 4098 nt, Artificial Sequence
  SARS-CoV-2/Wuhan/WIV05/2019__EPI_ISL_402128 spike protein CDS gc (1-1211)(K986P_V987P_P1069F) WhcAg construct
auguucguguuccugguccuccugccccuggugagcucccagugcgugaaccucaccacccgcacgcagcugccgcccgccuacaccaacagcuucacccggggcgucuacuaccccgacaagguguuccgcuccagcgugcugcacuccacccaggaccucuuccugcccuucuucagcaacgucacgugguuccacgccauccacguguccgggaccaacggcaccaagcgguucgacaacccggugcugcccuucaacgacggggucuacuucgcgagcaccgagaaguccaacaucauccgcggcuggaucuucgggacgacccucgacagcaagacccagucccugcugaucgugaacaacgccaccaacguggucaucaaggugugcgaguuccaguucugcaacgaccccuuccucggcguguacuaccacaagaacaacaagagcuggauggaguccgaguuccgggucuacagcuccgccaacaacugcacguucgaguacgugagccagcccuuccugauggaccuggagggcaagcaggggaacuucaagaaccuccgcgaguucguguucaagaacaucgacggcuacuucaagaucuacuccaagcacaccccgaucaaccugguccgggaccugccccagggguucagcgcccucgagccccugguggaccugcccaucggcaucaacaucacccgcuuccagacccuccuggcccugcaccgguccuaccucacgccgggggacagcagcuccggcuggaccgcgggcgccgccgccuacuacgugggguaccugcagccccgcaccuuccugcucaaguacaacgagaacggcaccaucacggacgcggucgacugcgcccuggacccccugagcgagaccaagugcacccucaaguccuucaccguggagaaggggaucuaccagacgagcaacuuccgggugcagcccaccgaguccaucguccgcuucccgaacaucaccaaccugugccccuucggcgagguguucaacgccacccgguucgccagcgucuacgccuggaaccgcaagcggaucuccaacugcguggcggacuacagcgugcuguacaacuccgccagcuucuccacguucaagugcuacggcgucagccccaccaagcucaacgaccugugcuucaccaacguguacgccgacuccuucgugauccgcggggacgagguccggcagaucgcccccggccagaccgggaagaucgccgacuacaacuacaagcugccggacgacuucacgggcugcgugaucgcguggaacagcaacaaccucgacuccaaggucgggggcaacuacaacuaccuguaccgccuguuccgcaagagcaaccucaagcccuucgagcgggacaucuccaccgagaucuaccaggccggcagcacccccugcaacgggguggagggcuucaacugcuacuucccccugcaguccuacggguuccagccgaccaacggcgugggguaccagcccuaccggguggucgugcugagcuucgagcuccugcacgcccccgccacggugugcggccccaagaaguccaccaaccuggucaagaacaagugcgugaacuucaacuucaacggccucaccgggaccggcgugcugaccgagagcaacaagaaguuccugccguuccagcaguucgggcgcgacaucgccgacacgaccgacgcgguccgcgacccccagacccuggagauccucgacaucacccccugcagcuucggcgggguguccgugaucacgccgggcaccaacaccagcaaccaggucgccgugcuguaccaggacgugaacugcaccgagguccccguggccauccacgccgaccagcugacgcccaccuggcggguguacuccaccggcagcaacgucuuccagacccgcgccgggugccucaucggcgcggagcacgugaacaacuccuacgagugcgacauccccaucggggccggcaucugcgccagcuaccagacgcagaccaacuccccgcggcgcgcccggagcguggcgucccagagcaucaucgccuacaccaugucccugggcgccgagaacagcgucgccuacuccaacaacagcaucgccauccccaccaacuucacgaucuccgugaccaccgagauccugcccgugagcaugaccaagacgagcgucgacugcaccauguacaucugcggggacuccaccgagugcagcaaccuccugcugcaguacggcuccuucugcacccagcucaaccgcgcgcugacggggaucgccguggagcaggacaagaacacccaggagguguucgcccaggucaagcagaucuacaagacgcccccgaucaaggacuucggcggguucaacuucagccagauccugcccgaccccuccaagcccagcaagcgguccuucaucgaggaccuccuguucaacaaggugacccuggccgacgccggcuucaucaagcaguacggcgacugccucggggacaucgcggcccgcgaccugaucugcgcccagaaguucaacggccugaccgugcucccgccccugcugaccgacgagaugaucgcccaguacaccagcgcccuccuggcggggaccaucacguccggcuggaccuucggggccggcgccgcccugcagauccccuucgcgaugcagauggccuaccgguucaacggcaucggggucacccagaacgugcucuacgagaaccagaagcugaucgccaaccaguucaacagcgccaucggcaagauccaggacucccugagcuccaccgccagcgcgcucgggaagcugcaggacguggucaaccagaacgcccaggcccugaacacgcucgugaagcagcuguccagcaacuucggcgccaucuccagcgugcugaacgacauccucucccgccuggacccgcccgaggccgaggugcagaucgaccggcugaucaccgggcgccuccagagccugcagaccuacgugacccagcagcugauccgggcggccgagauccgcgccagcgccaaccucgccgcgaccaagauguccgagugcguccugggccagagcaagcggguggacuucugcggcaagggguaccaccugauguccuucccccagagcgccccgcacggcguggucuuccuccacgugacguacgucuucgcccaggagaagaacuucaccaccgcccccgcgaucugccacgacgggaaggcccacuucccccgcgagggcguguucguguccaacgggacccacugguucgucacgcagcggaacuucuacgagccgcagaucaucaccaccgacaacaccuucgugagcggcaacugcgacguggucaucggcaucgugaacaacacgguguacgacccccugcagcccgagcuggacuccuucaaggaggagcucgacaaguacuucaagaaccacaccagccccgacgucgaccugggggacaucuccggcaucaacgccagcguggugaacauccagaaggagaucgaccgccugaacgaggucgccaagaaccucaacgagucccugaucgaccugcaggagcucgggaaguacgagcaguacaucaagggcgggggcgggagcgacaucgaccccuacaaggaguucggcagcuccuaccagcugcucaacuuccugccccuggacuucuuccccgaccucaacgcccugguggacaccgccaccgcgcuguacgaggaggagcucacggggcgcgagcacugcagcccccaccacaccgccauccggcaggcccuggucugcugggacgagcugaccaagcucaucgccuggauguccagcaacaucaccuccgagcagguccgcacgaucaucgugaaccacgucaacgacaccuggggccugaaggugcggcagagccugugguuccaccucuccugccugaccuucgggcagcacaccgugcaggaguuccuggucagcuucggcguguggauccgcacgcccgccccguaccggccgcccaacgcgccgauccucuccacccugccggagcacaccgugaucugcuga

SEQ ID NO: 11896 - RNA, 4098 nt, Artificial Sequence
  SARS-CoV-2/Wuhan/WIV05/2019__EPI_ISL_402128 spike protein CDS gc (1-1211)(K986P_V987P_ H1048Q_H1064N_ H1083N_H1101N) WhcAg construct
auguucguguuccugguccuccugccccuggugagcucccagugcgugaaccucaccacccgcacgcagcugccgcccgccuacaccaacagcuucacccggggcgucuacuaccccgacaagguguuccgcuccagcgugcugcacuccacccaggaccucuuccugcccuucuucagcaacgucacgugguuccacgccauccacguguccgggaccaacggcaccaagcgguucgacaacccggugcugcccuucaacgacggggucuacuucgcgagcaccgagaaguccaacaucauccgcggcuggaucuucgggacgacccucgacagcaagacccagucccugcugaucgugaacaacgccaccaacguggucaucaaggugugcgaguuccaguucugcaacgaccccuuccucggcguguacuaccacaagaacaacaagagcuggauggaguccgaguuccgggucuacagcuccgccaacaacugcacguucgaguacgugagccagcccuuccugauggaccuggagggcaagcaggggaacuucaagaaccuccgcgaguucguguucaagaacaucgacggcuacuucaagaucuacuccaagcacaccccgaucaaccugguccgggaccugccccagggguucagcgcccucgagccccugguggaccugcccaucggcaucaacaucacccgcuuccagacccuccuggcccugcaccgguccuaccucacgccgggggacagcagcuccggcuggaccgcgggcgccgccgccuacuacgugggguaccugcagccccgcaccuuccugcucaaguacaacgagaacggcaccaucacggacgcggucgacugcgcccuggacccccugagcgagaccaagugcacccucaaguccuucaccguggagaaggggaucuaccagacgagcaacuuccgggugcagcccaccgaguccaucguccgcuucccgaacaucaccaaccugugccccuucggcgagguguucaacgccacccgguucgccagcgucuacgccuggaaccgcaagcggaucuccaacugcguggcggacuacagcgugcuguacaacuccgccagcuucuccacguucaagugcuacggcgucagccccaccaagcucaacgaccugugcuucaccaacguguacgccgacuccuucgugauccgcggggacgagguccggcagaucgcccccggccagaccgggaagaucgccgacuacaacuacaagcugccggacgacuucacgggcugcgugaucgcguggaacagcaacaaccucgacuccaaggucgggggcaacuacaacuaccuguaccgccuguuccgcaagagcaaccucaagcccuucgagcgggacaucuccaccgagaucuaccaggccggcagcacccccugcaacgggguggagggcuucaacugcuacuucccccugcaguccuacggguuccagccgaccaacggcgugggguaccagcccuaccggguggucgugcugagcuucgagcuccugcacgcccccgccacggugugcggccccaagaaguccaccaaccuggucaagaacaagugcgugaacuucaacuucaacggccucaccgggaccggcgugcugaccgagagcaacaagaaguuccugccguuccagcaguucgggcgcgacaucgccgacacgaccgacgcgguccgcgacccccagacccuggagauccucgacaucacccccugcagcuucggcgggguguccgugaucacgccgggcaccaacaccagcaaccaggucgccgugcuguaccaggacgugaacugcaccgagguccccguggccauccacgccgaccagcugacgcccaccuggcggguguacuccaccggcagcaacgucuuccagacccgcgccgggugccucaucggcgcggagcacgugaacaacuccuacgagugcgacauccccaucggggccggcaucugcgccagcuaccagacgcagaccaacuccccgcggcgcgcccggagcguggcgucccagagcaucaucgccuacaccaugucccugggcgccgagaacagcgucgccuacuccaacaacagcaucgccauccccaccaacuucacgaucuccgugaccaccgagauccugcccgugagcaugaccaagacgagcgucgacugcaccauguacaucugcggggacuccaccgagugcagcaaccuccugcugcaguacggcuccuucugcacccagcucaaccgcgcgcugacggggaucgccguggagcaggacaagaacacccaggagguguucgcccaggucaagcagaucuacaagacgcccccgaucaaggacuucggcggguucaacuucagccagauccugcccgaccccuccaagcccagcaagcgguccuucaucgaggaccuccuguucaacaaggugacccuggccgacgccggcuucaucaagcaguacggcgacugccucggggacaucgcggcccgcgaccugaucugcgcccagaaguucaacggccugaccgugcucccgccccugcugaccgacgagaugaucgcccaguacaccagcgcccuccuggcggggaccaucacguccggcuggaccuucggggccggcgccgcccugcagauccccuucgcgaugcagauggccuaccgguucaacggcaucggggucacccagaacgugcucuacgagaaccagaagcugaucgccaaccaguucaacagcgccaucggcaagauccaggacucccugagcuccaccgccagcgcgcucgggaagcugcaggacguggucaaccagaacgcccaggcccugaacacgcucgugaagcagcuguccagcaacuucggcgccaucuccagcgugcugaacgacauccucucccgccuggacccgcccgaggccgaggugcagaucgaccggcugaucaccgggcgccuccagagccugcagaccuacgugacccagcagcugauccgggcggccgagauccgcgccagcgccaaccucgccgcgaccaagauguccgagugcguccugggccagagcaagcggguggacuucugcggcaagggguaccagcugauguccuucccccagagcgccccgcacggcguggucuuccucaacgugacguacguccccgcccaggagaagaacuucaccaccgcccccgcgaucugcaacgacgggaaggcccacuucccccgcgagggcguguucguguccaacgggaccaacugguucgucacgcagcggaacuucuacgagccgcagaucaucaccaccgacaacaccuucgugagcggcaacugcgacguggucaucggcaucgugaacaacacgguguacgacccccugcagcccgagcuggacuccuucaaggaggagcucgacaaguacuucaagaaccacaccagccccgacgucgaccugggggacaucuccggcaucaacgccagcguggugaacauccagaaggagaucgaccgccugaacgaggucgccaagaaccucaacgagucccugaucgaccugcaggagcucgggaaguacgagcaguacaucaagggcgggggcgggagcgacaucgaccccuacaaggaguucggcagcuccuaccagcugcucaacuuccugccccuggacuucuuccccgaccucaacgcccugguggacaccgccaccgcgcuguacgaggaggagcucacggggcgcgagcacugcagcccccaccacaccgccauccggcaggcccuggucugcugggacgagcugaccaagcucaucgccuggauguccagcaacaucaccuccgagcagguccgcacgaucaucgugaaccacgucaacgacaccuggggccugaaggugcggcagagccugugguuccaccucuccugccugaccuucgggcagcacaccgugcaggaguuccuggucagcuucggcguguggauccgcacgcccgccccguaccggccgcccaacgcgccgauccucuccacccugccggagcacaccgugaucugcuga

SEQ ID NO: 11897 - RNA, 4098 nt, Artificial Sequence
  SARS-CoV-2/Wuhan/WIV05/2019__EPI_ISL_402128 spike protein CDS gc (1-1211)(I712C_T1077C) WhcAg construct
auguucguguuccugguccuccugccccuggugagcucccagugcgugaaccucaccacccgcacgcagcugccgcccgccuacaccaacagcuucacccggggcgucuacuaccccgacaagguguuccgcuccagcgugcugcacuccacccaggaccucuuccugcccuucuucagcaacgucacgugguuccacgccauccacguguccgggaccaacggcaccaagcgguucgacaacccggugcugcccuucaacgacggggucuacuucgcgagcaccgagaaguccaacaucauccgcggcuggaucuucgggacgacccucgacagcaagacccagucccugcugaucgugaacaacgccaccaacguggucaucaaggugugcgaguuccaguucugcaacgaccccuuccucggcguguacuaccacaagaacaacaagagcuggauggaguccgaguuccgggucuacagcuccgccaacaacugcacguucgaguacgugagccagcccuuccugauggaccuggagggcaagcaggggaacuucaagaaccuccgcgaguucguguucaagaacaucgacggcuacuucaagaucuacuccaagcacaccccgaucaaccugguccgggaccugccccagggguucagcgcccucgagccccugguggaccugcccaucggcaucaacaucacccgcuuccagacccuccuggcccugcaccgguccuaccucacgccgggggacagcagcuccggcuggaccgcgggcgccgccgccuacuacgugggguaccugcagccccgcaccuuccugcucaaguacaacgagaacggcaccaucacggacgcggucgacugcgcccuggacccccugagcgagaccaagugcacccucaaguccuucaccguggagaaggggaucuaccagacgagcaacuuccgggugcagcccaccgaguccaucguccgcuucccgaacaucaccaaccugugccccuucggcgagguguucaacgccacccgguucgccagcgucuacgccuggaaccgcaagcggaucuccaacugcguggcggacuacagcgugcuguacaacuccgccagcuucuccacguucaagugcuacggcgucagccccaccaagcucaacgaccugugcuucaccaacguguacgccgacuccuucgugauccgcggggacgagguccggcagaucgcccccggccagaccgggaagaucgccgacuacaacuacaagcugccggacgacuucacgggcugcgugaucgcguggaacagcaacaaccucgacuccaaggucgggggcaacuacaacuaccuguaccgccuguuccgcaagagcaaccucaagcccuucgagcgggacaucuccaccgagaucuaccaggccggcagcacccccugcaacgggguggagggcuucaacugcuacuucccccugcaguccuacggguuccagccgaccaacggcgugggguaccagcccuaccggguggucgugcugagcuucgagcuccugcacgcccccgccacggugugcggccccaagaaguccaccaaccuggucaagaacaagugcgugaacuucaacuucaacggccucaccgggaccggcgugcugaccgagagcaacaagaaguuccugccguuccagcaguucgggcgcgacaucgccgacacgaccgacgcgguccgcgacccccagacccuggagauccucgacaucacccccugcagcuucggcgggguguccgugaucacgccgggcaccaacaccagcaaccaggucgccgugcuguaccaggacgugaacugcaccgagguccccguggccauccacgccgaccagcugacgcccaccuggcggguguacuccaccggcagcaacgucuuccagacccgcgccgggugccucaucggcgcggagcacgugaacaacuccuacgagugcgacauccccaucggggccggcaucugcgccagcuaccagacgcagaccaacuccccgcggcgcgcccggagcguggcgucccagagcaucaucgccuacaccaugucccugggcgccgagaacagcgucgccuacuccaacaacagcugcgccauccccaccaacuucacgaucuccgugaccaccgagauccugcccgugagcaugaccaagacgagcgucgacugcaccauguacaucugcggggacuccaccgagugcagcaaccuccugcugcaguacggcuccuucugcacccagcucaaccgcgcgcugacggggaucgccguggagcaggacaagaacacccaggagguguucgcccaggucaagcagaucuacaagacgcccccgaucaaggacuucggcggguucaacuucagccagauccugcccgaccccuccaagcccagcaagcgguccuucaucgaggaccuccuguucaacaaggugacccuggccgacgccggcuucaucaagcaguacggcgacugccucggggacaucgcggcccgcgaccugaucugcgcccagaaguucaacggccugaccgugcucccgccccugcugaccgacgagaugaucgcccaguacaccagcgcccuccuggcggggaccaucacguccggcuggaccuucggggccggcgccgcccugcagauccccuucgcgaugcagauggccuaccgguucaacggcaucggggucacccagaacgugcucuacgagaaccagaagcugaucgccaaccaguucaacagcgccaucggcaagauccaggacucccugagcuccaccgccagcgcgcucgggaagcugcaggacguggucaaccagaacgcccaggcccugaacacgcucgugaagcagcuguccagcaacuucggcgccaucuccagcgugcugaacgacauccucucccgccuggacaaggucgaggccgaggugcagaucgaccggcugaucaccgggcgccuccagagccugcagaccuacgugacccagcagcugauccgggcggccgagauccgcgccagcgccaaccucgccgcgaccaagauguccgagugcguccugggccagagcaagcggguggacuucugcggcaagggguaccaccugauguccuucccccagagcgccccgcacggcguggucuuccuccacgugacguacguccccgcccaggagaagaacuucaccugcgcccccgcgaucugccacgacgggaaggcccacuucccccgcgagggcguguucguguccaacgggacccacugguucgucacgcagcggaacuucuacgagccgcagaucaucaccaccgacaacaccuucgugagcggcaacugcgacguggucaucggcaucgugaacaacacgguguacgacccccugcagcccgagcuggacuccuucaaggaggagcucgacaaguacuucaagaaccacaccagccccgacgucgaccugggggacaucuccggcaucaacgccagcguggugaacauccagaaggagaucgaccgccugaacgaggucgccaagaaccucaacgagucccugaucgaccugcaggagcucgggaaguacgagcaguacaucaagggcgggggcgggagcgacaucgaccccuacaaggaguucggcagcuccuaccagcugcucaacuuccugccccuggacuucuuccccgaccucaacgcccugguggacaccgccaccgcgcuguacgaggaggagcucacggggcgcgagcacugcagcccccaccacaccgccauccggcaggcccuggucugcugggacgagcugaccaagcucaucgccuggauguccagcaacaucaccuccgagcagguccgcacgaucaucgugaaccacgucaacgacaccuggggccugaaggugcggcagagccugugguuccaccucuccugccugaccuucgggcagcacaccgugcaggaguuccuggucagcuucggcguguggauccgcacgcccgccccguaccggccgcccaacgcgccgauccucuccacccugccggagcacaccgugaucugcuga

SEQ ID NO: 11898 - RNA, 4098 nt, Artificial Sequence
  SARS-CoV-2/Wuhan/WIV05/2019__EPI_ISL_402128 spike protein CDS gc (1-1211)(I714C_Y1110C) WhcAg construct
auguucguguuccugguccuccugccccuggugagcucccagugcgugaaccucaccacccgcacgcagcugccgcccgccuacaccaacagcuucacccggggcgucuacuaccccgacaagguguuccgcuccagcgugcugcacuccacccaggaccucuuccugcccuucuucagcaacgucacgugguuccacgccauccacguguccgggaccaacggcaccaagcgguucgacaacccggugcugcccuucaacgacggggucuacuucgcgagcaccgagaaguccaacaucauccgcggcuggaucuucgggacgacccucgacagcaagacccagucccugcugaucgugaacaacgccaccaacguggucaucaaggugugcgaguuccaguucugcaacgaccccuuccucggcguguacuaccacaagaacaacaagagcuggauggaguccgaguuccgggucuacagcuccgccaacaacugcacguucgaguacgugagccagcccuuccugauggaccuggagggcaagcaggggaacuucaagaaccuccgcgaguucguguucaagaacaucgacggcuacuucaagaucuacuccaagcacaccccgaucaaccugguccgggaccugccccagggguucagcgcccucgagccccugguggaccugcccaucggcaucaacaucacccgcuuccagacccuccuggcccugcaccgguccuaccucacgccgggggacagcagcuccggcuggaccgcgggcgccgccgccuacuacgugggguaccugcagccccgcaccuuccugcucaaguacaacgagaacggcaccaucacggacgcggucgacugcgcccuggacccccugagcgagaccaagugcacccucaaguccuucaccguggagaaggggaucuaccagacgagcaacuuccgggugcagcccaccgaguccaucguccgcuucccgaacaucaccaaccugugccccuucggcgagguguucaacgccacccgguucgccagcgucuacgccuggaaccgcaagcggaucuccaacugcguggcggacuacagcgugcuguacaacuccgccagcuucuccacguucaagugcuacggcgucagccccaccaagcucaacgaccugugcuucaccaacguguacgccgacuccuucgugauccgcggggacgagguccggcagaucgcccccggccagaccgggaagaucgccgacuacaacuacaagcugccggacgacuucacgggcugcgugaucgcguggaacagcaacaaccucgacuccaaggucgggggcaacuacaacuaccuguaccgccuguuccgcaagagcaaccucaagcccuucgagcgggacaucuccaccgagaucuaccaggccggcagcacccccugcaacgggguggagggcuucaacugcuacuucccccugcaguccuacggguuccagccgaccaacggcgugggguaccagcccuaccggguggucgugcugagcuucgagcuccugcacgcccccgccacggugugcggccccaagaaguccaccaaccuggucaagaacaagugcgugaacuucaacuucaacggccucaccgggaccggcgugcugaccgagagcaacaagaaguuccugccguuccagcaguucgggcgcgacaucgccgacacgaccgacgcgguccgcgacccccagacccuggagauccucgacaucacccccugcagcuucggcgggguguccgugaucacgccgggcaccaacaccagcaaccaggucgccgugcuguaccaggacgugaacugcaccgagguccccguggccauccacgccgaccagcugacgcccaccuggcggguguacuccaccggcagcaacgucuuccagacccgcgccgggugccucaucggcgcggagcacgugaacaacuccuacgagugcgacauccccaucggggccggcaucugcgccagcuaccagacgcagaccaacuccccgcggcgcgcccggagcguggcgucccagagcaucaucgccuacaccaugucccugggcgccgagaacagcgucgccuacuccaacaacagcaucgccugccccaccaacuucacgaucuccgugaccaccgagauccugcccgugagcaugaccaagacgagcgucgacugcaccauguacaucugcggggacuccaccgagugcagcaaccuccugcugcaguacggcuccuucugcacccagcucaaccgcgcgcugacggggaucgccguggagcaggacaagaacacccaggagguguucgcccaggucaagcagaucuacaagacgcccccgaucaaggacuucggcggguucaacuucagccagauccugcccgaccccuccaagcccagcaagcgguccuucaucgaggaccuccuguucaacaaggugacccuggccgacgccggcuucaucaagcaguacggcgacugccucggggacaucgcggcccgcgaccugaucugcgcccagaaguucaacggccugaccgugcucccgccccugcugaccgacgagaugaucgcccaguacaccagcgcccuccuggcggggaccaucacguccggcuggaccuucggggccggcgccgcccugcagauccccuucgcgaugcagauggccuaccgguucaacggcaucggggucacccagaacgugcucuacgagaaccagaagcugaucgccaaccaguucaacagcgccaucggcaagauccaggacucccugagcuccaccgccagcgcgcucgggaagcugcaggacguggucaaccagaacgcccaggcccugaacacgcucgugaagcagcuguccagcaacuucggcgccaucuccagcgugcugaacgacauccucucccgccuggacaaggucgaggccgaggugcagaucgaccggcugaucaccgggcgccuccagagccugcagaccuacgugacccagcagcugauccgggcggccgagauccgcgccagcgccaaccucgccgcgaccaagauguccgagugcguccugggccagagcaagcggguggacuucugcggcaagggguaccaccugauguccuucccccagagcgccccgcacggcguggucuuccuccacgugacguacguccccgcccaggagaagaacuucaccaccgcccccgcgaucugccacgacgggaaggcccacuucccccgcgagggcguguucguguccaacgggacccacugguucgucacgcagcggaacuucugcgagccgcagaucaucaccaccgacaacaccuucgugagcggcaacugcgacguggucaucggcaucgugaacaacacgguguacgacccccugcagcccgagcuggacuccuucaaggaggagcucgacaaguacuucaagaaccacaccagccccgacgucgaccugggggacaucuccggcaucaacgccagcguggugaacauccagaaggagaucgaccgccugaacgaggucgccaagaaccucaacgagucccugaucgaccugcaggagcucgggaaguacgagcaguacaucaagggcgggggcgggagcgacaucgaccccuacaaggaguucggcagcuccuaccagcugcucaacuuccugccccuggacuucuuccccgaccucaacgcccugguggacaccgccaccgcgcuguacgaggaggagcucacggggcgcgagcacugcagcccccaccacaccgccauccggcaggcccuggucugcugggacgagcugaccaagcucaucgccuggauguccagcaacaucaccuccgagcagguccgcacgaucaucgugaaccacgucaacgacaccuggggccugaaggugcggcagagccugugguuccaccucuccugccugaccuucgggcagcacaccgugcaggaguuccuggucagcuucggcguguggauccgcacgcccgccccguaccggccgcccaacgcgccgauccucuccacccugccggagcacaccgugaucugcuga

SEQ ID NO: 11899 - RNA, 4098 nt, Artificial Sequence
  SARS-CoV-2/Wuhan/WIV05/2019__EPI_ISL_402128 spike protein CDS gc (1-1211)(P715C_P1069C) WhcAg construct
auguucguguuccugguccuccugccccuggugagcucccagugcgugaaccucaccacccgcacgcagcugccgcccgccuacaccaacagcuucacccggggcgucuacuaccccgacaagguguuccgcuccagcgugcugcacuccacccaggaccucuuccugcccuucuucagcaacgucacgugguuccacgccauccacguguccgggaccaacggcaccaagcgguucgacaacccggugcugcccuucaacgacggggucuacuucgcgagcaccgagaaguccaacaucauccgcggcuggaucuucgggacgacccucgacagcaagacccagucccugcugaucgugaacaacgccaccaacguggucaucaaggugugcgaguuccaguucugcaacgaccccuuccucggcguguacuaccacaagaacaacaagagcuggauggaguccgaguuccgggucuacagcuccgccaacaacugcacguucgaguacgugagccagcccuuccugauggaccuggagggcaagcaggggaacuucaagaaccuccgcgaguucguguucaagaacaucgacggcuacuucaagaucuacuccaagcacaccccgaucaaccugguccgggaccugccccagggguucagcgcccucgagccccugguggaccugcccaucggcaucaacaucacccgcuuccagacccuccuggcccugcaccgguccuaccucacgccgggggacagcagcuccggcuggaccgcgggcgccgccgccuacuacgugggguaccugcagccccgcaccuuccugcucaaguacaacgagaacggcaccaucacggacgcggucgacugcgcccuggacccccugagcgagaccaagugcacccucaaguccuucaccguggagaaggggaucuaccagacgagcaacuuccgggugcagcccaccgaguccaucguccgcuucccgaacaucaccaaccugugccccuucggcgagguguucaacgccacccgguucgccagcgucuacgccuggaaccgcaagcggaucuccaacugcguggcggacuacagcgugcuguacaacuccgccagcuucuccacguucaagugcuacggcgucagccccaccaagcucaacgaccugugcuucaccaacguguacgccgacuccuucgugauccgcggggacgagguccggcagaucgcccccggccagaccgggaagaucgccgacuacaacuacaagcugccggacgacuucacgggcugcgugaucgcguggaacagcaacaaccucgacuccaaggucgggggcaacuacaacuaccuguaccgccuguuccgcaagagcaaccucaagcccuucgagcgggacaucuccaccgagaucuaccaggccggcagcacccccugcaacgggguggagggcuucaacugcuacuucccccugcaguccuacggguuccagccgaccaacggcgugggguaccagcccuaccggguggucgugcugagcuucgagcuccugcacgcccccgccacggugugcggccccaagaaguccaccaaccuggucaagaacaagugcgugaacuucaacuucaacggccucaccgggaccggcgugcugaccgagagcaacaagaaguuccugccguuccagcaguucgggcgcgacaucgccgacacgaccgacgcgguccgcgacccccagacccuggagauccucgacaucacccccugcagcuucggcgggguguccgugaucacgccgggcaccaacaccagcaaccaggucgccgugcuguaccaggacgugaacugcaccgagguccccguggccauccacgccgaccagcugacgcccaccuggcggguguacuccaccggcagcaacgucuuccagacccgcgccgggugccucaucggcgcggagcacgugaacaacuccuacgagugcgacauccccaucggggccggcaucugcgccagcuaccagacgcagaccaacuccccgcggcgcgcccggagcguggcgucccagagcaucaucgccuacaccaugucccugggcgccgagaacagcgucgccuacuccaacaacagcaucgccaucugcaccaacuucacgaucuccgugaccaccgagauccugcccgugagcaugaccaagacgagcgucgacugcaccauguacaucugcggggacuccaccgagugcagcaaccuccugcugcaguacggcuccuucugcacccagcucaaccgcgcgcugacggggaucgccguggagcaggacaagaacacccaggagguguucgcccaggucaagcagaucuacaagacgcccccgaucaaggacuucggcggguucaacuucagccagauccugcccgaccccuccaagcccagcaagcgguccuucaucgaggaccuccuguucaacaaggugacccuggccgacgccggcuucaucaagcaguacggcgacugccucggggacaucgcggcccgcgaccugaucugcgcccagaaguucaacggccugaccgugcucccgccccugcugaccgacgagaugaucgcccaguacaccagcgcccuccuggcggggaccaucacguccggcuggaccuucggggccggcgccgcccugcagauccccuucgcgaugcagauggccuaccgguucaacggcaucggggucacccagaacgugcucuacgagaaccagaagcugaucgccaaccaguucaacagcgccaucggcaagauccaggacucccugagcuccaccgccagcgcgcucgggaagcugcaggacguggucaaccagaacgcccaggcccugaacacgcucgugaagcagcuguccagcaacuucggcgccaucuccagcgugcugaacgacauccucucccgccuggacaaggucgaggccgaggugcagaucgaccggcugaucaccgggcgccuccagagccugcagaccuacgugacccagcagcugauccgggcggccgagauccgcgccagcgccaaccucgccgcgaccaagauguccgagugcguccugggccagagcaagcggguggacuucugcggcaagggguaccaccugauguccuucccccagagcgccccgcacggcguggucuuccuccacgugacguacgucugcgcccaggagaagaacuucaccaccgcccccgcgaucugccacgacgggaaggcccacuucccccgcgagggcguguucguguccaacgggacccacugguucgucacgcagcggaacuucuacgagccgcagaucaucaccaccgacaacaccuucgugagcggcaacugcgacguggucaucggcaucgugaacaacacgguguacgacccccugcagcccgagcuggacuccuucaaggaggagcucgacaaguacuucaagaaccacaccagccccgacgucgaccugggggacaucuccggcaucaacgccagcguggugaacauccagaaggagaucgaccgccugaacgaggucgccaagaaccucaacgagucccugaucgaccugcaggagcucgggaaguacgagcaguacaucaagggcgggggcgggagcgacaucgaccccuacaaggaguucggcagcuccuaccagcugcucaacuuccugccccuggacuucuuccccgaccucaacgcccugguggacaccgccaccgcgcuguacgaggaggagcucacggggcgcgagcacugcagcccccaccacaccgccauccggcaggcccuggucugcugggacgagcugaccaagcucaucgccuggauguccagcaacaucaccuccgagcagguccgcacgaucaucgugaaccacgucaacgacaccuggggccugaaggugcggcagagccugugguuccaccucuccugccugaccuucgggcagcacaccgugcaggaguuccuggucagcuucggcguguggauccgcacgcccgccccguaccggccgcccaacgcgccgauccucuccacccugccggagcacaccgugaucugcuga

SEQ ID NO: 11900 - RNA, 4098 nt, Artificial Sequence
  SARS-CoV-2/Wuhan/WIV05/2019__EPI_ISL_402128 spike protein CDS gc (1-1211)(G889C_L1034C) WhcAg construct
auguucguguuccugguccuccugccccuggugagcucccagugcgugaaccucaccacccgcacgcagcugccgcccgccuacaccaacagcuucacccggggcgucuacuaccccgacaagguguuccgcuccagcgugcugcacuccacccaggaccucuuccugcccuucuucagcaacgucacgugguuccacgccauccacguguccgggaccaacggcaccaagcgguucgacaacccggugcugcccuucaacgacggggucuacuucgcgagcaccgagaaguccaacaucauccgcggcuggaucuucgggacgacccucgacagcaagacccagucccugcugaucgugaacaacgccaccaacguggucaucaaggugugcgaguuccaguucugcaacgaccccuuccucggcguguacuaccacaagaacaacaagagcuggauggaguccgaguuccgggucuacagcuccgccaacaacugcacguucgaguacgugagccagcccuuccugauggaccuggagggcaagcaggggaacuucaagaaccuccgcgaguucguguucaagaacaucgacggcuacuucaagaucuacuccaagcacaccccgaucaaccugguccgggaccugccccagggguucagcgcccucgagccccugguggaccugcccaucggcaucaacaucacccgcuuccagacccuccuggcccugcaccgguccuaccucacgccgggggacagcagcuccggcuggaccgcgggcgccgccgccuacuacgugggguaccugcagccccgcaccuuccugcucaaguacaacgagaacggcaccaucacggacgcggucgacugcgcccuggacccccugagcgagaccaagugcacccucaaguccuucaccguggagaaggggaucuaccagacgagcaacuuccgggugcagcccaccgaguccaucguccgcuucccgaacaucaccaaccugugccccuucggcgagguguucaacgccacccgguucgccagcgucuacgccuggaaccgcaagcggaucuccaacugcguggcggacuacagcgugcuguacaacuccgccagcuucuccacguucaagugcuacggcgucagccccaccaagcucaacgaccugugcuucaccaacguguacgccgacuccuucgugauccgcggggacgagguccggcagaucgcccccggccagaccgggaagaucgccgacuacaacuacaagcugccggacgacuucacgggcugcgugaucgcguggaacagcaacaaccucgacuccaaggucgggggcaacuacaacuaccuguaccgccuguuccgcaagagcaaccucaagcccuucgagcgggacaucuccaccgagaucuaccaggccggcagcacccccugcaacgggguggagggcuucaacugcuacuucccccugcaguccuacggguuccagccgaccaacggcgugggguaccagcccuaccggguggucgugcugagcuucgagcuccugcacgcccccgccacggugugcggccccaagaaguccaccaaccuggucaagaacaagugcgugaacuucaacuucaacggccucaccgggaccggcgugcugaccgagagcaacaagaaguuccugccguuccagcaguucgggcgcgacaucgccgacacgaccgacgcgguccgcgacccccagacccuggagauccucgacaucacccccugcagcuucggcgggguguccgugaucacgccgggcaccaacaccagcaaccaggucgccgugcuguaccaggacgugaacugcaccgagguccccguggccauccacgccgaccagcugacgcccaccuggcggguguacuccaccggcagcaacgucuuccagacccgcgccgggugccucaucggcgcggagcacgugaacaacuccuacgagugcgacauccccaucggggccggcaucugcgccagcuaccagacgcagaccaacuccccgcggcgcgcccggagcguggcgucccagagcaucaucgccuacaccaugucccugggcgccgagaacagcgucgccuacuccaacaacagcaucgccauccccaccaacuucacgaucuccgugaccaccgagauccugcccgugagcaugaccaagacgagcgucgacugcaccauguacaucugcggggacuccaccgagugcagcaaccuccugcugcaguacggcuccuucugcacccagcucaaccgcgcgcugacggggaucgccguggagcaggacaagaacacccaggagguguucgcccaggucaagcagaucuacaagacgcccccgaucaaggacuucggcggguucaacuucagccagauccugcccgaccccuccaagcccagcaagcgguccuucaucgaggaccuccuguucaacaaggugacccuggccgacgccggcuucaucaagcaguacggcgacugccucggggacaucgcggcccgcgaccugaucugcgcccagaaguucaacggccugaccgugcucccgccccugcugaccgacgagaugaucgcccaguacaccagcgcccuccuggcggggaccaucacguccggcuggaccuucugcgccggcgccgcccugcagauccccuucgcgaugcagauggccuaccgguucaacggcaucggggucacccagaacgugcucuacgagaaccagaagcugaucgccaaccaguucaacagcgccaucggcaagauccaggacucccugagcuccaccgccagcgcgcucgggaagcugcaggacguggucaaccagaacgcccaggcccugaacacgcucgugaagcagcuguccagcaacuucggcgccaucuccagcgugcugaacgacauccucucccgccuggacaaggucgaggccgaggugcagaucgaccggcugaucaccgggcgccuccagagccugcagaccuacgugacccagcagcugauccgggcggccgagauccgcgccagcgccaaccucgccgcgaccaagauguccgagugcgucugcggccagagcaagcggguggacuucugcggcaagggguaccaccugauguccuucccccagagcgccccgcacggcguggucuuccuccacgugacguacguccccgcccaggagaagaacuucaccaccgcccccgcgaucugccacgacgggaaggcccacuucccccgcgagggcguguucguguccaacgggacccacugguucgucacgcagcggaacuucuacgagccgcagaucaucaccaccgacaacaccuucgugagcggcaacugcgacguggucaucggcaucgugaacaacacgguguacgacccccugcagcccgagcuggacuccuucaaggaggagcucgacaaguacuucaagaaccacaccagccccgacgucgaccugggggacaucuccggcaucaacgccagcguggugaacauccagaaggagaucgaccgccugaacgaggucgccaagaaccucaacgagucccugaucgaccugcaggagcucgggaaguacgagcaguacaucaagggcgggggcgggagcgacaucgaccccuacaaggaguucggcagcuccuaccagcugcucaacuuccugccccuggacuucuuccccgaccucaacgcccugguggacaccgccaccgcgcuguacgaggaggagcucacggggcgcgagcacugcagcccccaccacaccgccauccggcaggcccuggucugcugggacgagcugaccaagcucaucgccuggauguccagcaacaucaccuccgagcagguccgcacgaucaucgugaaccacgucaacgacaccuggggccugaaggugcggcagagccugugguuccaccucuccugccugaccuucgggcagcacaccgugcaggaguuccuggucagcuucggcguguggauccgcacgcccgccccguaccggccgcccaacgcgccgauccucuccacccugccggagcacaccgugaucugcuga

SEQ ID NO: 11901 - RNA, 4098 nt, Artificial Sequence
  SARS-CoV-2/Wuhan/WIV05/2019__EPI_ISL_402128 spike protein CDS gc (1-1211)(I909C_Y1047C) WhcAg construct
auguucguguuccugguccuccugccccuggugagcucccagugcgugaaccucaccacccgcacgcagcugccgcccgccuacaccaacagcuucacccggggcgucuacuaccccgacaagguguuccgcuccagcgugcugcacuccacccaggaccucuuccugcccuucuucagcaacgucacgugguuccacgccauccacguguccgggaccaacggcaccaagcgguucgacaacccggugcugcccuucaacgacggggucuacuucgcgagcaccgagaaguccaacaucauccgcggcuggaucuucgggacgacccucgacagcaagacccagucccugcugaucgugaacaacgccaccaacguggucaucaaggugugcgaguuccaguucugcaacgaccccuuccucggcguguacuaccacaagaacaacaagagcuggauggaguccgaguuccgggucuacagcuccgccaacaacugcacguucgaguacgugagccagcccuuccugauggaccuggagggcaagcaggggaacuucaagaaccuccgcgaguucguguucaagaacaucgacggcuacuucaagaucuacuccaagcacaccccgaucaaccugguccgggaccugccccagggguucagcgcccucgagccccugguggaccugcccaucggcaucaacaucacccgcuuccagacccuccuggcccugcaccgguccuaccucacgccgggggacagcagcuccggcuggaccgcgggcgccgccgccuacuacgugggguaccugcagccccgcaccuuccugcucaaguacaacgagaacggcaccaucacggacgcggucgacugcgcccuggacccccugagcgagaccaagugcacccucaaguccuucaccguggagaaggggaucuaccagacgagcaacuuccgggugcagcccaccgaguccaucguccgcuucccgaacaucaccaaccugugccccuucggcgagguguucaacgccacccgguucgccagcgucuacgccuggaaccgcaagcggaucuccaacugcguggcggacuacagcgugcuguacaacuccgccagcuucuccacguucaagugcuacggcgucagccccaccaagcucaacgaccugugcuucaccaacguguacgccgacuccuucgugauccgcggggacgagguccggcagaucgcccccggccagaccgggaagaucgccgacuacaacuacaagcugccggacgacuucacgggcugcgugaucgcguggaacagcaacaaccucgacuccaaggucgggggcaacuacaacuaccuguaccgccuguuccgcaagagcaaccucaagcccuucgagcgggacaucuccaccgagaucuaccaggccggcagcacccccugcaacgggguggagggcuucaacugcuacuucccccugcaguccuacggguuccagccgaccaacggcgugggguaccagcccuaccggguggucgugcugagcuucgagcuccugcacgcccccgccacggugugcggccccaagaaguccaccaaccuggucaagaacaagugcgugaacuucaacuucaacggccucaccgggaccggcgugcugaccgagagcaacaagaaguuccugccguuccagcaguucgggcgcgacaucgccgacacgaccgacgcgguccgcgacccccagacccuggagauccucgacaucacccccugcagcuucggcgggguguccgugaucacgccgggcaccaacaccagcaaccaggucgccgugcuguaccaggacgugaacugcaccgagguccccguggccauccacgccgaccagcugacgcccaccuggcggguguacuccaccggcagcaacgucuuccagacccgcgccgggugccucaucggcgcggagcacgugaacaacuccuacgagugcgacauccccaucggggccggcaucugcgccagcuaccagacgcagaccaacuccccgcggcgcgcccggagcguggcgucccagagcaucaucgccuacaccaugucccugggcgccgagaacagcgucgccuacuccaacaacagcaucgccauccccaccaacuucacgaucuccgugaccaccgagauccugcccgugagcaugaccaagacgagcgucgacugcaccauguacaucugcggggacuccaccgagugcagcaaccuccugcugcaguacggcuccuucugcacccagcucaaccgcgcgcugacggggaucgccguggagcaggacaagaacacccaggagguguucgcccaggucaagcagaucuacaagacgcccccgaucaaggacuucggcggguucaacuucagccagauccugcccgaccccuccaagcccagcaagcgguccuucaucgaggaccuccuguucaacaaggugacccuggccgacgccggcuucaucaagcaguacggcgacugccucggggacaucgcggcccgcgaccugaucugcgcccagaaguucaacggccugaccgugcucccgccccugcugaccgacgagaugaucgcccaguacaccagcgcccuccuggcggggaccaucacguccggcuggaccuucggggccggcgccgcccugcagauccccuucgcgaugcagauggccuaccgguucaacggcugcggggucacccagaacgugcucuacgagaaccagaagcugaucgccaaccaguucaacagcgccaucggcaagauccaggacucccugagcuccaccgccagcgcgcucgggaagcugcaggacguggucaaccagaacgcccaggcccugaacacgcucgugaagcagcuguccagcaacuucggcgccaucuccagcgugcugaacgacauccucucccgccuggacaaggucgaggccgaggugcagaucgaccggcugaucaccgggcgccuccagagccugcagaccuacgugacccagcagcugauccgggcggccgagauccgcgccagcgccaaccucgccgcgaccaagauguccgagugcguccugggccagagcaagcggguggacuucugcggcaaggggugccaccugauguccuucccccagagcgccccgcacggcguggucuuccuccacgugacguacguccccgcccaggagaagaacuucaccaccgcccccgcgaucugccacgacgggaaggcccacuucccccgcgagggcguguucguguccaacgggacccacugguucgucacgcagcggaacuucuacgagccgcagaucaucaccaccgacaacaccuucgugagcggcaacugcgacguggucaucggcaucgugaacaacacgguguacgacccccugcagcccgagcuggacuccuucaaggaggagcucgacaaguacuucaagaaccacaccagccccgacgucgaccugggggacaucuccggcaucaacgccagcguggugaacauccagaaggagaucgaccgccugaacgaggucgccaagaaccucaacgagucccugaucgaccugcaggagcucgggaaguacgagcaguacaucaagggcgggggcgggagcgacaucgaccccuacaaggaguucggcagcuccuaccagcugcucaacuuccugccccuggacuucuuccccgaccucaacgcccugguggacaccgccaccgcgcuguacgaggaggagcucacggggcgcgagcacugcagcccccaccacaccgccauccggcaggcccuggucugcugggacgagcugaccaagcucaucgccuggauguccagcaacaucaccuccgagcagguccgcacgaucaucgugaaccacgucaacgacaccuggggccugaaggugcggcagagccugugguuccaccucuccugccugaccuucgggcagcacaccgugcaggaguuccuggucagcuucggcguguggauccgcacgcccgccccguaccggccgcccaacgcgccgauccucuccacccugccggagcacaccgugaucugcuga

SEQ ID NO: 11902 - RNA, 4098 nt, Artificial Sequence
  SARS-CoV-2/Wuhan/WIV05/2019__EPI_ISL_402128 spike protein CDS gc (1-1211)(Q965C_S1003C) WhcAg construct
auguucguguuccugguccuccugccccuggugagcucccagugcgugaaccucaccacccgcacgcagcugccgcccgccuacaccaacagcuucacccggggcgucuacuaccccgacaagguguuccgcuccagcgugcugcacuccacccaggaccucuuccugcccuucuucagcaacgucacgugguuccacgccauccacguguccgggaccaacggcaccaagcgguucgacaacccggugcugcccuucaacgacggggucuacuucgcgagcaccgagaaguccaacaucauccgcggcuggaucuucgggacgacccucgacagcaagacccagucccugcugaucgugaacaacgccaccaacguggucaucaaggugugcgaguuccaguucugcaacgaccccuuccucggcguguacuaccacaagaacaacaagagcuggauggaguccgaguuccgggucuacagcuccgccaacaacugcacguucgaguacgugagccagcccuuccugauggaccuggagggcaagcaggggaacuucaagaaccuccgcgaguucguguucaagaacaucgacggcuacuucaagaucuacuccaagcacaccccgaucaaccugguccgggaccugccccagggguucagcgcccucgagccccugguggaccugcccaucggcaucaacaucacccgcuuccagacccuccuggcccugcaccgguccuaccucacgccgggggacagcagcuccggcuggaccgcgggcgccgccgccuacuacgugggguaccugcagccccgcaccuuccugcucaaguacaacgagaacggcaccaucacggacgcggucgacugcgcccuggacccccugagcgagaccaagugcacccucaaguccuucaccguggagaaggggaucuaccagacgagcaacuuccgggugcagcccaccgaguccaucguccgcuucccgaacaucaccaaccugugccccuucggcgagguguucaacgccacccgguucgccagcgucuacgccuggaaccgcaagcggaucuccaacugcguggcggacuacagcgugcuguacaacuccgccagcuucuccacguucaagugcuacggcgucagccccaccaagcucaacgaccugugcuucaccaacguguacgccgacuccuucgugauccgcggggacgagguccggcagaucgcccccggccagaccgggaagaucgccgacuacaacuacaagcugccggacgacuucacgggcugcgugaucgcguggaacagcaacaaccucgacuccaaggucgggggcaacuacaacuaccuguaccgccuguuccgcaagagcaaccucaagcccuucgagcgggacaucuccaccgagaucuaccaggccggcagcacccccugcaacgggguggagggcuucaacugcuacuucccccugcaguccuacggguuccagccgaccaacggcgugggguaccagcccuaccggguggucgugcugagcuucgagcuccugcacgcccccgccacggugugcggccccaagaaguccaccaaccuggucaagaacaagugcgugaacuucaacuucaacggccucaccgggaccggcgugcugaccgagagcaacaagaaguuccugccguuccagcaguucgggcgcgacaucgccgacacgaccgacgcgguccgcgacccccagacccuggagauccucgacaucacccccugcagcuucggcgggguguccgugaucacgccgggcaccaacaccagcaaccaggucgccgugcuguaccaggacgugaacugcaccgagguccccguggccauccacgccgaccagcugacgcccaccuggcggguguacuccaccggcagcaacgucuuccagacccgcgccgggugccucaucggcgcggagcacgugaacaacuccuacgagugcgacauccccaucggggccggcaucugcgccagcuaccagacgcagaccaacuccccgcggcgcgcccggagcguggcgucccagagcaucaucgccuacaccaugucccugggcgccgagaacagcgucgccuacuccaacaacagcaucgccauccccaccaacuucacgaucuccgugaccaccgagauccugcccgugagcaugaccaagacgagcgucgacugcaccauguacaucugcggggacuccaccgagugcagcaaccuccugcugcaguacggcuccuucugcacccagcucaaccgcgcgcugacggggaucgccguggagcaggacaagaacacccaggagguguucgcccaggucaagcagaucuacaagacgcccccgaucaaggacuucggcggguucaacuucagccagauccugcccgaccccuccaagcccagcaagcgguccuucaucgaggaccuccuguucaacaaggugacccuggccgacgccggcuucaucaagcaguacggcgacugccucggggacaucgcggcccgcgaccugaucugcgcccagaaguucaacggccugaccgugcucccgccccugcugaccgacgagaugaucgcccaguacaccagcgcccuccuggcggggaccaucacguccggcuggaccuucggggccggcgccgcccugcagauccccuucgcgaugcagauggccuaccgguucaacggcaucggggucacccagaacgugcucuacgagaaccagaagcugaucgccaaccaguucaacagcgccaucggcaagauccaggacucccugagcuccaccgccagcgcgcucgggaagcugcaggacguggucaaccagaacgcccaggcccugaacacgcucgugaagugccuguccagcaacuucggcgccaucuccagcgugcugaacgacauccucucccgccuggacaaggucgaggccgaggugcagaucgaccggcugaucaccgggcgccuccagugccugcagaccuacgugacccagcagcugauccgggcggccgagauccgcgccagcgccaaccucgccgcgaccaagauguccgagugcguccugggccagagcaagcggguggacuucugcggcaagggguaccaccugauguccuucccccagagcgccccgcacggcguggucuuccuccacgugacguacguccccgcccaggagaagaacuucaccaccgcccccgcgaucugccacgacgggaaggcccacuucccccgcgagggcguguucguguccaacgggacccacugguucgucacgcagcggaacuucuacgagccgcagaucaucaccaccgacaacaccuucgugagcggcaacugcgacguggucaucggcaucgugaacaacacgguguacgacccccugcagcccgagcuggacuccuucaaggaggagcucgacaaguacuucaagaaccacaccagccccgacgucgaccugggggacaucuccggcaucaacgccagcguggugaacauccagaaggagaucgaccgccugaacgaggucgccaagaaccucaacgagucccugaucgaccugcaggagcucgggaaguacgagcaguacaucaagggcgggggcgggagcgacaucgaccccuacaaggaguucggcagcuccuaccagcugcucaacuuccugccccuggacuucuuccccgaccucaacgcccugguggacaccgccaccgcgcuguacgaggaggagcucacggggcgcgagcacugcagcccccaccacaccgccauccggcaggcccuggucugcugggacgagcugaccaagcucaucgccuggauguccagcaacaucaccuccgagcagguccgcacgaucaucgugaaccacgucaacgacaccuggggccugaaggugcggcagagccugugguuccaccucuccugccugaccuucgggcagcacaccgugcaggaguuccuggucagcuucggcguguggauccgcacgcccgccccguaccggccgcccaacgcgccgauccucuccacccugccggagcacaccgugaucugcuga

SEQ ID NO: 11903 - RNA, 4098 nt, Artificial Sequence
  SARS-CoV-2/Wuhan/WIV05/2019__EPI_ISL_402128 spike protein CDS gc (1-1211)(F970C_G999C) WhcAg construct
auguucguguuccugguccuccugccccuggugagcucccagugcgugaaccucaccacccgcacgcagcugccgcccgccuacaccaacagcuucacccggggcgucuacuaccccgacaagguguuccgcuccagcgugcugcacuccacccaggaccucuuccugcccuucuucagcaacgucacgugguuccacgccauccacguguccgggaccaacggcaccaagcgguucgacaacccggugcugcccuucaacgacggggucuacuucgcgagcaccgagaaguccaacaucauccgcggcuggaucuucgggacgacccucgacagcaagacccagucccugcugaucgugaacaacgccaccaacguggucaucaaggugugcgaguuccaguucugcaacgaccccuuccucggcguguacuaccacaagaacaacaagagcuggauggaguccgaguuccgggucuacagcuccgccaacaacugcacguucgaguacgugagccagcccuuccugauggaccuggagggcaagcaggggaacuucaagaaccuccgcgaguucguguucaagaacaucgacggcuacuucaagaucuacuccaagcacaccccgaucaaccugguccgggaccugccccagggguucagcgcccucgagccccugguggaccugcccaucggcaucaacaucacccgcuuccagacccuccuggcccugcaccgguccuaccucacgccgggggacagcagcuccggcuggaccgcgggcgccgccgccuacuacgugggguaccugcagccccgcaccuuccugcucaaguacaacgagaacggcaccaucacggacgcggucgacugcgcccuggacccccugagcgagaccaagugcacccucaaguccuucaccguggagaaggggaucuaccagacgagcaacuuccgggugcagcccaccgaguccaucguccgcuucccgaacaucaccaaccugugccccuucggcgagguguucaacgccacccgguucgccagcgucuacgccuggaaccgcaagcggaucuccaacugcguggcggacuacagcgugcuguacaacuccgccagcuucuccacguucaagugcuacggcgucagccccaccaagcucaacgaccugugcuucaccaacguguacgccgacuccuucgugauccgcggggacgagguccggcagaucgcccccggccagaccgggaagaucgccgacuacaacuacaagcugccggacgacuucacgggcugcgugaucgcguggaacagcaacaaccucgacuccaaggucgggggcaacuacaacuaccuguaccgccuguuccgcaagagcaaccucaagcccuucgagcgggacaucuccaccgagaucuaccaggccggcagcacccccugcaacgggguggagggcuucaacugcuacuucccccugcaguccuacggguuccagccgaccaacggcgugggguaccagcccuaccggguggucgugcugagcuucgagcuccugcacgcccccgccacggugugcggccccaagaaguccaccaaccuggucaagaacaagugcgugaacuucaacuucaacggccucaccgggaccggcgugcugaccgagagcaacaagaaguuccugccguuccagcaguucgggcgcgacaucgccgacacgaccgacgcgguccgcgacccccagacccuggagauccucgacaucacccccugcagcuucggcgggguguccgugaucacgccgggcaccaacaccagcaaccaggucgccgugcuguaccaggacgugaacugcaccgagguccccguggccauccacgccgaccagcugacgcccaccuggcggguguacuccaccggcagcaacgucuuccagacccgcgccgggugccucaucggcgcggagcacgugaacaacuccuacgagugcgacauccccaucggggccggcaucugcgccagcuaccagacgcagaccaacuccccgcggcgcgcccggagcguggcgucccagagcaucaucgccuacaccaugucccugggcgccgagaacagcgucgccuacuccaacaacagcaucgccauccccaccaacuucacgaucuccgugaccaccgagauccugcccgugagcaugaccaagacgagcgucgacugcaccauguacaucugcggggacuccaccgagugcagcaaccuccugcugcaguacggcuccuucugcacccagcucaaccgcgcgcugacggggaucgccguggagcaggacaagaacacccaggagguguucgcccaggucaagcagaucuacaagacgcccccgaucaaggacuucggcggguucaacuucagccagauccugcccgaccccuccaagcccagcaagcgguccuucaucgaggaccuccuguucaacaaggugacccuggccgacgccggcuucaucaagcaguacggcgacugccucggggacaucgcggcccgcgaccugaucugcgcccagaaguucaacggccugaccgugcucccgccccugcugaccgacgagaugaucgcccaguacaccagcgcccuccuggcggggaccaucacguccggcuggaccuucggggccggcgccgcccugcagauccccuucgcgaugcagauggccuaccgguucaacggcaucggggucacccagaacgugcucuacgagaaccagaagcugaucgccaaccaguucaacagcgccaucggcaagauccaggacucccugagcuccaccgccagcgcgcucgggaagcugcaggacguggucaaccagaacgcccaggcccugaacacgcucgugaagcagcuguccagcaacugcggcgccaucuccagcgugcugaacgacauccucucccgccuggacaaggucgaggccgaggugcagaucgaccggcugaucaccugucgccuccagagccugcagaccuacgugacccagcagcugauccgggcggccgagauccgcgccagcgccaaccucgccgcgaccaagauguccgagugcguccugggccagagcaagcggguggacuucugcggcaagggguaccaccugauguccuucccccagagcgccccgcacggcguggucuuccuccacgugacguacguccccgcccaggagaagaacuucaccaccgcccccgcgaucugccacgacgggaaggcccacuucccccgcgagggcguguucguguccaacgggacccacugguucgucacgcagcggaacuucuacgagccgcagaucaucaccaccgacaacaccuucgugagcggcaacugcgacguggucaucggcaucgugaacaacacgguguacgacccccugcagcccgagcuggacuccuucaaggaggagcucgacaaguacuucaagaaccacaccagccccgacgucgaccugggggacaucuccggcaucaacgccagcguggugaacauccagaaggagaucgaccgccugaacgaggucgccaagaaccucaacgagucccugaucgaccugcaggagcucgggaaguacgagcaguacaucaagggcgggggcgggagcgacaucgaccccuacaaggaguucggcagcuccuaccagcugcucaacuuccugccccuggacuucuuccccgaccucaacgcccugguggacaccgccaccgcgcuguacgaggaggagcucacggggcgcgagcacugcagcccccaccacaccgccauccggcaggcccuggucugcugggacgagcugaccaagcucaucgccuggauguccagcaacaucaccuccgagcagguccgcacgaucaucgugaaccacgucaacgacaccuggggccugaaggugcggcagagccugugguuccaccucuccugccugaccuucgggcagcacaccgugcaggaguuccuggucagcuucggcguguggauccgcacgcccgccccguaccggccgcccaacgcgccgauccucuccacccugccggagcacaccgugaucugcuga

SEQ ID NO: 11904 - RNA, 4098 nt, Artificial Sequence
  SARS-CoV-2/Wuhan/WIV05/2019__EPI_ISL_402128 spike protein CDS gc (1-1211)(A972C_R995C) WhcAg construct
auguucguguuccugguccuccugccccuggugagcucccagugcgugaaccucaccacccgcacgcagcugccgcccgccuacaccaacagcuucacccggggcgucuacuaccccgacaagguguuccgcuccagcgugcugcacuccacccaggaccucuuccugcccuucuucagcaacgucacgugguuccacgccauccacguguccgggaccaacggcaccaagcgguucgacaacccggugcugcccuucaacgacggggucuacuucgcgagcaccgagaaguccaacaucauccgcggcuggaucuucgggacgacccucgacagcaagacccagucccugcugaucgugaacaacgccaccaacguggucaucaaggugugcgaguuccaguucugcaacgaccccuuccucggcguguacuaccacaagaacaacaagagcuggauggaguccgaguuccgggucuacagcuccgccaacaacugcacguucgaguacgugagccagcccuuccugauggaccuggagggcaagcaggggaacuucaagaaccuccgcgaguucguguucaagaacaucgacggcuacuucaagaucuacuccaagcacaccccgaucaaccugguccgggaccugccccagggguucagcgcccucgagccccugguggaccugcccaucggcaucaacaucacccgcuuccagacccuccuggcccugcaccgguccuaccucacgccgggggacagcagcuccggcuggaccgcgggcgccgccgccuacuacgugggguaccugcagccccgcaccuuccugcucaaguacaacgagaacggcaccaucacggacgcggucgacugcgcccuggacccccugagcgagaccaagugcacccucaaguccuucaccguggagaaggggaucuaccagacgagcaacuuccgggugcagcccaccgaguccaucguccgcuucccgaacaucaccaaccugugccccuucggcgagguguucaacgccacccgguucgccagcgucuacgccuggaaccgcaagcggaucuccaacugcguggcggacuacagcgugcuguacaacuccgccagcuucuccacguucaagugcuacggcgucagccccaccaagcucaacgaccugugcuucaccaacguguacgccgacuccuucgugauccgcggggacgagguccggcagaucgcccccggccagaccgggaagaucgccgacuacaacuacaagcugccggacgacuucacgggcugcgugaucgcguggaacagcaacaaccucgacuccaaggucgggggcaacuacaacuaccuguaccgccuguuccgcaagagcaaccucaagcccuucgagcgggacaucuccaccgagaucuaccaggccggcagcacccccugcaacgggguggagggcuucaacugcuacuucccccugcaguccuacggguuccagccgaccaacggcgugggguaccagcccuaccggguggucgugcugagcuucgagcuccugcacgcccccgccacggugugcggccccaagaaguccaccaaccuggucaagaacaagugcgugaacuucaacuucaacggccucaccgggaccggcgugcugaccgagagcaacaagaaguuccugccguuccagcaguucgggcgcgacaucgccgacacgaccgacgcgguccgcgacccccagacccuggagauccucgacaucacccccugcagcuucggcgggguguccgugaucacgccgggcaccaacaccagcaaccaggucgccgugcuguaccaggacgugaacugcaccgagguccccguggccauccacgccgaccagcugacgcccaccuggcggguguacuccaccggcagcaacgucuuccagacccgcgccgggugccucaucggcgcggagcacgugaacaacuccuacgagugcgacauccccaucggggccggcaucugcgccagcuaccagacgcagaccaacuccccgcggcgcgcccggagcguggcgucccagagcaucaucgccuacaccaugucccugggcgccgagaacagcgucgccuacuccaacaacagcaucgccauccccaccaacuucacgaucuccgugaccaccgagauccugcccgugagcaugaccaagacgagcgucgacugcaccauguacaucugcggggacuccaccgagugcagcaaccuccugcugcaguacggcuccuucugcacccagcucaaccgcgcgcugacggggaucgccguggagcaggacaagaacacccaggagguguucgcccaggucaagcagaucuacaagacgcccccgaucaaggacuucggcggguucaacuucagccagauccugcccgaccccuccaagcccagcaagcgguccuucaucgaggaccuccuguucaacaaggugacccuggccgacgccggcuucaucaagcaguacggcgacugccucggggacaucgcggcccgcgaccugaucugcgcccagaaguucaacggccugaccgugcucccgccccugcugaccgacgagaugaucgcccaguacaccagcgcccuccuggcggggaccaucacguccggcuggaccuucggggccggcgccgcccugcagauccccuucgcgaugcagauggccuaccgguucaacggcaucggggucacccagaacgugcucuacgagaaccagaagcugaucgccaaccaguucaacagcgccaucggcaagauccaggacucccugagcuccaccgccagcgcgcucgggaagcugcaggacguggucaaccagaacgcccaggcccugaacacgcucgugaagcagcuguccagcaacuucggcugcaucuccagcgugcugaacgacauccucucccgccuggacaaggucgaggccgaggugcagaucgacugccugaucaccgggcgccuccagagccugcagaccuacgugacccagcagcugauccgggcggccgagauccgcgccagcgccaaccucgccgcgaccaagauguccgagugcguccugggccagagcaagcggguggacuucugcggcaagggguaccaccugauguccuucccccagagcgccccgcacggcguggucuuccuccacgugacguacguccccgcccaggagaagaacuucaccaccgcccccgcgaucugccacgacgggaaggcccacuucccccgcgagggcguguucguguccaacgggacccacugguucgucacgcagcggaacuucuacgagccgcagaucaucaccaccgacaacaccuucgugagcggcaacugcgacguggucaucggcaucgugaacaacacgguguacgacccccugcagcccgagcuggacuccuucaaggaggagcucgacaaguacuucaagaaccacaccagccccgacgucgaccugggggacaucuccggcaucaacgccagcguggugaacauccagaaggagaucgaccgccugaacgaggucgccaagaaccucaacgagucccugaucgaccugcaggagcucgggaaguacgagcaguacaucaagggcgggggcgggagcgacaucgaccccuacaaggaguucggcagcuccuaccagcugcucaacuuccugccccuggacuucuuccccgaccucaacgcccugguggacaccgccaccgcgcuguacgaggaggagcucacggggcgcgagcacugcagcccccaccacaccgccauccggcaggcccuggucugcugggacgagcugaccaagcucaucgccuggauguccagcaacaucaccuccgagcagguccgcacgaucaucgugaaccacgucaacgacaccuggggccugaaggugcggcagagccugugguuccaccucuccugccugaccuucgggcagcacaccgugcaggaguuccuggucagcuucggcguguggauccgcacgcccgccccguaccggccgcccaacgcgccgauccucuccacccugccggagcacaccgugaucugcuga

SEQ ID NO: 11905 - RNA, 4098 nt, Artificial Sequence
  SARS-CoV-2/Wuhan/WIV05/2019__EPI_ISL_402128 spike protein CDS gc (1-1211)(A890C_V1040C) WhcAg construct
auguucguguuccugguccuccugccccuggugagcucccagugcgugaaccucaccacccgcacgcagcugccgcccgccuacaccaacagcuucacccggggcgucuacuaccccgacaagguguuccgcuccagcgugcugcacuccacccaggaccucuuccugcccuucuucagcaacgucacgugguuccacgccauccacguguccgggaccaacggcaccaagcgguucgacaacccggugcugcccuucaacgacggggucuacuucgcgagcaccgagaaguccaacaucauccgcggcuggaucuucgggacgacccucgacagcaagacccagucccugcugaucgugaacaacgccaccaacguggucaucaaggugugcgaguuccaguucugcaacgaccccuuccucggcguguacuaccacaagaacaacaagagcuggauggaguccgaguuccgggucuacagcuccgccaacaacugcacguucgaguacgugagccagcccuuccugauggaccuggagggcaagcaggggaacuucaagaaccuccgcgaguucguguucaagaacaucgacggcuacuucaagaucuacuccaagcacaccccgaucaaccugguccgggaccugccccagggguucagcgcccucgagccccugguggaccugcccaucggcaucaacaucacccgcuuccagacccuccuggcccugcaccgguccuaccucacgccgggggacagcagcuccggcuggaccgcgggcgccgccgccuacuacgugggguaccugcagccccgcaccuuccugcucaaguacaacgagaacggcaccaucacggacgcggucgacugcgcccuggacccccugagcgagaccaagugcacccucaaguccuucaccguggagaaggggaucuaccagacgagcaacuuccgggugcagcccaccgaguccaucguccgcuucccgaacaucaccaaccugugccccuucggcgagguguucaacgccacccgguucgccagcgucuacgccuggaaccgcaagcggaucuccaacugcguggcggacuacagcgugcuguacaacuccgccagcuucuccacguucaagugcuacggcgucagccccaccaagcucaacgaccugugcuucaccaacguguacgccgacuccuucgugauccgcggggacgagguccggcagaucgcccccggccagaccgggaagaucgccgacuacaacuacaagcugccggacgacuucacgggcugcgugaucgcguggaacagcaacaaccucgacuccaaggucgggggcaacuacaacuaccuguaccgccuguuccgcaagagcaaccucaagcccuucgagcgggacaucuccaccgagaucuaccaggccggcagcacccccugcaacgggguggagggcuucaacugcuacuucccccugcaguccuacggguuccagccgaccaacggcgugggguaccagcccuaccggguggucgugcugagcuucgagcuccugcacgcccccgccacggugugcggccccaagaaguccaccaaccuggucaagaacaagugcgugaacuucaacuucaacggccucaccgggaccggcgugcugaccgagagcaacaagaaguuccugccguuccagcaguucgggcgcgacaucgccgacacgaccgacgcgguccgcgacccccagacccuggagauccucgacaucacccccugcagcuucggcgggguguccgugaucacgccgggcaccaacaccagcaaccaggucgccgugcuguaccaggacgugaacugcaccgagguccccguggccauccacgccgaccagcugacgcccaccuggcggguguacuccaccggcagcaacgucuuccagacccgcgccgggugccucaucggcgcggagcacgugaacaacuccuacgagugcgacauccccaucggggccggcaucugcgccagcuaccagacgcagaccaacuccccgcggcgcgcccggagcguggcgucccagagcaucaucgccuacaccaugucccugggcgccgagaacagcgucgccuacuccaacaacagcaucgccauccccaccaacuucacgaucuccgugaccaccgagauccugcccgugagcaugaccaagacgagcgucgacugcaccauguacaucugcggggacuccaccgagugcagcaaccuccugcugcaguacggcuccuucugcacccagcucaaccgcgcgcugacggggaucgccguggagcaggacaagaacacccaggagguguucgcccaggucaagcagaucuacaagacgcccccgaucaaggacuucggcggguucaacuucagccagauccugcccgaccccuccaagcccagcaagcgguccuucaucgaggaccuccuguucaacaaggugacccuggccgacgccggcuucaucaagcaguacggcgacugccucggggacaucgcggcccgcgaccugaucugcgcccagaaguucaacggccugaccgugcucccgccccugcugaccgacgagaugaucgcccaguacaccagcgcccuccuggcggggaccaucacguccggcuggaccuucgggugcggcgccgcccugcagauccccuucgcgaugcagauggccuaccgguucaacggcaucggggucacccagaacgugcucuacgagaaccagaagcugaucgccaaccaguucaacagcgccaucggcaagauccaggacucccugagcuccaccgccagcgcgcucgggaagcugcaggacguggucaaccagaacgcccaggcccugaacacgcucgugaagcagcuguccagcaacuucggcgccaucuccagcgugcugaacgacauccucucccgccuggacaaggucgaggccgaggugcagaucgaccggcugaucaccgggcgccuccagagccugcagaccuacgugacccagcagcugauccgggcggccgagauccgcgccagcgccaaccucgccgcgaccaagauguccgagugcguccugggccagagcaagcggugcgacuucugcggcaagggguaccaccugauguccuucccccagagcgccccgcacggcguggucuuccuccacgugacguacguccccgcccaggagaagaacuucaccaccgcccccgcgaucugccacgacgggaaggcccacuucccccgcgagggcguguucguguccaacgggacccacugguucgucacgcagcggaacuucuacgagccgcagaucaucaccaccgacaacaccuucgugagcggcaacugcgacguggucaucggcaucgugaacaacacgguguacgacccccugcagcccgagcuggacuccuucaaggaggagcucgacaaguacuucaagaaccacaccagccccgacgucgaccugggggacaucuccggcaucaacgccagcguggugaacauccagaaggagaucgaccgccugaacgaggucgccaagaaccucaacgagucccugaucgaccugcaggagcucgggaaguacgagcaguacaucaagggcgggggcgggagcgacaucgaccccuacaaggaguucggcagcuccuaccagcugcucaacuuccugccccuggacuucuuccccgaccucaacgcccugguggacaccgccaccgcgcuguacgaggaggagcucacggggcgcgagcacugcagcccccaccacaccgccauccggcaggcccuggucugcugggacgagcugaccaagcucaucgccuggauguccagcaacaucaccuccgagcagguccgcacgaucaucgugaaccacgucaacgacaccuggggccugaaggugcggcagagccugugguuccaccucuccugccugaccuucgggcagcacaccgugcaggaguuccuggucagcuucggcguguggauccgcacgcccgccccguaccggccgcccaacgcgccgauccucuccacccugccggagcacaccgugaucugcuga

SEQ ID NO: 11906 - RNA, 4098 nt, Artificial Sequence
  SARS-CoV-2/Wuhan/WIV05/2019__EPI_ISL_402128 spike protein CDS gc (1-1211)(T874C_S1055C) WhcAg construct
auguucguguuccugguccuccugccccuggugagcucccagugcgugaaccucaccacccgcacgcagcugccgcccgccuacaccaacagcuucacccggggcgucuacuaccccgacaagguguuccgcuccagcgugcugcacuccacccaggaccucuuccugcccuucuucagcaacgucacgugguuccacgccauccacguguccgggaccaacggcaccaagcgguucgacaacccggugcugcccuucaacgacggggucuacuucgcgagcaccgagaaguccaacaucauccgcggcuggaucuucgggacgacccucgacagcaagacccagucccugcugaucgugaacaacgccaccaacguggucaucaaggugugcgaguuccaguucugcaacgaccccuuccucggcguguacuaccacaagaacaacaagagcuggauggaguccgaguuccgggucuacagcuccgccaacaacugcacguucgaguacgugagccagcccuuccugauggaccuggagggcaagcaggggaacuucaagaaccuccgcgaguucguguucaagaacaucgacggcuacuucaagaucuacuccaagcacaccccgaucaaccugguccgggaccugccccagggguucagcgcccucgagccccugguggaccugcccaucggcaucaacaucacccgcuuccagacccuccuggcccugcaccgguccuaccucacgccgggggacagcagcuccggcuggaccgcgggcgccgccgccuacuacgugggguaccugcagccccgcaccuuccugcucaaguacaacgagaacggcaccaucacggacgcggucgacugcgcccuggacccccugagcgagaccaagugcacccucaaguccuucaccguggagaaggggaucuaccagacgagcaacuuccgggugcagcccaccgaguccaucguccgcuucccgaacaucaccaaccugugccccuucggcgagguguucaacgccacccgguucgccagcgucuacgccuggaaccgcaagcggaucuccaacugcguggcggacuacagcgugcuguacaacuccgccagcuucuccacguucaagugcuacggcgucagccccaccaagcucaacgaccugugcuucaccaacguguacgccgacuccuucgugauccgcggggacgagguccggcagaucgcccccggccagaccgggaagaucgccgacuacaacuacaagcugccggacgacuucacgggcugcgugaucgcguggaacagcaacaaccucgacuccaaggucgggggcaacuacaacuaccuguaccgccuguuccgcaagagcaaccucaagcccuucgagcgggacaucuccaccgagaucuaccaggccggcagcacccccugcaacgggguggagggcuucaacugcuacuucccccugcaguccuacggguuccagccgaccaacggcgugggguaccagcccuaccggguggucgugcugagcuucgagcuccugcacgcccccgccacggugugcggccccaagaaguccaccaaccuggucaagaacaagugcgugaacuucaacuucaacggccucaccgggaccggcgugcugaccgagagcaacaagaaguuccugccguuccagcaguucgggcgcgacaucgccgacacgaccgacgcgguccgcgacccccagacccuggagauccucgacaucacccccugcagcuucggcgggguguccgugaucacgccgggcaccaacaccagcaaccaggucgccgugcuguaccaggacgugaacugcaccgagguccccguggccauccacgccgaccagcugacgcccaccuggcggguguacuccaccggcagcaacgucuuccagacccgcgccgggugccucaucggcgcggagcacgugaacaacuccuacgagugcgacauccccaucggggccggcaucugcgccagcuaccagacgcagaccaacuccccgcggcgcgcccggagcguggcgucccagagcaucaucgccuacaccaugucccugggcgccgagaacagcgucgccuacuccaacaacagcaucgccauccccaccaacuucacgaucuccgugaccaccgagauccugcccgugagcaugaccaagacgagcgucgacugcaccauguacaucugcggggacuccaccgagugcagcaaccuccugcugcaguacggcuccuucugcacccagcucaaccgcgcgcugacggggaucgccguggagcaggacaagaacacccaggagguguucgcccaggucaagcagaucuacaagacgcccccgaucaaggacuucggcggguucaacuucagccagauccugcccgaccccuccaagcccagcaagcgguccuucaucgaggaccuccuguucaacaaggugacccuggccgacgccggcuucaucaagcaguacggcgacugccucggggacaucgcggcccgcgaccugaucugcgcccagaaguucaacggccugaccgugcucccgccccugcugaccgacgagaugaucgcccaguacugcagcgcccuccuggcggggaccaucacguccggcuggaccuucggggccggcgccgcccugcagauccccuucgcgaugcagauggccuaccgguucaacggcaucggggucacccagaacgugcucuacgagaaccagaagcugaucgccaaccaguucaacagcgccaucggcaagauccaggacucccugagcuccaccgccagcgcgcucgggaagcugcaggacguggucaaccagaacgcccaggcccugaacacgcucgugaagcagcuguccagcaacuucggcgccaucuccagcgugcugaacgacauccucucccgccuggacaaggucgaggccgaggugcagaucgaccggcugaucaccgggcgccuccagagccugcagaccuacgugacccagcagcugauccgggcggccgagauccgcgccagcgccaaccucgccgcgaccaagauguccgagugcguccugggccagagcaagcggguggacuucugcggcaagggguaccaccugauguccuucccccagugcgccccgcacggcguggucuuccuccacgugacguacguccccgcccaggagaagaacuucaccaccgcccccgcgaucugccacgacgggaaggcccacuucccccgcgagggcguguucguguccaacgggacccacugguucgucacgcagcggaacuucuacgagccgcagaucaucaccaccgacaacaccuucgugagcggcaacugcgacguggucaucggcaucgugaacaacacgguguacgacccccugcagcccgagcuggacuccuucaaggaggagcucgacaaguacuucaagaaccacaccagccccgacgucgaccugggggacaucuccggcaucaacgccagcguggugaacauccagaaggagaucgaccgccugaacgaggucgccaagaaccucaacgagucccugaucgaccugcaggagcucgggaaguacgagcaguacaucaagggcgggggcgggagcgacaucgaccccuacaaggaguucggcagcuccuaccagcugcucaacuuccugccccuggacuucuuccccgaccucaacgcccugguggacaccgccaccgcgcuguacgaggaggagcucacggggcgcgagcacugcagcccccaccacaccgccauccggcaggcccuggucugcugggacgagcugaccaagcucaucgccuggauguccagcaacaucaccuccgagcagguccgcacgaucaucgugaaccacgucaacgacaccuggggccugaaggugcggcagagccugugguuccaccucuccugccugaccuucgggcagcacaccgugcaggaguuccuggucagcuucggcguguggauccgcacgcccgccccguaccggccgcccaacgcgccgauccucuccacccugccggagcacaccgugaucugcuga

SEQ ID NO: 11907 - RNA, 3924 nt, Artificial Sequence
  SARS-CoV-2/Wuhan/WIV05/2019__EPI_ISL_402128 spike protein CDS gc (1-1147) LumSynth construct
auguucguguuccugguccuccugccccuggugagcucccagugcgugaaccucaccacccgcacgcagcugccgcccgccuacaccaacagcuucacccggggcgucuacuaccccgacaagguguuccgcuccagcgugcugcacuccacccaggaccucuuccugcccuucuucagcaacgucacgugguuccacgccauccacguguccgggaccaacggcaccaagcgguucgacaacccggugcugcccuucaacgacggggucuacuucgcgagcaccgagaaguccaacaucauccgcggcuggaucuucgggacgacccucgacagcaagacccagucccugcugaucgugaacaacgccaccaacguggucaucaaggugugcgaguuccaguucugcaacgaccccuuccucggcguguacuaccacaagaacaacaagagcuggauggaguccgaguuccgggucuacagcuccgccaacaacugcacguucgaguacgugagccagcccuuccugauggaccuggagggcaagcaggggaacuucaagaaccuccgcgaguucguguucaagaacaucgacggcuacuucaagaucuacuccaagcacaccccgaucaaccugguccgggaccugccccagggguucagcgcccucgagccccugguggaccugcccaucggcaucaacaucacccgcuuccagacccuccuggcccugcaccgguccuaccucacgccgggggacagcagcuccggcuggaccgcgggcgccgccgccuacuacgugggguaccugcagccccgcaccuuccugcucaaguacaacgagaacggcaccaucacggacgcggucgacugcgcccuggacccccugagcgagaccaagugcacccucaaguccuucaccguggagaaggggaucuaccagacgagcaacuuccgggugcagcccaccgaguccaucguccgcuucccgaacaucaccaaccugugccccuucggcgagguguucaacgccacccgguucgccagcgucuacgccuggaaccgcaagcggaucuccaacugcguggcggacuacagcgugcuguacaacuccgccagcuucuccacguucaagugcuacggcgucagccccaccaagcucaacgaccugugcuucaccaacguguacgccgacuccuucgugauccgcggggacgagguccggcagaucgcccccggccagaccgggaagaucgccgacuacaacuacaagcugccggacgacuucacgggcugcgugaucgcguggaacagcaacaaccucgacuccaaggucgggggcaacuacaacuaccuguaccgccuguuccgcaagagcaaccucaagcccuucgagcgggacaucuccaccgagaucuaccaggccggcagcacccccugcaacgggguggagggcuucaacugcuacuucccccugcaguccuacggguuccagccgaccaacggcgugggguaccagcccuaccggguggucgugcugagcuucgagcuccugcacgcccccgccacggugugcggccccaagaaguccaccaaccuggucaagaacaagugcgugaacuucaacuucaacggccucaccgggaccggcgugcugaccgagagcaacaagaaguuccugccguuccagcaguucgggcgcgacaucgccgacacgaccgacgcgguccgcgacccccagacccuggagauccucgacaucacccccugcagcuucggcgggguguccgugaucacgccgggcaccaacaccagcaaccaggucgccgugcuguaccaggacgugaacugcaccgagguccccguggccauccacgccgaccagcugacgcccaccuggcggguguacuccaccggcagcaacgucuuccagacccgcgccgggugccucaucggcgcggagcacgugaacaacuccuacgagugcgacauccccaucggggccggcaucugcgccagcuaccagacgcagaccaacuccccgcggcgcgcccggagcguggcgucccagagcaucaucgccuacaccaugucccugggcgccgagaacagcgucgccuacuccaacaacagcaucgccauccccaccaacuucacgaucuccgugaccaccgagauccugcccgugagcaugaccaagacgagcgucgacugcaccauguacaucugcggggacuccaccgagugcagcaaccuccugcugcaguacggcuccuucugcacccagcucaaccgcgcgcugacggggaucgccguggagcaggacaagaacacccaggagguguucgcccaggucaagcagaucuacaagacgcccccgaucaaggacuucggcggguucaacuucagccagauccugcccgaccccuccaagcccagcaagcgguccuucaucgaggaccuccuguucaacaaggugacccuggccgacgccggcuucaucaagcaguacggcgacugccucggggacaucgcggcccgcgaccugaucugcgcccagaaguucaacggccugaccgugcucccgccccugcugaccgacgagaugaucgcccaguacaccagcgcccuccuggcggggaccaucacguccggcuggaccuucggggccggcgccgcccugcagauccccuucgcgaugcagauggccuaccgguucaacggcaucggggucacccagaacgugcucuacgagaaccagaagcugaucgccaaccaguucaacagcgccaucggcaagauccaggacucccugagcuccaccgccagcgcgcucgggaagcugcaggacguggucaaccagaacgcccaggcccugaacacgcucgugaagcagcuguccagcaacuucggcgccaucuccagcgugcugaacgacauccucucccgccuggacaaggucgaggccgaggugcagaucgaccggcugaucaccgggcgccuccagagccugcagaccuacgugacccagcagcugauccgggcggccgagauccgcgccagcgccaaccucgccgcgaccaagauguccgagugcguccugggccagagcaagcggguggacuucugcggcaagggguaccaccugauguccuucccccagagcgccccgcacggcguggucuuccuccacgugacguacguccccgcccaggagaagaacuucaccaccgcccccgcgaucugccacgacgggaaggcccacuucccccgcgagggcguguucguguccaacgggacccacugguucgucacgcagcggaacuucuacgagccgcagaucaucaccaccgacaacaccuucgugagcggcaacugcgacguggucaucggcaucgugaacaacacgguguacgacccccugcagcccgagcuggacuccggcggcgggagcgggggcgggcagaucuacgagggcaagcugaccgccgaggggcuccgcuucggcaucguggccagccgguucaaccacgcgcuggucgaccgccugguggagggggccaucgacgccaucgugcggcacggcgggcgcgaggaggacaucacccucguccgggugcccggcuccugggagaucccgguggccgccggcgagcuggcccgcaaggaggacaucgacgcggucaucgccaucggggugcugauccggggcgccacgccccacuucgacuacaucgccagcgagguguccaaggggcucgcggaccugagccuggagcuccgcaagcccaucaccuucggcgucaucaccgccgacacccuggagcaggccaucgagcgggccgggacgaagcacggcaacaagggcugggaggccgcgcuguccgccaucgagauggccaaccucuucaagagccugcgcuga

SEQ ID NO: 11908 - RNA, 3924 nt, Artificial Sequence
  SARS-CoV-2/Wuhan/WIV05/2019__EPI_ISL_402128 spike protein CDS gc (1-1147)(K986P_V987P) LumSynth construct
auguucguguuccugguccuccugccccuggugagcucccagugcgugaaccucaccacccgcacgcagcugccgcccgccuacaccaacagcuucacccggggcgucuacuaccccgacaagguguuccgcuccagcgugcugcacuccacccaggaccucuuccugcccuucuucagcaacgucacgugguuccacgccauccacguguccgggaccaacggcaccaagcgguucgacaacccggugcugcccuucaacgacggggucuacuucgcgagcaccgagaaguccaacaucauccgcggcuggaucuucgggacgacccucgacagcaagacccagucccugcugaucgugaacaacgccaccaacguggucaucaaggugugcgaguuccaguucugcaacgaccccuuccucggcguguacuaccacaagaacaacaagagcuggauggaguccgaguuccgggucuacagcuccgccaacaacugcacguucgaguacgugagccagcccuuccugauggaccuggagggcaagcaggggaacuucaagaaccuccgcgaguucguguucaagaacaucgacggcuacuucaagaucuacuccaagcacaccccgaucaaccugguccgggaccugccccagggguucagcgcccucgagccccugguggaccugcccaucggcaucaacaucacccgcuuccagacccuccuggcccugcaccgguccuaccucacgccgggggacagcagcuccggcuggaccgcgggcgccgccgccuacuacgugggguaccugcagccccgcaccuuccugcucaaguacaacgagaacggcaccaucacggacgcggucgacugcgcccuggacccccugagcgagaccaagugcacccucaaguccuucaccguggagaaggggaucuaccagacgagcaacuuccgggugcagcccaccgaguccaucguccgcuucccgaacaucaccaaccugugccccuucggcgagguguucaacgccacccgguucgccagcgucuacgccuggaaccgcaagcggaucuccaacugcguggcggacuacagcgugcuguacaacuccgccagcuucuccacguucaagugcuacggcgucagccccaccaagcucaacgaccugugcuucaccaacguguacgccgacuccuucgugauccgcggggacgagguccggcagaucgcccccggccagaccgggaagaucgccgacuacaacuacaagcugccggacgacuucacgggcugcgugaucgcguggaacagcaacaaccucgacuccaaggucgggggcaacuacaacuaccuguaccgccuguuccgcaagagcaaccucaagcccuucgagcgggacaucuccaccgagaucuaccaggccggcagcacccccugcaacgggguggagggcuucaacugcuacuucccccugcaguccuacggguuccagccgaccaacggcgugggguaccagcccuaccggguggucgugcugagcuucgagcuccugcacgcccccgccacggugugcggccccaagaaguccaccaaccuggucaagaacaagugcgugaacuucaacuucaacggccucaccgggaccggcgugcugaccgagagcaacaagaaguuccugccguuccagcaguucgggcgcgacaucgccgacacgaccgacgcgguccgcgacccccagacccuggagauccucgacaucacccccugcagcuucggcgggguguccgugaucacgccgggcaccaacaccagcaaccaggucgccgugcuguaccaggacgugaacugcaccgagguccccguggccauccacgccgaccagcugacgcccaccuggcggguguacuccaccggcagcaacgucuuccagacccgcgccgggugccucaucggcgcggagcacgugaacaacuccuacgagugcgacauccccaucggggccggcaucugcgccagcuaccagacgcagaccaacuccccgcggcgcgcccggagcguggcgucccagagcaucaucgccuacaccaugucccugggcgccgagaacagcgucgccuacuccaacaacagcaucgccauccccaccaacuucacgaucuccgugaccaccgagauccugcccgugagcaugaccaagacgagcgucgacugcaccauguacaucugcggggacuccaccgagugcagcaaccuccugcugcaguacggcuccuucugcacccagcucaaccgcgcgcugacggggaucgccguggagcaggacaagaacacccaggagguguucgcccaggucaagcagaucuacaagacgcccccgaucaaggacuucggcggguucaacuucagccagauccugcccgaccccuccaagcccagcaagcgguccuucaucgaggaccuccuguucaacaaggugacccuggccgacgccggcuucaucaagcaguacggcgacugccucggggacaucgcggcccgcgaccugaucugcgcccagaaguucaacggccugaccgugcucccgccccugcugaccgacgagaugaucgcccaguacaccagcgcccuccuggcggggaccaucacguccggcuggaccuucggggccggcgccgcccugcagauccccuucgcgaugcagauggccuaccgguucaacggcaucggggucacccagaacgugcucuacgagaaccagaagcugaucgccaaccaguucaacagcgccaucggcaagauccaggacucccugagcuccaccgccagcgcgcucgggaagcugcaggacguggucaaccagaacgcccaggcccugaacacgcucgugaagcagcuguccagcaacuucggcgccaucuccagcgugcugaacgacauccucucccgccuggacccgcccgaggccgaggugcagaucgaccggcugaucaccgggcgccuccagagccugcagaccuacgugacccagcagcugauccgggcggccgagauccgcgccagcgccaaccucgccgcgaccaagauguccgagugcguccugggccagagcaagcggguggacuucugcggcaagggguaccaccugauguccuucccccagagcgccccgcacggcguggucuuccuccacgugacguacguccccgcccaggagaagaacuucaccaccgcccccgcgaucugccacgacgggaaggcccacuucccccgcgagggcguguucguguccaacgggacccacugguucgucacgcagcggaacuucuacgagccgcagaucaucaccaccgacaacaccuucgugagcggcaacugcgacguggucaucggcaucgugaacaacacgguguacgacccccugcagcccgagcuggacuccggcggcgggagcgggggcgggcagaucuacgagggcaagcugaccgccgaggggcuccgcuucggcaucguggccagccgguucaaccacgcgcuggucgaccgccugguggagggggccaucgacgccaucgugcggcacggcgggcgcgaggaggacaucacccucguccgggugcccggcuccugggagaucccgguggccgccggcgagcuggcccgcaaggaggacaucgacgcggucaucgccaucggggugcugauccggggcgccacgccccacuucgacuacaucgccagcgagguguccaaggggcucgcggaccugagccuggagcuccgcaagcccaucaccuucggcgucaucaccgccgacacccuggagcaggccaucgagcgggccgggacgaagcacggcaacaagggcugggaggccgcgcuguccgccaucgagauggccaaccucuucaagagccugcgcuga

SEQ ID NO: 11909 - RNA, 3924 nt, Artificial Sequence
  SARS-CoV-2/Wuhan/WIV05/2019__EPI_ISL_402128 spike protein CDS gc (1-1147)(K986P_V987P_T887WN_A1020W) LumSynth construct
auguucguguuccugguccuccugccccuggugagcucccagugcgugaaccucaccacccgcacgcagcugccgcccgccuacaccaacagcuucacccggggcgucuacuaccccgacaagguguuccgcuccagcgugcugcacuccacccaggaccucuuccugcccuucuucagcaacgucacgugguuccacgccauccacguguccgggaccaacggcaccaagcgguucgacaacccggugcugcccuucaacgacggggucuacuucgcgagcaccgagaaguccaacaucauccgcggcuggaucuucgggacgacccucgacagcaagacccagucccugcugaucgugaacaacgccaccaacguggucaucaaggugugcgaguuccaguucugcaacgaccccuuccucggcguguacuaccacaagaacaacaagagcuggauggaguccgaguuccgggucuacagcuccgccaacaacugcacguucgaguacgugagccagcccuuccugauggaccuggagggcaagcaggggaacuucaagaaccuccgcgaguucguguucaagaacaucgacggcuacuucaagaucuacuccaagcacaccccgaucaaccugguccgggaccugccccagggguucagcgcccucgagccccugguggaccugcccaucggcaucaacaucacccgcuuccagacccuccuggcccugcaccgguccuaccucacgccgggggacagcagcuccggcuggaccgcgggcgccgccgccuacuacgugggguaccugcagccccgcaccuuccugcucaaguacaacgagaacggcaccaucacggacgcggucgacugcgcccuggacccccugagcgagaccaagugcacccucaaguccuucaccguggagaaggggaucuaccagacgagcaacuuccgggugcagcccaccgaguccaucguccgcuucccgaacaucaccaaccugugccccuucggcgagguguucaacgccacccgguucgccagcgucuacgccuggaaccgcaagcggaucuccaacugcguggcggacuacagcgugcuguacaacuccgccagcuucuccacguucaagugcuacggcgucagccccaccaagcucaacgaccugugcuucaccaacguguacgccgacuccuucgugauccgcggggacgagguccggcagaucgcccccggccagaccgggaagaucgccgacuacaacuacaagcugccggacgacuucacgggcugcgugaucgcguggaacagcaacaaccucgacuccaaggucgggggcaacuacaacuaccuguaccgccuguuccgcaagagcaaccucaagcccuucgagcgggacaucuccaccgagaucuaccaggccggcagcacccccugcaacgggguggagggcuucaacugcuacuucccccugcaguccuacggguuccagccgaccaacggcgugggguaccagcccuaccggguggucgugcugagcuucgagcuccugcacgcccccgccacggugugcggccccaagaaguccaccaaccuggucaagaacaagugcgugaacuucaacuucaacggccucaccgggaccggcgugcugaccgagagcaacaagaaguuccugccguuccagcaguucgggcgcgacaucgccgacacgaccgacgcgguccgcgacccccagacccuggagauccucgacaucacccccugcagcuucggcgggguguccgugaucacgccgggcaccaacaccagcaaccaggucgccgugcuguaccaggacgugaacugcaccgagguccccguggccauccacgccgaccagcugacgcccaccuggcggguguacuccaccggcagcaacgucuuccagacccgcgccgggugccucaucggcgcggagcacgugaacaacuccuacgagugcgacauccccaucggggccggcaucugcgccagcuaccagacgcagaccaacuccccgcggcgcgcccggagcguggcgucccagagcaucaucgccuacaccaugucccugggcgccgagaacagcgucgccuacuccaacaacagcaucgccauccccaccaacuucacgaucuccgugaccaccgagauccugcccgugagcaugaccaagacgagcgucgacugcaccauguacaucugcggggacuccaccgagugcagcaaccuccugcugcaguacggcuccuucugcacccagcucaaccgcgcgcugacggggaucgccguggagcaggacaagaacacccaggagguguucgcccaggucaagcagaucuacaagacgcccccgaucaaggacuucggcggguucaacuucagccagauccugcccgaccccuccaagcccagcaagcgguccuucaucgaggaccuccuguucaacaaggugacccuggccgacgccggcuucaucaagcaguacggcgacugccucggggacaucgcggcccgcgaccugaucugcgcccagaaguucaacggccugaccgugcucccgccccugcugaccgacgagaugaucgcccaguacaccagcgcccuccuggcggggaccaucacguccggcuggugguucggggccggcgccgcccugcagauccccuucgcgaugcagauggccuaccgguucaacggcaucggggucacccagaacgugcucuacgagaaccagaagcugaucgccaaccaguucaacagcgccaucggcaagauccaggacucccugagcuccaccgccagcgcgcucgggaagcugcaggacguggucaaccagaacgcccaggcccugaacacgcucgugaagcagcuguccagcaacuucggcgccaucuccagcgugcugaacgacauccucucccgccuggacccgcccgaggccgaggugcagaucgaccggcugaucaccgggcgccuccagagccugcagaccuacgugacccagcagcugauccgggcggccgagauccgcuggagcgccaaccucgccgcgaccaagauguccgagugcguccugggccagagcaagcggguggacuucugcggcaagggguaccaccugauguccuucccccagagcgccccgcacggcguggucuuccuccacgugacguacguccccgcccaggagaagaacuucaccaccgcccccgcgaucugccacgacgggaaggcccacuucccccgcgagggcguguucguguccaacgggacccacugguucgucacgcagcggaacuucuacgagccgcagaucaucaccaccgacaacaccuucgugagcggcaacugcgacguggucaucggcaucgugaacaacacgguguacgacccccugcagcccgagcuggacuccggcggcgggagcgggggcgggcagaucuacgagggcaagcugaccgccgaggggcuccgcuucggcaucguggccagccgguucaaccacgcgcuggucgaccgccugguggagggggccaucgacgccaucgugcggcacggcgggcgcgaggaggacaucacccucguccgggugcccggcuccugggagaucccgguggccgccggcgagcuggcccgcaaggaggacaucgacgcggucaucgccaucggggugcugauccggggcgccacgccccacuucgacuacaucgccagcgagguguccaaggggcucgcggaccugagccuggagcuccgcaagcccaucaccuucggcgucaucaccgccgacacccuggagcaggccaucgagcgggccgggacgaagcacggcaacaagggcugggaggccgcgcuguccgccaucgagauggccaaccucuucaagagccugcgcuga

SEQ ID NO: 11910 - RNA, 3924 nt, Artificial Sequence
  SARS-CoV-2/Wuhan/WIV05/2019__EPI_ISL_402128 spike protein CDS gc (1-1147)(K986P_V987P_P1069F) LumSynth construct
auguucguguuccugguccuccugccccuggugagcucccagugcgugaaccucaccacccgcacgcagcugccgcccgccuacaccaacagcuucacccggggcgucuacuaccccgacaagguguuccgcuccagcgugcugcacuccacccaggaccucuuccugcccuucuucagcaacgucacgugguuccacgccauccacguguccgggaccaacggcaccaagcgguucgacaacccggugcugcccuucaacgacggggucuacuucgcgagcaccgagaaguccaacaucauccgcggcuggaucuucgggacgacccucgacagcaagacccagucccugcugaucgugaacaacgccaccaacguggucaucaaggugugcgaguuccaguucugcaacgaccccuuccucggcguguacuaccacaagaacaacaagagcuggauggaguccgaguuccgggucuacagcuccgccaacaacugcacguucgaguacgugagccagcccuuccugauggaccuggagggcaagcaggggaacuucaagaaccuccgcgaguucguguucaagaacaucgacggcuacuucaagaucuacuccaagcacaccccgaucaaccugguccgggaccugccccagggguucagcgcccucgagccccugguggaccugcccaucggcaucaacaucacccgcuuccagacccuccuggcccugcaccgguccuaccucacgccgggggacagcagcuccggcuggaccgcgggcgccgccgccuacuacgugggguaccugcagccccgcaccuuccugcucaaguacaacgagaacggcaccaucacggacgcggucgacugcgcccuggacccccugagcgagaccaagugcacccucaaguccuucaccguggagaaggggaucuaccagacgagcaacuuccgggugcagcccaccgaguccaucguccgcuucccgaacaucaccaaccugugccccuucggcgagguguucaacgccacccgguucgccagcgucuacgccuggaaccgcaagcggaucuccaacugcguggcggacuacagcgugcuguacaacuccgccagcuucuccacguucaagugcuacggcgucagccccaccaagcucaacgaccugugcuucaccaacguguacgccgacuccuucgugauccgcggggacgagguccggcagaucgcccccggccagaccgggaagaucgccgacuacaacuacaagcugccggacgacuucacgggcugcgugaucgcguggaacagcaacaaccucgacuccaaggucgggggcaacuacaacuaccuguaccgccuguuccgcaagagcaaccucaagcccuucgagcgggacaucuccaccgagaucuaccaggccggcagcacccccugcaacgggguggagggcuucaacugcuacuucccccugcaguccuacggguuccagccgaccaacggcgugggguaccagcccuaccggguggucgugcugagcuucgagcuccugcacgcccccgccacggugugcggccccaagaaguccaccaaccuggucaagaacaagugcgugaacuucaacuucaacggccucaccgggaccggcgugcugaccgagagcaacaagaaguuccugccguuccagcaguucgggcgcgacaucgccgacacgaccgacgcgguccgcgacccccagacccuggagauccucgacaucacccccugcagcuucggcgggguguccgugaucacgccgggcaccaacaccagcaaccaggucgccgugcuguaccaggacgugaacugcaccgagguccccguggccauccacgccgaccagcugacgcccaccuggcggguguacuccaccggcagcaacgucuuccagacccgcgccgggugccucaucggcgcggagcacgugaacaacuccuacgagugcgacauccccaucggggccggcaucugcgccagcuaccagacgcagaccaacuccccgcggcgcgcccggagcguggcgucccagagcaucaucgccuacaccaugucccugggcgccgagaacagcgucgccuacuccaacaacagcaucgccauccccaccaacuucacgaucuccgugaccaccgagauccugcccgugagcaugaccaagacgagcgucgacugcaccauguacaucugcggggacuccaccgagugcagcaaccuccugcugcaguacggcuccuucugcacccagcucaaccgcgcgcugacggggaucgccguggagcaggacaagaacacccaggagguguucgcccaggucaagcagaucuacaagacgcccccgaucaaggacuucggcggguucaacuucagccagauccugcccgaccccuccaagcccagcaagcgguccuucaucgaggaccuccuguucaacaaggugacccuggccgacgccggcuucaucaagcaguacggcgacugccucggggacaucgcggcccgcgaccugaucugcgcccagaaguucaacggccugaccgugcucccgccccugcugaccgacgagaugaucgcccaguacaccagcgcccuccuggcggggaccaucacguccggcuggaccuucggggccggcgccgcccugcagauccccuucgcgaugcagauggccuaccgguucaacggcaucggggucacccagaacgugcucuacgagaaccagaagcugaucgccaaccaguucaacagcgccaucggcaagauccaggacucccugagcuccaccgccagcgcgcucgggaagcugcaggacguggucaaccagaacgcccaggcccugaacacgcucgugaagcagcuguccagcaacuucggcgccaucuccagcgugcugaacgacauccucucccgccuggacccgcccgaggccgaggugcagaucgaccggcugaucaccgggcgccuccagagccugcagaccuacgugacccagcagcugauccgggcggccgagauccgcgccagcgccaaccucgccgcgaccaagauguccgagugcguccugggccagagcaagcggguggacuucugcggcaagggguaccaccugauguccuucccccagagcgccccgcacggcguggucuuccuccacgugacguacgucuucgcccaggagaagaacuucaccaccgcccccgcgaucugccacgacgggaaggcccacuucccccgcgagggcguguucguguccaacgggacccacugguucgucacgcagcggaacuucuacgagccgcagaucaucaccaccgacaacaccuucgugagcggcaacugcgacguggucaucggcaucgugaacaacacgguguacgacccccugcagcccgagcuggacuccggcggcgggagcgggggcgggcagaucuacgagggcaagcugaccgccgaggggcuccgcuucggcaucguggccagccgguucaaccacgcgcuggucgaccgccugguggagggggccaucgacgccaucgugcggcacggcgggcgcgaggaggacaucacccucguccgggugcccggcuccugggagaucccgguggccgccggcgagcuggcccgcaaggaggacaucgacgcggucaucgccaucggggugcugauccggggcgccacgccccacuucgacuacaucgccagcgagguguccaaggggcucgcggaccugagccuggagcuccgcaagcccaucaccuucggcgucaucaccgccgacacccuggagcaggccaucgagcgggccgggacgaagcacggcaacaagggcugggaggccgcgcuguccgccaucgagauggccaaccucuucaagagccugcgcuga

SEQ ID NO: 11911 - RNA, 3924 nt, Artificial Sequence
  SARS-CoV-2/Wuhan/WIV05/2019__EPI_ISL_402128 spike protein CDS gc (1-1147)(K986P_V987P_ H1048Q_H1064N_ H1083N_H1101N) LumSynth construct
auguucguguuccugguccuccugccccuggugagcucccagugcgugaaccucaccacccgcacgcagcugccgcccgccuacaccaacagcuucacccggggcgucuacuaccccgacaagguguuccgcuccagcgugcugcacuccacccaggaccucuuccugcccuucuucagcaacgucacgugguuccacgccauccacguguccgggaccaacggcaccaagcgguucgacaacccggugcugcccuucaacgacggggucuacuucgcgagcaccgagaaguccaacaucauccgcggcuggaucuucgggacgacccucgacagcaagacccagucccugcugaucgugaacaacgccaccaacguggucaucaaggugugcgaguuccaguucugcaacgaccccuuccucggcguguacuaccacaagaacaacaagagcuggauggaguccgaguuccgggucuacagcuccgccaacaacugcacguucgaguacgugagccagcccuuccugauggaccuggagggcaagcaggggaacuucaagaaccuccgcgaguucguguucaagaacaucgacggcuacuucaagaucuacuccaagcacaccccgaucaaccugguccgggaccugccccagggguucagcgcccucgagccccugguggaccugcccaucggcaucaacaucacccgcuuccagacccuccuggcccugcaccgguccuaccucacgccgggggacagcagcuccggcuggaccgcgggcgccgccgccuacuacgugggguaccugcagccccgcaccuuccugcucaaguacaacgagaacggcaccaucacggacgcggucgacugcgcccuggacccccugagcgagaccaagugcacccucaaguccuucaccguggagaaggggaucuaccagacgagcaacuuccgggugcagcccaccgaguccaucguccgcuucccgaacaucaccaaccugugccccuucggcgagguguucaacgccacccgguucgccagcgucuacgccuggaaccgcaagcggaucuccaacugcguggcggacuacagcgugcuguacaacuccgccagcuucuccacguucaagugcuacggcgucagccccaccaagcucaacgaccugugcuucaccaacguguacgccgacuccuucgugauccgcggggacgagguccggcagaucgcccccggccagaccgggaagaucgccgacuacaacuacaagcugccggacgacuucacgggcugcgugaucgcguggaacagcaacaaccucgacuccaaggucgggggcaacuacaacuaccuguaccgccuguuccgcaagagcaaccucaagcccuucgagcgggacaucuccaccgagaucuaccaggccggcagcacccccugcaacgggguggagggcuucaacugcuacuucccccugcaguccuacggguuccagccgaccaacggcgugggguaccagcccuaccggguggucgugcugagcuucgagcuccugcacgcccccgccacggugugcggccccaagaaguccaccaaccuggucaagaacaagugcgugaacuucaacuucaacggccucaccgggaccggcgugcugaccgagagcaacaagaaguuccugccguuccagcaguucgggcgcgacaucgccgacacgaccgacgcgguccgcgacccccagacccuggagauccucgacaucacccccugcagcuucggcgggguguccgugaucacgccgggcaccaacaccagcaaccaggucgccgugcuguaccaggacgugaacugcaccgagguccccguggccauccacgccgaccagcugacgcccaccuggcggguguacuccaccggcagcaacgucuuccagacccgcgccgggugccucaucggcgcggagcacgugaacaacuccuacgagugcgacauccccaucggggccggcaucugcgccagcuaccagacgcagaccaacuccccgcggcgcgcccggagcguggcgucccagagcaucaucgccuacaccaugucccugggcgccgagaacagcgucgccuacuccaacaacagcaucgccauccccaccaacuucacgaucuccgugaccaccgagauccugcccgugagcaugaccaagacgagcgucgacugcaccauguacaucugcggggacuccaccgagugcagcaaccuccugcugcaguacggcuccuucugcacccagcucaaccgcgcgcugacggggaucgccguggagcaggacaagaacacccaggagguguucgcccaggucaagcagaucuacaagacgcccccgaucaaggacuucggcggguucaacuucagccagauccugcccgaccccuccaagcccagcaagcgguccuucaucgaggaccuccuguucaacaaggugacccuggccgacgccggcuucaucaagcaguacggcgacugccucggggacaucgcggcccgcgaccugaucugcgcccagaaguucaacggccugaccgugcucccgccccugcugaccgacgagaugaucgcccaguacaccagcgcccuccuggcggggaccaucacguccggcuggaccuucggggccggcgccgcccugcagauccccuucgcgaugcagauggccuaccgguucaacggcaucggggucacccagaacgugcucuacgagaaccagaagcugaucgccaaccaguucaacagcgccaucggcaagauccaggacucccugagcuccaccgccagcgcgcucgggaagcugcaggacguggucaaccagaacgcccaggcccugaacacgcucgugaagcagcuguccagcaacuucggcgccaucuccagcgugcugaacgacauccucucccgccuggacccgcccgaggccgaggugcagaucgaccggcugaucaccgggcgccuccagagccugcagaccuacgugacccagcagcugauccgggcggccgagauccgcgccagcgccaaccucgccgcgaccaagauguccgagugcguccugggccagagcaagcggguggacuucugcggcaagggguaccagcugauguccuucccccagagcgccccgcacggcguggucuuccucaacgugacguacguccccgcccaggagaagaacuucaccaccgcccccgcgaucugcaacgacgggaaggcccacuucccccgcgagggcguguucguguccaacgggaccaacugguucgucacgcagcggaacuucuacgagccgcagaucaucaccaccgacaacaccuucgugagcggcaacugcgacguggucaucggcaucgugaacaacacgguguacgacccccugcagcccgagcuggacuccggcggcgggagcgggggcgggcagaucuacgagggcaagcugaccgccgaggggcuccgcuucggcaucguggccagccgguucaaccacgcgcuggucgaccgccugguggagggggccaucgacgccaucgugcggcacggcgggcgcgaggaggacaucacccucguccgggugcccggcuccugggagaucccgguggccgccggcgagcuggcccgcaaggaggacaucgacgcggucaucgccaucggggugcugauccggggcgccacgccccacuucgacuacaucgccagcgagguguccaaggggcucgcggaccugagccuggagcuccgcaagcccaucaccuucggcgucaucaccgccgacacccuggagcaggccaucgagcgggccgggacgaagcacggcaacaagggcugggaggccgcgcuguccgccaucgagauggccaaccucuucaagagccugcgcuga

SEQ ID NO: 11912 - RNA, 3924 nt, Artificial Sequence
  SARS-CoV-2/Wuhan/WIV05/2019__EPI_ISL_402128 spike protein CDS gc (1-1147)(I712C_T1077C) LumSynth construct
auguucguguuccugguccuccugccccuggugagcucccagugcgugaaccucaccacccgcacgcagcugccgcccgccuacaccaacagcuucacccggggcgucuacuaccccgacaagguguuccgcuccagcgugcugcacuccacccaggaccucuuccugcccuucuucagcaacgucacgugguuccacgccauccacguguccgggaccaacggcaccaagcgguucgacaacccggugcugcccuucaacgacggggucuacuucgcgagcaccgagaaguccaacaucauccgcggcuggaucuucgggacgacccucgacagcaagacccagucccugcugaucgugaacaacgccaccaacguggucaucaaggugugcgaguuccaguucugcaacgaccccuuccucggcguguacuaccacaagaacaacaagagcuggauggaguccgaguuccgggucuacagcuccgccaacaacugcacguucgaguacgugagccagcccuuccugauggaccuggagggcaagcaggggaacuucaagaaccuccgcgaguucguguucaagaacaucgacggcuacuucaagaucuacuccaagcacaccccgaucaaccugguccgggaccugccccagggguucagcgcccucgagccccugguggaccugcccaucggcaucaacaucacccgcuuccagacccuccuggcccugcaccgguccuaccucacgccgggggacagcagcuccggcuggaccgcgggcgccgccgccuacuacgugggguaccugcagccccgcaccuuccugcucaaguacaacgagaacggcaccaucacggacgcggucgacugcgcccuggacccccugagcgagaccaagugcacccucaaguccuucaccguggagaaggggaucuaccagacgagcaacuuccgggugcagcccaccgaguccaucguccgcuucccgaacaucaccaaccugugccccuucggcgagguguucaacgccacccgguucgccagcgucuacgccuggaaccgcaagcggaucuccaacugcguggcggacuacagcgugcuguacaacuccgccagcuucuccacguucaagugcuacggcgucagccccaccaagcucaacgaccugugcuucaccaacguguacgccgacuccuucgugauccgcggggacgagguccggcagaucgcccccggccagaccgggaagaucgccgacuacaacuacaagcugccggacgacuucacgggcugcgugaucgcguggaacagcaacaaccucgacuccaaggucgggggcaacuacaacuaccuguaccgccuguuccgcaagagcaaccucaagcccuucgagcgggacaucuccaccgagaucuaccaggccggcagcacccccugcaacgggguggagggcuucaacugcuacuucccccugcaguccuacggguuccagccgaccaacggcgugggguaccagcccuaccggguggucgugcugagcuucgagcuccugcacgcccccgccacggugugcggccccaagaaguccaccaaccuggucaagaacaagugcgugaacuucaacuucaacggccucaccgggaccggcgugcugaccgagagcaacaagaaguuccugccguuccagcaguucgggcgcgacaucgccgacacgaccgacgcgguccgcgacccccagacccuggagauccucgacaucacccccugcagcuucggcgggguguccgugaucacgccgggcaccaacaccagcaaccaggucgccgugcuguaccaggacgugaacugcaccgagguccccguggccauccacgccgaccagcugacgcccaccuggcggguguacuccaccggcagcaacgucuuccagacccgcgccgggugccucaucggcgcggagcacgugaacaacuccuacgagugcgacauccccaucggggccggcaucugcgccagcuaccagacgcagaccaacuccccgcggcgcgcccggagcguggcgucccagagcaucaucgccuacaccaugucccugggcgccgagaacagcgucgccuacuccaacaacagcugcgccauccccaccaacuucacgaucuccgugaccaccgagauccugcccgugagcaugaccaagacgagcgucgacugcaccauguacaucugcggggacuccaccgagugcagcaaccuccugcugcaguacggcuccuucugcacccagcucaaccgcgcgcugacggggaucgccguggagcaggacaagaacacccaggagguguucgcccaggucaagcagaucuacaagacgcccccgaucaaggacuucggcggguucaacuucagccagauccugcccgaccccuccaagcccagcaagcgguccuucaucgaggaccuccuguucaacaaggugacccuggccgacgccggcuucaucaagcaguacggcgacugccucggggacaucgcggcccgcgaccugaucugcgcccagaaguucaacggccugaccgugcucccgccccugcugaccgacgagaugaucgcccaguacaccagcgcccuccuggcggggaccaucacguccggcuggaccuucggggccggcgccgcccugcagauccccuucgcgaugcagauggccuaccgguucaacggcaucggggucacccagaacgugcucuacgagaaccagaagcugaucgccaaccaguucaacagcgccaucggcaagauccaggacucccugagcuccaccgccagcgcgcucgggaagcugcaggacguggucaaccagaacgcccaggcccugaacacgcucgugaagcagcuguccagcaacuucggcgccaucuccagcgugcugaacgacauccucucccgccuggacaaggucgaggccgaggugcagaucgaccggcugaucaccgggcgccuccagagccugcagaccuacgugacccagcagcugauccgggcggccgagauccgcgccagcgccaaccucgccgcgaccaagauguccgagugcguccugggccagagcaagcggguggacuucugcggcaagggguaccaccugauguccuucccccagagcgccccgcacggcguggucuuccuccacgugacguacguccccgcccaggagaagaacuucaccugcgcccccgcgaucugccacgacgggaaggcccacuucccccgcgagggcguguucguguccaacgggacccacugguucgucacgcagcggaacuucuacgagccgcagaucaucaccaccgacaacaccuucgugagcggcaacugcgacguggucaucggcaucgugaacaacacgguguacgacccccugcagcccgagcuggacuccggcggcgggagcgggggcgggcagaucuacgagggcaagcugaccgccgaggggcuccgcuucggcaucguggccagccgguucaaccacgcgcuggucgaccgccugguggagggggccaucgacgccaucgugcggcacggcgggcgcgaggaggacaucacccucguccgggugcccggcuccugggagaucccgguggccgccggcgagcuggcccgcaaggaggacaucgacgcggucaucgccaucggggugcugauccggggcgccacgccccacuucgacuacaucgccagcgagguguccaaggggcucgcggaccugagccuggagcuccgcaagcccaucaccuucggcgucaucaccgccgacacccuggagcaggccaucgagcgggccgggacgaagcacggcaacaagggcugggaggccgcgcuguccgccaucgagauggccaaccucuucaagagccugcgcuga

SEQ ID NO: 11913 - RNA, 3924 nt, Artificial Sequence
  SARS-CoV-2/Wuhan/WIV05/2019__EPI_ISL_402128 spike protein CDS gc (1-1147)(I714C_Y1110C) LumSynth construct
auguucguguuccugguccuccugccccuggugagcucccagugcgugaaccucaccacccgcacgcagcugccgcccgccuacaccaacagcuucacccggggcgucuacuaccccgacaagguguuccgcuccagcgugcugcacuccacccaggaccucuuccugcccuucuucagcaacgucacgugguuccacgccauccacguguccgggaccaacggcaccaagcgguucgacaacccggugcugcccuucaacgacggggucuacuucgcgagcaccgagaaguccaacaucauccgcggcuggaucuucgggacgacccucgacagcaagacccagucccugcugaucgugaacaacgccaccaacguggucaucaaggugugcgaguuccaguucugcaacgaccccuuccucggcguguacuaccacaagaacaacaagagcuggauggaguccgaguuccgggucuacagcuccgccaacaacugcacguucgaguacgugagccagcccuuccugauggaccuggagggcaagcaggggaacuucaagaaccuccgcgaguucguguucaagaacaucgacggcuacuucaagaucuacuccaagcacaccccgaucaaccugguccgggaccugccccagggguucagcgcccucgagccccugguggaccugcccaucggcaucaacaucacccgcuuccagacccuccuggcccugcaccgguccuaccucacgccgggggacagcagcuccggcuggaccgcgggcgccgccgccuacuacgugggguaccugcagccccgcaccuuccugcucaaguacaacgagaacggcaccaucacggacgcggucgacugcgcccuggacccccugagcgagaccaagugcacccucaaguccuucaccguggagaaggggaucuaccagacgagcaacuuccgggugcagcccaccgaguccaucguccgcuucccgaacaucaccaaccugugccccuucggcgagguguucaacgccacccgguucgccagcgucuacgccuggaaccgcaagcggaucuccaacugcguggcggacuacagcgugcuguacaacuccgccagcuucuccacguucaagugcuacggcgucagccccaccaagcucaacgaccugugcuucaccaacguguacgccgacuccuucgugauccgcggggacgagguccggcagaucgcccccggccagaccgggaagaucgccgacuacaacuacaagcugccggacgacuucacgggcugcgugaucgcguggaacagcaacaaccucgacuccaaggucgggggcaacuacaacuaccuguaccgccuguuccgcaagagcaaccucaagcccuucgagcgggacaucuccaccgagaucuaccaggccggcagcacccccugcaacgggguggagggcuucaacugcuacuucccccugcaguccuacggguuccagccgaccaacggcgugggguaccagcccuaccggguggucgugcugagcuucgagcuccugcacgcccccgccacggugugcggccccaagaaguccaccaaccuggucaagaacaagugcgugaacuucaacuucaacggccucaccgggaccggcgugcugaccgagagcaacaagaaguuccugccguuccagcaguucgggcgcgacaucgccgacacgaccgacgcgguccgcgacccccagacccuggagauccucgacaucacccccugcagcuucggcgggguguccgugaucacgccgggcaccaacaccagcaaccaggucgccgugcuguaccaggacgugaacugcaccgagguccccguggccauccacgccgaccagcugacgcccaccuggcggguguacuccaccggcagcaacgucuuccagacccgcgccgggugccucaucggcgcggagcacgugaacaacuccuacgagugcgacauccccaucggggccggcaucugcgccagcuaccagacgcagaccaacuccccgcggcgcgcccggagcguggcgucccagagcaucaucgccuacaccaugucccugggcgccgagaacagcgucgccuacuccaacaacagcaucgccugccccaccaacuucacgaucuccgugaccaccgagauccugcccgugagcaugaccaagacgagcgucgacugcaccauguacaucugcggggacuccaccgagugcagcaaccuccugcugcaguacggcuccuucugcacccagcucaaccgcgcgcugacggggaucgccguggagcaggacaagaacacccaggagguguucgcccaggucaagcagaucuacaagacgcccccgaucaaggacuucggcggguucaacuucagccagauccugcccgaccccuccaagcccagcaagcgguccuucaucgaggaccuccuguucaacaaggugacccuggccgacgccggcuucaucaagcaguacggcgacugccucggggacaucgcggcccgcgaccugaucugcgcccagaaguucaacggccugaccgugcucccgccccugcugaccgacgagaugaucgcccaguacaccagcgcccuccuggcggggaccaucacguccggcuggaccuucggggccggcgccgcccugcagauccccuucgcgaugcagauggccuaccgguucaacggcaucggggucacccagaacgugcucuacgagaaccagaagcugaucgccaaccaguucaacagcgccaucggcaagauccaggacucccugagcuccaccgccagcgcgcucgggaagcugcaggacguggucaaccagaacgcccaggcccugaacacgcucgugaagcagcuguccagcaacuucggcgccaucuccagcgugcugaacgacauccucucccgccuggacaaggucgaggccgaggugcagaucgaccggcugaucaccgggcgccuccagagccugcagaccuacgugacccagcagcugauccgggcggccgagauccgcgccagcgccaaccucgccgcgaccaagauguccgagugcguccugggccagagcaagcggguggacuucugcggcaagggguaccaccugauguccuucccccagagcgccccgcacggcguggucuuccuccacgugacguacguccccgcccaggagaagaacuucaccaccgcccccgcgaucugccacgacgggaaggcccacuucccccgcgagggcguguucguguccaacgggacccacugguucgucacgcagcggaacuucugcgagccgcagaucaucaccaccgacaacaccuucgugagcggcaacugcgacguggucaucggcaucgugaacaacacgguguacgacccccugcagcccgagcuggacuccggcggcgggagcgggggcgggcagaucuacgagggcaagcugaccgccgaggggcuccgcuucggcaucguggccagccgguucaaccacgcgcuggucgaccgccugguggagggggccaucgacgccaucgugcggcacggcgggcgcgaggaggacaucacccucguccgggugcccggcuccugggagaucccgguggccgccggcgagcuggcccgcaaggaggacaucgacgcggucaucgccaucggggugcugauccggggcgccacgccccacuucgacuacaucgccagcgagguguccaaggggcucgcggaccugagccuggagcuccgcaagcccaucaccuucggcgucaucaccgccgacacccuggagcaggccaucgagcgggccgggacgaagcacggcaacaagggcugggaggccgcgcuguccgccaucgagauggccaaccucuucaagagccugcgcuga

SEQ ID NO: 11914 - RNA, 3924 nt, Artificial Sequence
  SARS-CoV-2/Wuhan/WIV05/2019__EPI_ISL_402128 spike protein CDS gc (1-1147)(P715C_P1069C) LumSynth construct
auguucguguuccugguccuccugccccuggugagcucccagugcgugaaccucaccacccgcacgcagcugccgcccgccuacaccaacagcuucacccggggcgucuacuaccccgacaagguguuccgcuccagcgugcugcacuccacccaggaccucuuccugcccuucuucagcaacgucacgugguuccacgccauccacguguccgggaccaacggcaccaagcgguucgacaacccggugcugcccuucaacgacggggucuacuucgcgagcaccgagaaguccaacaucauccgcggcuggaucuucgggacgacccucgacagcaagacccagucccugcugaucgugaacaacgccaccaacguggucaucaaggugugcgaguuccaguucugcaacgaccccuuccucggcguguacuaccacaagaacaacaagagcuggauggaguccgaguuccgggucuacagcuccgccaacaacugcacguucgaguacgugagccagcccuuccugauggaccuggagggcaagcaggggaacuucaagaaccuccgcgaguucguguucaagaacaucgacggcuacuucaagaucuacuccaagcacaccccgaucaaccugguccgggaccugccccagggguucagcgcccucgagccccugguggaccugcccaucggcaucaacaucacccgcuuccagacccuccuggcccugcaccgguccuaccucacgccgggggacagcagcuccggcuggaccgcgggcgccgccgccuacuacgugggguaccugcagccccgcaccuuccugcucaaguacaacgagaacggcaccaucacggacgcggucgacugcgcccuggacccccugagcgagaccaagugcacccucaaguccuucaccguggagaaggggaucuaccagacgagcaacuuccgggugcagcccaccgaguccaucguccgcuucccgaacaucaccaaccugugccccuucggcgagguguucaacgccacccgguucgccagcgucuacgccuggaaccgcaagcggaucuccaacugcguggcggacuacagcgugcuguacaacuccgccagcuucuccacguucaagugcuacggcgucagccccaccaagcucaacgaccugugcuucaccaacguguacgccgacuccuucgugauccgcggggacgagguccggcagaucgcccccggccagaccgggaagaucgccgacuacaacuacaagcugccggacgacuucacgggcugcgugaucgcguggaacagcaacaaccucgacuccaaggucgggggcaacuacaacuaccuguaccgccuguuccgcaagagcaaccucaagcccuucgagcgggacaucuccaccgagaucuaccaggccggcagcacccccugcaacgggguggagggcuucaacugcuacuucccccugcaguccuacggguuccagccgaccaacggcgugggguaccagcccuaccggguggucgugcugagcuucgagcuccugcacgcccccgccacggugugcggccccaagaaguccaccaaccuggucaagaacaagugcgugaacuucaacuucaacggccucaccgggaccggcgugcugaccgagagcaacaagaaguuccugccguuccagcaguucgggcgcgacaucgccgacacgaccgacgcgguccgcgacccccagacccuggagauccucgacaucacccccugcagcuucggcgggguguccgugaucacgccgggcaccaacaccagcaaccaggucgccgugcuguaccaggacgugaacugcaccgagguccccguggccauccacgccgaccagcugacgcccaccuggcggguguacuccaccggcagcaacgucuuccagacccgcgccgggugccucaucggcgcggagcacgugaacaacuccuacgagugcgacauccccaucggggccggcaucugcgccagcuaccagacgcagaccaacuccccgcggcgcgcccggagcguggcgucccagagcaucaucgccuacaccaugucccugggcgccgagaacagcgucgccuacuccaacaacagcaucgccaucugcaccaacuucacgaucuccgugaccaccgagauccugcccgugagcaugaccaagacgagcgucgacugcaccauguacaucugcggggacuccaccgagugcagcaaccuccugcugcaguacggcuccuucugcacccagcucaaccgcgcgcugacggggaucgccguggagcaggacaagaacacccaggagguguucgcccaggucaagcagaucuacaagacgcccccgaucaaggacuucggcggguucaacuucagccagauccugcccgaccccuccaagcccagcaagcgguccuucaucgaggaccuccuguucaacaaggugacccuggccgacgccggcuucaucaagcaguacggcgacugccucggggacaucgcggcccgcgaccugaucugcgcccagaaguucaacggccugaccgugcucccgccccugcugaccgacgagaugaucgcccaguacaccagcgcccuccuggcggggaccaucacguccggcuggaccuucggggccggcgccgcccugcagauccccuucgcgaugcagauggccuaccgguucaacggcaucggggucacccagaacgugcucuacgagaaccagaagcugaucgccaaccaguucaacagcgccaucggcaagauccaggacucccugagcuccaccgccagcgcgcucgggaagcugcaggacguggucaaccagaacgcccaggcccugaacacgcucgugaagcagcuguccagcaacuucggcgccaucuccagcgugcugaacgacauccucucccgccuggacaaggucgaggccgaggugcagaucgaccggcugaucaccgggcgccuccagagccugcagaccuacgugacccagcagcugauccgggcggccgagauccgcgccagcgccaaccucgccgcgaccaagauguccgagugcguccugggccagagcaagcggguggacuucugcggcaagggguaccaccugauguccuucccccagagcgccccgcacggcguggucuuccuccacgugacguacgucugcgcccaggagaagaacuucaccaccgcccccgcgaucugccacgacgggaaggcccacuucccccgcgagggcguguucguguccaacgggacccacugguucgucacgcagcggaacuucuacgagccgcagaucaucaccaccgacaacaccuucgugagcggcaacugcgacguggucaucggcaucgugaacaacacgguguacgacccccugcagcccgagcuggacuccggcggcgggagcgggggcgggcagaucuacgagggcaagcugaccgccgaggggcuccgcuucggcaucguggccagccgguucaaccacgcgcuggucgaccgccugguggagggggccaucgacgccaucgugcggcacggcgggcgcgaggaggacaucacccucguccgggugcccggcuccugggagaucccgguggccgccggcgagcuggcccgcaaggaggacaucgacgcggucaucgccaucggggugcugauccggggcgccacgccccacuucgacuacaucgccagcgagguguccaaggggcucgcggaccugagccuggagcuccgcaagcccaucaccuucggcgucaucaccgccgacacccuggagcaggccaucgagcgggccgggacgaagcacggcaacaagggcugggaggccgcgcuguccgccaucgagauggccaaccucuucaagagccugcgcuga

SEQ ID NO: 11915 - RNA, 3924 nt, Artificial Sequence
  SARS-CoV-2/Wuhan/WIV05/2019__EPI_ISL_402128 spike protein CDS gc (1-1147)(G889C_L1034C) LumSynth construct
auguucguguuccugguccuccugccccuggugagcucccagugcgugaaccucaccacccgcacgcagcugccgcccgccuacaccaacagcuucacccggggcgucuacuaccccgacaagguguuccgcuccagcgugcugcacuccacccaggaccucuuccugcccuucuucagcaacgucacgugguuccacgccauccacguguccgggaccaacggcaccaagcgguucgacaacccggugcugcccuucaacgacggggucuacuucgcgagcaccgagaaguccaacaucauccgcggcuggaucuucgggacgacccucgacagcaagacccagucccugcugaucgugaacaacgccaccaacguggucaucaaggugugcgaguuccaguucugcaacgaccccuuccucggcguguacuaccacaagaacaacaagagcuggauggaguccgaguuccgggucuacagcuccgccaacaacugcacguucgaguacgugagccagcccuuccugauggaccuggagggcaagcaggggaacuucaagaaccuccgcgaguucguguucaagaacaucgacggcuacuucaagaucuacuccaagcacaccccgaucaaccugguccgggaccugccccagggguucagcgcccucgagccccugguggaccugcccaucggcaucaacaucacccgcuuccagacccuccuggcccugcaccgguccuaccucacgccgggggacagcagcuccggcuggaccgcgggcgccgccgccuacuacgugggguaccugcagccccgcaccuuccugcucaaguacaacgagaacggcaccaucacggacgcggucgacugcgcccuggacccccugagcgagaccaagugcacccucaaguccuucaccguggagaaggggaucuaccagacgagcaacuuccgggugcagcccaccgaguccaucguccgcuucccgaacaucaccaaccugugccccuucggcgagguguucaacgccacccgguucgccagcgucuacgccuggaaccgcaagcggaucuccaacugcguggcggacuacagcgugcuguacaacuccgccagcuucuccacguucaagugcuacggcgucagccccaccaagcucaacgaccugugcuucaccaacguguacgccgacuccuucgugauccgcggggacgagguccggcagaucgcccccggccagaccgggaagaucgccgacuacaacuacaagcugccggacgacuucacgggcugcgugaucgcguggaacagcaacaaccucgacuccaaggucgggggcaacuacaacuaccuguaccgccuguuccgcaagagcaaccucaagcccuucgagcgggacaucuccaccgagaucuaccaggccggcagcacccccugcaacgggguggagggcuucaacugcuacuucccccugcaguccuacggguuccagccgaccaacggcgugggguaccagcccuaccggguggucgugcugagcuucgagcuccugcacgcccccgccacggugugcggccccaagaaguccaccaaccuggucaagaacaagugcgugaacuucaacuucaacggccucaccgggaccggcgugcugaccgagagcaacaagaaguuccugccguuccagcaguucgggcgcgacaucgccgacacgaccgacgcgguccgcgacccccagacccuggagauccucgacaucacccccugcagcuucggcgggguguccgugaucacgccgggcaccaacaccagcaaccaggucgccgugcuguaccaggacgugaacugcaccgagguccccguggccauccacgccgaccagcugacgcccaccuggcggguguacuccaccggcagcaacgucuuccagacccgcgccgggugccucaucggcgcggagcacgugaacaacuccuacgagugcgacauccccaucggggccggcaucugcgccagcuaccagacgcagaccaacuccccgcggcgcgcccggagcguggcgucccagagcaucaucgccuacaccaugucccugggcgccgagaacagcgucgccuacuccaacaacagcaucgccauccccaccaacuucacgaucuccgugaccaccgagauccugcccgugagcaugaccaagacgagcgucgacugcaccauguacaucugcggggacuccaccgagugcagcaaccuccugcugcaguacggcuccuucugcacccagcucaaccgcgcgcugacggggaucgccguggagcaggacaagaacacccaggagguguucgcccaggucaagcagaucuacaagacgcccccgaucaaggacuucggcggguucaacuucagccagauccugcccgaccccuccaagcccagcaagcgguccuucaucgaggaccuccuguucaacaaggugacccuggccgacgccggcuucaucaagcaguacggcgacugccucggggacaucgcggcccgcgaccugaucugcgcccagaaguucaacggccugaccgugcucccgccccugcugaccgacgagaugaucgcccaguacaccagcgcccuccuggcggggaccaucacguccggcuggaccuucugcgccggcgccgcccugcagauccccuucgcgaugcagauggccuaccgguucaacggcaucggggucacccagaacgugcucuacgagaaccagaagcugaucgccaaccaguucaacagcgccaucggcaagauccaggacucccugagcuccaccgccagcgcgcucgggaagcugcaggacguggucaaccagaacgcccaggcccugaacacgcucgugaagcagcuguccagcaacuucggcgccaucuccagcgugcugaacgacauccucucccgccuggacaaggucgaggccgaggugcagaucgaccggcugaucaccgggcgccuccagagccugcagaccuacgugacccagcagcugauccgggcggccgagauccgcgccagcgccaaccucgccgcgaccaagauguccgagugcgucugcggccagagcaagcggguggacuucugcggcaagggguaccaccugauguccuucccccagagcgccccgcacggcguggucuuccuccacgugacguacguccccgcccaggagaagaacuucaccaccgcccccgcgaucugccacgacgggaaggcccacuucccccgcgagggcguguucguguccaacgggacccacugguucgucacgcagcggaacuucuacgagccgcagaucaucaccaccgacaacaccuucgugagcggcaacugcgacguggucaucggcaucgugaacaacacgguguacgacccccugcagcccgagcuggacuccggcggcgggagcgggggcgggcagaucuacgagggcaagcugaccgccgaggggcuccgcuucggcaucguggccagccgguucaaccacgcgcuggucgaccgccugguggagggggccaucgacgccaucgugcggcacggcgggcgcgaggaggacaucacccucguccgggugcccggcuccugggagaucccgguggccgccggcgagcuggcccgcaaggaggacaucgacgcggucaucgccaucggggugcugauccggggcgccacgccccacuucgacuacaucgccagcgagguguccaaggggcucgcggaccugagccuggagcuccgcaagcccaucaccuucggcgucaucaccgccgacacccuggagcaggccaucgagcgggccgggacgaagcacggcaacaagggcugggaggccgcgcuguccgccaucgagauggccaaccucuucaagagccugcgcuga

SEQ ID NO: 11916 - RNA, 3924 nt, Artificial Sequence
  SARS-CoV-2/Wuhan/WIV05/2019__EPI_ISL_402128 spike protein CDS gc (1-1147)(I909C_Y1047C) LumSynth construct
auguucguguuccugguccuccugccccuggugagcucccagugcgugaaccucaccacccgcacgcagcugccgcccgccuacaccaacagcuucacccggggcgucuacuaccccgacaagguguuccgcuccagcgugcugcacuccacccaggaccucuuccugcccuucuucagcaacgucacgugguuccacgccauccacguguccgggaccaacggcaccaagcgguucgacaacccggugcugcccuucaacgacggggucuacuucgcgagcaccgagaaguccaacaucauccgcggcuggaucuucgggacgacccucgacagcaagacccagucccugcugaucgugaacaacgccaccaacguggucaucaaggugugcgaguuccaguucugcaacgaccccuuccucggcguguacuaccacaagaacaacaagagcuggauggaguccgaguuccgggucuacagcuccgccaacaacugcacguucgaguacgugagccagcccuuccugauggaccuggagggcaagcaggggaacuucaagaaccuccgcgaguucguguucaagaacaucgacggcuacuucaagaucuacuccaagcacaccccgaucaaccugguccgggaccugccccagggguucagcgcccucgagccccugguggaccugcccaucggcaucaacaucacccgcuuccagacccuccuggcccugcaccgguccuaccucacgccgggggacagcagcuccggcuggaccgcgggcgccgccgccuacuacgugggguaccugcagccccgcaccuuccugcucaaguacaacgagaacggcaccaucacggacgcggucgacugcgcccuggacccccugagcgagaccaagugcacccucaaguccuucaccguggagaaggggaucuaccagacgagcaacuuccgggugcagcccaccgaguccaucguccgcuucccgaacaucaccaaccugugccccuucggcgagguguucaacgccacccgguucgccagcgucuacgccuggaaccgcaagcggaucuccaacugcguggcggacuacagcgugcuguacaacuccgccagcuucuccacguucaagugcuacggcgucagccccaccaagcucaacgaccugugcuucaccaacguguacgccgacuccuucgugauccgcggggacgagguccggcagaucgcccccggccagaccgggaagaucgccgacuacaacuacaagcugccggacgacuucacgggcugcgugaucgcguggaacagcaacaaccucgacuccaaggucgggggcaacuacaacuaccuguaccgccuguuccgcaagagcaaccucaagcccuucgagcgggacaucuccaccgagaucuaccaggccggcagcacccccugcaacgggguggagggcuucaacugcuacuucccccugcaguccuacggguuccagccgaccaacggcgugggguaccagcccuaccggguggucgugcugagcuucgagcuccugcacgcccccgccacggugugcggccccaagaaguccaccaaccuggucaagaacaagugcgugaacuucaacuucaacggccucaccgggaccggcgugcugaccgagagcaacaagaaguuccugccguuccagcaguucgggcgcgacaucgccgacacgaccgacgcgguccgcgacccccagacccuggagauccucgacaucacccccugcagcuucggcgggguguccgugaucacgccgggcaccaacaccagcaaccaggucgccgugcuguaccaggacgugaacugcaccgagguccccguggccauccacgccgaccagcugacgcccaccuggcggguguacuccaccggcagcaacgucuuccagacccgcgccgggugccucaucggcgcggagcacgugaacaacuccuacgagugcgacauccccaucggggccggcaucugcgccagcuaccagacgcagaccaacuccccgcggcgcgcccggagcguggcgucccagagcaucaucgccuacaccaugucccugggcgccgagaacagcgucgccuacuccaacaacagcaucgccauccccaccaacuucacgaucuccgugaccaccgagauccugcccgugagcaugaccaagacgagcgucgacugcaccauguacaucugcggggacuccaccgagugcagcaaccuccugcugcaguacggcuccuucugcacccagcucaaccgcgcgcugacggggaucgccguggagcaggacaagaacacccaggagguguucgcccaggucaagcagaucuacaagacgcccccgaucaaggacuucggcggguucaacuucagccagauccugcccgaccccuccaagcccagcaagcgguccuucaucgaggaccuccuguucaacaaggugacccuggccgacgccggcuucaucaagcaguacggcgacugccucggggacaucgcggcccgcgaccugaucugcgcccagaaguucaacggccugaccgugcucccgccccugcugaccgacgagaugaucgcccaguacaccagcgcccuccuggcggggaccaucacguccggcuggaccuucggggccggcgccgcccugcagauccccuucgcgaugcagauggccuaccgguucaacggcugcggggucacccagaacgugcucuacgagaaccagaagcugaucgccaaccaguucaacagcgccaucggcaagauccaggacucccugagcuccaccgccagcgcgcucgggaagcugcaggacguggucaaccagaacgcccaggcccugaacacgcucgugaagcagcuguccagcaacuucggcgccaucuccagcgugcugaacgacauccucucccgccuggacaaggucgaggccgaggugcagaucgaccggcugaucaccgggcgccuccagagccugcagaccuacgugacccagcagcugauccgggcggccgagauccgcgccagcgccaaccucgccgcgaccaagauguccgagugcguccugggccagagcaagcggguggacuucugcggcaaggggugccaccugauguccuucccccagagcgccccgcacggcguggucuuccuccacgugacguacguccccgcccaggagaagaacuucaccaccgcccccgcgaucugccacgacgggaaggcccacuucccccgcgagggcguguucguguccaacgggacccacugguucgucacgcagcggaacuucuacgagccgcagaucaucaccaccgacaacaccuucgugagcggcaacugcgacguggucaucggcaucgugaacaacacgguguacgacccccugcagcccgagcuggacuccggcggcgggagcgggggcgggcagaucuacgagggcaagcugaccgccgaggggcuccgcuucggcaucguggccagccgguucaaccacgcgcuggucgaccgccugguggagggggccaucgacgccaucgugcggcacggcgggcgcgaggaggacaucacccucguccgggugcccggcuccugggagaucccgguggccgccggcgagcuggcccgcaaggaggacaucgacgcggucaucgccaucggggugcugauccggggcgccacgccccacuucgacuacaucgccagcgagguguccaaggggcucgcggaccugagccuggagcuccgcaagcccaucaccuucggcgucaucaccgccgacacccuggagcaggccaucgagcgggccgggacgaagcacggcaacaagggcugggaggccgcgcuguccgccaucgagauggccaaccucuucaagagccugcgcuga

SEQ ID NO: 11917 - RNA, 3924 nt, Artificial Sequence
  SARS-CoV-2/Wuhan/WIV05/2019__EPI_ISL_402128 spike protein CDS gc (1-1147)(Q965C_S1003C) LumSynth construct
auguucguguuccugguccuccugccccuggugagcucccagugcgugaaccucaccacccgcacgcagcugccgcccgccuacaccaacagcuucacccggggcgucuacuaccccgacaagguguuccgcuccagcgugcugcacuccacccaggaccucuuccugcccuucuucagcaacgucacgugguuccacgccauccacguguccgggaccaacggcaccaagcgguucgacaacccggugcugcccuucaacgacggggucuacuucgcgagcaccgagaaguccaacaucauccgcggcuggaucuucgggacgacccucgacagcaagacccagucccugcugaucgugaacaacgccaccaacguggucaucaaggugugcgaguuccaguucugcaacgaccccuuccucggcguguacuaccacaagaacaacaagagcuggauggaguccgaguuccgggucuacagcuccgccaacaacugcacguucgaguacgugagccagcccuuccugauggaccuggagggcaagcaggggaacuucaagaaccuccgcgaguucguguucaagaacaucgacggcuacuucaagaucuacuccaagcacaccccgaucaaccugguccgggaccugccccagggguucagcgcccucgagccccugguggaccugcccaucggcaucaacaucacccgcuuccagacccuccuggcccugcaccgguccuaccucacgccgggggacagcagcuccggcuggaccgcgggcgccgccgccuacuacgugggguaccugcagccccgcaccuuccugcucaaguacaacgagaacggcaccaucacggacgcggucgacugcgcccuggacccccugagcgagaccaagugcacccucaaguccuucaccguggagaaggggaucuaccagacgagcaacuuccgggugcagcccaccgaguccaucguccgcuucccgaacaucaccaaccugugccccuucggcgagguguucaacgccacccgguucgccagcgucuacgccuggaaccgcaagcggaucuccaacugcguggcggacuacagcgugcuguacaacuccgccagcuucuccacguucaagugcuacggcgucagccccaccaagcucaacgaccugugcuucaccaacguguacgccgacuccuucgugauccgcggggacgagguccggcagaucgcccccggccagaccgggaagaucgccgacuacaacuacaagcugccggacgacuucacgggcugcgugaucgcguggaacagcaacaaccucgacuccaaggucgggggcaacuacaacuaccuguaccgccuguuccgcaagagcaaccucaagcccuucgagcgggacaucuccaccgagaucuaccaggccggcagcacccccugcaacgggguggagggcuucaacugcuacuucccccugcaguccuacggguuccagccgaccaacggcgugggguaccagcccuaccggguggucgugcugagcuucgagcuccugcacgcccccgccacggugugcggccccaagaaguccaccaaccuggucaagaacaagugcgugaacuucaacuucaacggccucaccgggaccggcgugcugaccgagagcaacaagaaguuccugccguuccagcaguucgggcgcgacaucgccgacacgaccgacgcgguccgcgacccccagacccuggagauccucgacaucacccccugcagcuucggcgggguguccgugaucacgccgggcaccaacaccagcaaccaggucgccgugcuguaccaggacgugaacugcaccgagguccccguggccauccacgccgaccagcugacgcccaccuggcggguguacuccaccggcagcaacgucuuccagacccgcgccgggugccucaucggcgcggagcacgugaacaacuccuacgagugcgacauccccaucggggccggcaucugcgccagcuaccagacgcagaccaacuccccgcggcgcgcccggagcguggcgucccagagcaucaucgccuacaccaugucccugggcgccgagaacagcgucgccuacuccaacaacagcaucgccauccccaccaacuucacgaucuccgugaccaccgagauccugcccgugagcaugaccaagacgagcgucgacugcaccauguacaucugcggggacuccaccgagugcagcaaccuccugcugcaguacggcuccuucugcacccagcucaaccgcgcgcugacggggaucgccguggagcaggacaagaacacccaggagguguucgcccaggucaagcagaucuacaagacgcccccgaucaaggacuucggcggguucaacuucagccagauccugcccgaccccuccaagcccagcaagcgguccuucaucgaggaccuccuguucaacaaggugacccuggccgacgccggcuucaucaagcaguacggcgacugccucggggacaucgcggcccgcgaccugaucugcgcccagaaguucaacggccugaccgugcucccgccccugcugaccgacgagaugaucgcccaguacaccagcgcccuccuggcggggaccaucacguccggcuggaccuucggggccggcgccgcccugcagauccccuucgcgaugcagauggccuaccgguucaacggcaucggggucacccagaacgugcucuacgagaaccagaagcugaucgccaaccaguucaacagcgccaucggcaagauccaggacucccugagcuccaccgccagcgcgcucgggaagcugcaggacguggucaaccagaacgcccaggcccugaacacgcucgugaagugccuguccagcaacuucggcgccaucuccagcgugcugaacgacauccucucccgccuggacaaggucgaggccgaggugcagaucgaccggcugaucaccgggcgccuccagugccugcagaccuacgugacccagcagcugauccgggcggccgagauccgcgccagcgccaaccucgccgcgaccaagauguccgagugcguccugggccagagcaagcggguggacuucugcggcaagggguaccaccugauguccuucccccagagcgccccgcacggcguggucuuccuccacgugacguacguccccgcccaggagaagaacuucaccaccgcccccgcgaucugccacgacgggaaggcccacuucccccgcgagggcguguucguguccaacgggacccacugguucgucacgcagcggaacuucuacgagccgcagaucaucaccaccgacaacaccuucgugagcggcaacugcgacguggucaucggcaucgugaacaacacgguguacgacccccugcagcccgagcuggacuccggcggcgggagcgggggcgggcagaucuacgagggcaagcugaccgccgaggggcuccgcuucggcaucguggccagccgguucaaccacgcgcuggucgaccgccugguggagggggccaucgacgccaucgugcggcacggcgggcgcgaggaggacaucacccucguccgggugcccggcuccugggagaucccgguggccgccggcgagcuggcccgcaaggaggacaucgacgcggucaucgccaucggggugcugauccggggcgccacgccccacuucgacuacaucgccagcgagguguccaaggggcucgcggaccugagccuggagcuccgcaagcccaucaccuucggcgucaucaccgccgacacccuggagcaggccaucgagcgggccgggacgaagcacggcaacaagggcugggaggccgcgcuguccgccaucgagauggccaaccucuucaagagccugcgcuga

SEQ ID NO: 11918 - RNA, 3924 nt, Artificial Sequence
  SARS-CoV-2/Wuhan/WIV05/2019__EPI_ISL_402128 spike protein CDS gc (1-1147)(F970C_G999C) LumSynth construct
auguucguguuccugguccuccugccccuggugagcucccagugcgugaaccucaccacccgcacgcagcugccgcccgccuacaccaacagcuucacccggggcgucuacuaccccgacaagguguuccgcuccagcgugcugcacuccacccaggaccucuuccugcccuucuucagcaacgucacgugguuccacgccauccacguguccgggaccaacggcaccaagcgguucgacaacccggugcugcccuucaacgacggggucuacuucgcgagcaccgagaaguccaacaucauccgcggcuggaucuucgggacgacccucgacagcaagacccagucccugcugaucgugaacaacgccaccaacguggucaucaaggugugcgaguuccaguucugcaacgaccccuuccucggcguguacuaccacaagaacaacaagagcuggauggaguccgaguuccgggucuacagcuccgccaacaacugcacguucgaguacgugagccagcccuuccugauggaccuggagggcaagcaggggaacuucaagaaccuccgcgaguucguguucaagaacaucgacggcuacuucaagaucuacuccaagcacaccccgaucaaccugguccgggaccugccccagggguucagcgcccucgagccccugguggaccugcccaucggcaucaacaucacccgcuuccagacccuccuggcccugcaccgguccuaccucacgccgggggacagcagcuccggcuggaccgcgggcgccgccgccuacuacgugggguaccugcagccccgcaccuuccugcucaaguacaacgagaacggcaccaucacggacgcggucgacugcgcccuggacccccugagcgagaccaagugcacccucaaguccuucaccguggagaaggggaucuaccagacgagcaacuuccgggugcagcccaccgaguccaucguccgcuucccgaacaucaccaaccugugccccuucggcgagguguucaacgccacccgguucgccagcgucuacgccuggaaccgcaagcggaucuccaacugcguggcggacuacagcgugcuguacaacuccgccagcuucuccacguucaagugcuacggcgucagccccaccaagcucaacgaccugugcuucaccaacguguacgccgacuccuucgugauccgcggggacgagguccggcagaucgcccccggccagaccgggaagaucgccgacuacaacuacaagcugccggacgacuucacgggcugcgugaucgcguggaacagcaacaaccucgacuccaaggucgggggcaacuacaacuaccuguaccgccuguuccgcaagagcaaccucaagcccuucgagcgggacaucuccaccgagaucuaccaggccggcagcacccccugcaacgggguggagggcuucaacugcuacuucccccugcaguccuacggguuccagccgaccaacggcgugggguaccagcccuaccggguggucgugcugagcuucgagcuccugcacgcccccgccacggugugcggccccaagaaguccaccaaccuggucaagaacaagugcgugaacuucaacuucaacggccucaccgggaccggcgugcugaccgagagcaacaagaaguuccugccguuccagcaguucgggcgcgacaucgccgacacgaccgacgcgguccgcgacccccagacccuggagauccucgacaucacccccugcagcuucggcgggguguccgugaucacgccgggcaccaacaccagcaaccaggucgccgugcuguaccaggacgugaacugcaccgagguccccguggccauccacgccgaccagcugacgcccaccuggcggguguacuccaccggcagcaacgucuuccagacccgcgccgggugccucaucggcgcggagcacgugaacaacuccuacgagugcgacauccccaucggggccggcaucugcgccagcuaccagacgcagaccaacuccccgcggcgcgcccggagcguggcgucccagagcaucaucgccuacaccaugucccugggcgccgagaacagcgucgccuacuccaacaacagcaucgccauccccaccaacuucacgaucuccgugaccaccgagauccugcccgugagcaugaccaagacgagcgucgacugcaccauguacaucugcggggacuccaccgagugcagcaaccuccugcugcaguacggcuccuucugcacccagcucaaccgcgcgcugacggggaucgccguggagcaggacaagaacacccaggagguguucgcccaggucaagcagaucuacaagacgcccccgaucaaggacuucggcggguucaacuucagccagauccugcccgaccccuccaagcccagcaagcgguccuucaucgaggaccuccuguucaacaaggugacccuggccgacgccggcuucaucaagcaguacggcgacugccucggggacaucgcggcccgcgaccugaucugcgcccagaaguucaacggccugaccgugcucccgccccugcugaccgacgagaugaucgcccaguacaccagcgcccuccuggcggggaccaucacguccggcuggaccuucggggccggcgccgcccugcagauccccuucgcgaugcagauggccuaccgguucaacggcaucggggucacccagaacgugcucuacgagaaccagaagcugaucgccaaccaguucaacagcgccaucggcaagauccaggacucccugagcuccaccgccagcgcgcucgggaagcugcaggacguggucaaccagaacgcccaggcccugaacacgcucgugaagcagcuguccagcaacugcggcgccaucuccagcgugcugaacgacauccucucccgccuggacaaggucgaggccgaggugcagaucgaccggcugaucaccugucgccuccagagccugcagaccuacgugacccagcagcugauccgggcggccgagauccgcgccagcgccaaccucgccgcgaccaagauguccgagugcguccugggccagagcaagcggguggacuucugcggcaagggguaccaccugauguccuucccccagagcgccccgcacggcguggucuuccuccacgugacguacguccccgcccaggagaagaacuucaccaccgcccccgcgaucugccacgacgggaaggcccacuucccccgcgagggcguguucguguccaacgggacccacugguucgucacgcagcggaacuucuacgagccgcagaucaucaccaccgacaacaccuucgugagcggcaacugcgacguggucaucggcaucgugaacaacacgguguacgacccccugcagcccgagcuggacuccggcggcgggagcgggggcgggcagaucuacgagggcaagcugaccgccgaggggcuccgcuucggcaucguggccagccgguucaaccacgcgcuggucgaccgccugguggagggggccaucgacgccaucgugcggcacggcgggcgcgaggaggacaucacccucguccgggugcccggcuccugggagaucccgguggccgccggcgagcuggcccgcaaggaggacaucgacgcggucaucgccaucggggugcugauccggggcgccacgccccacuucgacuacaucgccagcgagguguccaaggggcucgcggaccugagccuggagcuccgcaagcccaucaccuucggcgucaucaccgccgacacccuggagcaggccaucgagcgggccgggacgaagcacggcaacaagggcugggaggccgcgcuguccgccaucgagauggccaaccucuucaagagccugcgcuga

SEQ ID NO: 11919 - RNA, 3924 nt, Artificial Sequence
  SARS-CoV-2/Wuhan/WIV05/2019__EPI_ISL_402128 spike protein CDS gc (1-1147)(A972C_R995C) LumSynth construct
auguucguguuccugguccuccugccccuggugagcucccagugcgugaaccucaccacccgcacgcagcugccgcccgccuacaccaacagcuucacccggggcgucuacuaccccgacaagguguuccgcuccagcgugcugcacuccacccaggaccucuuccugcccuucuucagcaacgucacgugguuccacgccauccacguguccgggaccaacggcaccaagcgguucgacaacccggugcugcccuucaacgacggggucuacuucgcgagcaccgagaaguccaacaucauccgcggcuggaucuucgggacgacccucgacagcaagacccagucccugcugaucgugaacaacgccaccaacguggucaucaaggugugcgaguuccaguucugcaacgaccccuuccucggcguguacuaccacaagaacaacaagagcuggauggaguccgaguuccgggucuacagcuccgccaacaacugcacguucgaguacgugagccagcccuuccugauggaccuggagggcaagcaggggaacuucaagaaccuccgcgaguucguguucaagaacaucgacggcuacuucaagaucuacuccaagcacaccccgaucaaccugguccgggaccugccccagggguucagcgcccucgagccccugguggaccugcccaucggcaucaacaucacccgcuuccagacccuccuggcccugcaccgguccuaccucacgccgggggacagcagcuccggcuggaccgcgggcgccgccgccuacuacgugggguaccugcagccccgcaccuuccugcucaaguacaacgagaacggcaccaucacggacgcggucgacugcgcccuggacccccugagcgagaccaagugcacccucaaguccuucaccguggagaaggggaucuaccagacgagcaacuuccgggugcagcccaccgaguccaucguccgcuucccgaacaucaccaaccugugccccuucggcgagguguucaacgccacccgguucgccagcgucuacgccuggaaccgcaagcggaucuccaacugcguggcggacuacagcgugcuguacaacuccgccagcuucuccacguucaagugcuacggcgucagccccaccaagcucaacgaccugugcuucaccaacguguacgccgacuccuucgugauccgcggggacgagguccggcagaucgcccccggccagaccgggaagaucgccgacuacaacuacaagcugccggacgacuucacgggcugcgugaucgcguggaacagcaacaaccucgacuccaaggucgggggcaacuacaacuaccuguaccgccuguuccgcaagagcaaccucaagcccuucgagcgggacaucuccaccgagaucuaccaggccggcagcacccccugcaacgggguggagggcuucaacugcuacuucccccugcaguccuacggguuccagccgaccaacggcgugggguaccagcccuaccggguggucgugcugagcuucgagcuccugcacgcccccgccacggugugcggccccaagaaguccaccaaccuggucaagaacaagugcgugaacuucaacuucaacggccucaccgggaccggcgugcugaccgagagcaacaagaaguuccugccguuccagcaguucgggcgcgacaucgccgacacgaccgacgcgguccgcgacccccagacccuggagauccucgacaucacccccugcagcuucggcgggguguccgugaucacgccgggcaccaacaccagcaaccaggucgccgugcuguaccaggacgugaacugcaccgagguccccguggccauccacgccgaccagcugacgcccaccuggcggguguacuccaccggcagcaacgucuuccagacccgcgccgggugccucaucggcgcggagcacgugaacaacuccuacgagugcgacauccccaucggggccggcaucugcgccagcuaccagacgcagaccaacuccccgcggcgcgcccggagcguggcgucccagagcaucaucgccuacaccaugucccugggcgccgagaacagcgucgccuacuccaacaacagcaucgccauccccaccaacuucacgaucuccgugaccaccgagauccugcccgugagcaugaccaagacgagcgucgacugcaccauguacaucugcggggacuccaccgagugcagcaaccuccugcugcaguacggcuccuucugcacccagcucaaccgcgcgcugacggggaucgccguggagcaggacaagaacacccaggagguguucgcccaggucaagcagaucuacaagacgcccccgaucaaggacuucggcggguucaacuucagccagauccugcccgaccccuccaagcccagcaagcgguccuucaucgaggaccuccuguucaacaaggugacccuggccgacgccggcuucaucaagcaguacggcgacugccucggggacaucgcggcccgcgaccugaucugcgcccagaaguucaacggccugaccgugcucccgccccugcugaccgacgagaugaucgcccaguacaccagcgcccuccuggcggggaccaucacguccggcuggaccuucggggccggcgccgcccugcagauccccuucgcgaugcagauggccuaccgguucaacggcaucggggucacccagaacgugcucuacgagaaccagaagcugaucgccaaccaguucaacagcgccaucggcaagauccaggacucccugagcuccaccgccagcgcgcucgggaagcugcaggacguggucaaccagaacgcccaggcccugaacacgcucgugaagcagcuguccagcaacuucggcugcaucuccagcgugcugaacgacauccucucccgccuggacaaggucgaggccgaggugcagaucgacugccugaucaccgggcgccuccagagccugcagaccuacgugacccagcagcugauccgggcggccgagauccgcgccagcgccaaccucgccgcgaccaagauguccgagugcguccugggccagagcaagcggguggacuucugcggcaagggguaccaccugauguccuucccccagagcgccccgcacggcguggucuuccuccacgugacguacguccccgcccaggagaagaacuucaccaccgcccccgcgaucugccacgacgggaaggcccacuucccccgcgagggcguguucguguccaacgggacccacugguucgucacgcagcggaacuucuacgagccgcagaucaucaccaccgacaacaccuucgugagcggcaacugcgacguggucaucggcaucgugaacaacacgguguacgacccccugcagcccgagcuggacuccggcggcgggagcgggggcgggcagaucuacgagggcaagcugaccgccgaggggcuccgcuucggcaucguggccagccgguucaaccacgcgcuggucgaccgccugguggagggggccaucgacgccaucgugcggcacggcgggcgcgaggaggacaucacccucguccgggugcccggcuccugggagaucccgguggccgccggcgagcuggcccgcaaggaggacaucgacgcggucaucgccaucggggugcugauccggggcgccacgccccacuucgacuacaucgccagcgagguguccaaggggcucgcggaccugagccuggagcuccgcaagcccaucaccuucggcgucaucaccgccgacacccuggagcaggccaucgagcgggccgggacgaagcacggcaacaagggcugggaggccgcgcuguccgccaucgagauggccaaccucuucaagagccugcgcuga

SEQ ID NO: 11920 - RNA, 3924 nt, Artificial Sequence
  SARS-CoV-2/Wuhan/WIV05/2019__EPI_ISL_402128 spike protein CDS gc (1-1147)(A890C_V1040C) LumSynth construct
auguucguguuccugguccuccugccccuggugagcucccagugcgugaaccucaccacccgcacgcagcugccgcccgccuacaccaacagcuucacccggggcgucuacuaccccgacaagguguuccgcuccagcgugcugcacuccacccaggaccucuuccugcccuucuucagcaacgucacgugguuccacgccauccacguguccgggaccaacggcaccaagcgguucgacaacccggugcugcccuucaacgacggggucuacuucgcgagcaccgagaaguccaacaucauccgcggcuggaucuucgggacgacccucgacagcaagacccagucccugcugaucgugaacaacgccaccaacguggucaucaaggugugcgaguuccaguucugcaacgaccccuuccucggcguguacuaccacaagaacaacaagagcuggauggaguccgaguuccgggucuacagcuccgccaacaacugcacguucgaguacgugagccagcccuuccugauggaccuggagggcaagcaggggaacuucaagaaccuccgcgaguucguguucaagaacaucgacggcuacuucaagaucuacuccaagcacaccccgaucaaccugguccgggaccugccccagggguucagcgcccucgagccccugguggaccugcccaucggcaucaacaucacccgcuuccagacccuccuggcccugcaccgguccuaccucacgccgggggacagcagcuccggcuggaccgcgggcgccgccgccuacuacgugggguaccugcagccccgcaccuuccugcucaaguacaacgagaacggcaccaucacggacgcggucgacugcgcccuggacccccugagcgagaccaagugcacccucaaguccuucaccguggagaaggggaucuaccagacgagcaacuuccgggugcagcccaccgaguccaucguccgcuucccgaacaucaccaaccugugccccuucggcgagguguucaacgccacccgguucgccagcgucuacgccuggaaccgcaagcggaucuccaacugcguggcggacuacagcgugcuguacaacuccgccagcuucuccacguucaagugcuacggcgucagccccaccaagcucaacgaccugugcuucaccaacguguacgccgacuccuucgugauccgcggggacgagguccggcagaucgcccccggccagaccgggaagaucgccgacuacaacuacaagcugccggacgacuucacgggcugcgugaucgcguggaacagcaacaaccucgacuccaaggucgggggcaacuacaacuaccuguaccgccuguuccgcaagagcaaccucaagcccuucgagcgggacaucuccaccgagaucuaccaggccggcagcacccccugcaacgggguggagggcuucaacugcuacuucccccugcaguccuacggguuccagccgaccaacggcgugggguaccagcccuaccggguggucgugcugagcuucgagcuccugcacgcccccgccacggugugcggccccaagaaguccaccaaccuggucaagaacaagugcgugaacuucaacuucaacggccucaccgggaccggcgugcugaccgagagcaacaagaaguuccugccguuccagcaguucgggcgcgacaucgccgacacgaccgacgcgguccgcgacccccagacccuggagauccucgacaucacccccugcagcuucggcgggguguccgugaucacgccgggcaccaacaccagcaaccaggucgccgugcuguaccaggacgugaacugcaccgagguccccguggccauccacgccgaccagcugacgcccaccuggcggguguacuccaccggcagcaacgucuuccagacccgcgccgggugccucaucggcgcggagcacgugaacaacuccuacgagugcgacauccccaucggggccggcaucugcgccagcuaccagacgcagaccaacuccccgcggcgcgcccggagcguggcgucccagagcaucaucgccuacaccaugucccugggcgccgagaacagcgucgccuacuccaacaacagcaucgccauccccaccaacuucacgaucuccgugaccaccgagauccugcccgugagcaugaccaagacgagcgucgacugcaccauguacaucugcggggacuccaccgagugcagcaaccuccugcugcaguacggcuccuucugcacccagcucaaccgcgcgcugacggggaucgccguggagcaggacaagaacacccaggagguguucgcccaggucaagcagaucuacaagacgcccccgaucaaggacuucggcggguucaacuucagccagauccugcccgaccccuccaagcccagcaagcgguccuucaucgaggaccuccuguucaacaaggugacccuggccgacgccggcuucaucaagcaguacggcgacugccucggggacaucgcggcccgcgaccugaucugcgcccagaaguucaacggccugaccgugcucccgccccugcugaccgacgagaugaucgcccaguacaccagcgcccuccuggcggggaccaucacguccggcuggaccuucgggugcggcgccgcccugcagauccccuucgcgaugcagauggccuaccgguucaacggcaucggggucacccagaacgugcucuacgagaaccagaagcugaucgccaaccaguucaacagcgccaucggcaagauccaggacucccugagcuccaccgccagcgcgcucgggaagcugcaggacguggucaaccagaacgcccaggcccugaacacgcucgugaagcagcuguccagcaacuucggcgccaucuccagcgugcugaacgacauccucucccgccuggacaaggucgaggccgaggugcagaucgaccggcugaucaccgggcgccuccagagccugcagaccuacgugacccagcagcugauccgggcggccgagauccgcgccagcgccaaccucgccgcgaccaagauguccgagugcguccugggccagagcaagcggugcgacuucugcggcaagggguaccaccugauguccuucccccagagcgccccgcacggcguggucuuccuccacgugacguacguccccgcccaggagaagaacuucaccaccgcccccgcgaucugccacgacgggaaggcccacuucccccgcgagggcguguucguguccaacgggacccacugguucgucacgcagcggaacuucuacgagccgcagaucaucaccaccgacaacaccuucgugagcggcaacugcgacguggucaucggcaucgugaacaacacgguguacgacccccugcagcccgagcuggacuccggcggcgggagcgggggcgggcagaucuacgagggcaagcugaccgccgaggggcuccgcuucggcaucguggccagccgguucaaccacgcgcuggucgaccgccugguggagggggccaucgacgccaucgugcggcacggcgggcgcgaggaggacaucacccucguccgggugcccggcuccugggagaucccgguggccgccggcgagcuggcccgcaaggaggacaucgacgcggucaucgccaucggggugcugauccggggcgccacgccccacuucgacuacaucgccagcgagguguccaaggggcucgcggaccugagccuggagcuccgcaagcccaucaccuucggcgucaucaccgccgacacccuggagcaggccaucgagcgggccgggacgaagcacggcaacaagggcugggaggccgcgcuguccgccaucgagauggccaaccucuucaagagccugcgcuga

SEQ ID NO: 11921 - RNA, 3924 nt, Artificial Sequence
  SARS-CoV-2/Wuhan/WIV05/2019__EPI_ISL_402128 spike protein CDS gc (1-1147)(T874C_S1055C) LumSynth construct
auguucguguuccugguccuccugccccuggugagcucccagugcgugaaccucaccacccgcacgcagcugccgcccgccuacaccaacagcuucacccggggcgucuacuaccccgacaagguguuccgcuccagcgugcugcacuccacccaggaccucuuccugcccuucuucagcaacgucacgugguuccacgccauccacguguccgggaccaacggcaccaagcgguucgacaacccggugcugcccuucaacgacggggucuacuucgcgagcaccgagaaguccaacaucauccgcggcuggaucuucgggacgacccucgacagcaagacccagucccugcugaucgugaacaacgccaccaacguggucaucaaggugugcgaguuccaguucugcaacgaccccuuccucggcguguacuaccacaagaacaacaagagcuggauggaguccgaguuccgggucuacagcuccgccaacaacugcacguucgaguacgugagccagcccuuccugauggaccuggagggcaagcaggggaacuucaagaaccuccgcgaguucguguucaagaacaucgacggcuacuucaagaucuacuccaagcacaccccgaucaaccugguccgggaccugccccagggguucagcgcccucgagccccugguggaccugcccaucggcaucaacaucacccgcuuccagacccuccuggcccugcaccgguccuaccucacgccgggggacagcagcuccggcuggaccgcgggcgccgccgccuacuacgugggguaccugcagccccgcaccuuccugcucaaguacaacgagaacggcaccaucacggacgcggucgacugcgcccuggacccccugagcgagaccaagugcacccucaaguccuucaccguggagaaggggaucuaccagacgagcaacuuccgggugcagcccaccgaguccaucguccgcuucccgaacaucaccaaccugugccccuucggcgagguguucaacgccacccgguucgccagcgucuacgccuggaaccgcaagcggaucuccaacugcguggcggacuacagcgugcuguacaacuccgccagcuucuccacguucaagugcuacggcgucagccccaccaagcucaacgaccugugcuucaccaacguguacgccgacuccuucgugauccgcggggacgagguccggcagaucgcccccggccagaccgggaagaucgccgacuacaacuacaagcugccggacgacuucacgggcugcgugaucgcguggaacagcaacaaccucgacuccaaggucgggggcaacuacaacuaccuguaccgccuguuccgcaagagcaaccucaagcccuucgagcgggacaucuccaccgagaucuaccaggccggcagcacccccugcaacgggguggagggcuucaacugcuacuucccccugcaguccuacggguuccagccgaccaacggcgugggguaccagcccuaccggguggucgugcugagcuucgagcuccugcacgcccccgccacggugugcggccccaagaaguccaccaaccuggucaagaacaagugcgugaacuucaacuucaacggccucaccgggaccggcgugcugaccgagagcaacaagaaguuccugccguuccagcaguucgggcgcgacaucgccgacacgaccgacgcgguccgcgacccccagacccuggagauccucgacaucacccccugcagcuucggcgggguguccgugaucacgccgggcaccaacaccagcaaccaggucgccgugcuguaccaggacgugaacugcaccgagguccccguggccauccacgccgaccagcugacgcccaccuggcggguguacuccaccggcagcaacgucuuccagacccgcgccgggugccucaucggcgcggagcacgugaacaacuccuacgagugcgacauccccaucggggccggcaucugcgccagcuaccagacgcagaccaacuccccgcggcgcgcccggagcguggcgucccagagcaucaucgccuacaccaugucccugggcgccgagaacagcgucgccuacuccaacaacagcaucgccauccccaccaacuucacgaucuccgugaccaccgagauccugcccgugagcaugaccaagacgagcgucgacugcaccauguacaucugcggggacuccaccgagugcagcaaccuccugcugcaguacggcuccuucugcacccagcucaaccgcgcgcugacggggaucgccguggagcaggacaagaacacccaggagguguucgcccaggucaagcagaucuacaagacgcccccgaucaaggacuucggcggguucaacuucagccagauccugcccgaccccuccaagcccagcaagcgguccuucaucgaggaccuccuguucaacaaggugacccuggccgacgccggcuucaucaagcaguacggcgacugccucggggacaucgcggcccgcgaccugaucugcgcccagaaguucaacggccugaccgugcucccgccccugcugaccgacgagaugaucgcccaguacugcagcgcccuccuggcggggaccaucacguccggcuggaccuucggggccggcgccgcccugcagauccccuucgcgaugcagauggccuaccgguucaacggcaucggggucacccagaacgugcucuacgagaaccagaagcugaucgccaaccaguucaacagcgccaucggcaagauccaggacucccugagcuccaccgccagcgcgcucgggaagcugcaggacguggucaaccagaacgcccaggcccugaacacgcucgugaagcagcuguccagcaacuucggcgccaucuccagcgugcugaacgacauccucucccgccuggacaaggucgaggccgaggugcagaucgaccggcugaucaccgggcgccuccagagccugcagaccuacgugacccagcagcugauccgggcggccgagauccgcgccagcgccaaccucgccgcgaccaagauguccgagugcguccugggccagagcaagcggguggacuucugcggcaagggguaccaccugauguccuucccccagugcgccccgcacggcguggucuuccuccacgugacguacguccccgcccaggagaagaacuucaccaccgcccccgcgaucugccacgacgggaaggcccacuucccccgcgagggcguguucguguccaacgggacccacugguucgucacgcagcggaacuucuacgagccgcagaucaucaccaccgacaacaccuucgugagcggcaacugcgacguggucaucggcaucgugaacaacacgguguacgacccccugcagcccgagcuggacuccggcggcgggagcgggggcgggcagaucuacgagggcaagcugaccgccgaggggcuccgcuucggcaucguggccagccgguucaaccacgcgcuggucgaccgccugguggagggggccaucgacgccaucgugcggcacggcgggcgcgaggaggacaucacccucguccgggugcccggcuccugggagaucccgguggccgccggcgagcuggcccgcaaggaggacaucgacgcggucaucgccaucggggugcugauccggggcgccacgccccacuucgacuacaucgccagcgagguguccaaggggcucgcggaccugagccuggagcuccgcaagcccaucaccuucggcgucaucaccgccgacacccuggagcaggccaucgagcgggccgggacgaagcacggcaacaagggcugggaggccgcgcuguccgccaucgagauggccaaccucuucaagagccugcgcuga

SEQ ID NO: 11922 - RNA, 3948 nt, Artificial Sequence
  SARS-CoV-2/Wuhan/WIV05/2019__EPI_ISL_402128 spike protein CDS gc (1-1147) Ferritin construct
auguucguguuccugguccuccugccccuggugagcucccagugcgugaaccucaccacccgcacgcagcugccgcccgccuacaccaacagcuucacccggggcgucuacuaccccgacaagguguuccgcuccagcgugcugcacuccacccaggaccucuuccugcccuucuucagcaacgucacgugguuccacgccauccacguguccgggaccaacggcaccaagcgguucgacaacccggugcugcccuucaacgacggggucuacuucgcgagcaccgagaaguccaacaucauccgcggcuggaucuucgggacgacccucgacagcaagacccagucccugcugaucgugaacaacgccaccaacguggucaucaaggugugcgaguuccaguucugcaacgaccccuuccucggcguguacuaccacaagaacaacaagagcuggauggaguccgaguuccgggucuacagcuccgccaacaacugcacguucgaguacgugagccagcccuuccugauggaccuggagggcaagcaggggaacuucaagaaccuccgcgaguucguguucaagaacaucgacggcuacuucaagaucuacuccaagcacaccccgaucaaccugguccgggaccugccccagggguucagcgcccucgagccccugguggaccugcccaucggcaucaacaucacccgcuuccagacccuccuggcccugcaccgguccuaccucacgccgggggacagcagcuccggcuggaccgcgggcgccgccgccuacuacgugggguaccugcagccccgcaccuuccugcucaaguacaacgagaacggcaccaucacggacgcggucgacugcgcccuggacccccugagcgagaccaagugcacccucaaguccuucaccguggagaaggggaucuaccagacgagcaacuuccgggugcagcccaccgaguccaucguccgcuucccgaacaucaccaaccugugccccuucggcgagguguucaacgccacccgguucgccagcgucuacgccuggaaccgcaagcggaucuccaacugcguggcggacuacagcgugcuguacaacuccgccagcuucuccacguucaagugcuacggcgucagccccaccaagcucaacgaccugugcuucaccaacguguacgccgacuccuucgugauccgcggggacgagguccggcagaucgcccccggccagaccgggaagaucgccgacuacaacuacaagcugccggacgacuucacgggcugcgugaucgcguggaacagcaacaaccucgacuccaaggucgggggcaacuacaacuaccuguaccgccuguuccgcaagagcaaccucaagcccuucgagcgggacaucuccaccgagaucuaccaggccggcagcacccccugcaacgggguggagggcuucaacugcuacuucccccugcaguccuacggguuccagccgaccaacggcgugggguaccagcccuaccggguggucgugcugagcuucgagcuccugcacgcccccgccacggugugcggccccaagaaguccaccaaccuggucaagaacaagugcgugaacuucaacuucaacggccucaccgggaccggcgugcugaccgagagcaacaagaaguuccugccguuccagcaguucgggcgcgacaucgccgacacgaccgacgcgguccgcgacccccagacccuggagauccucgacaucacccccugcagcuucggcgggguguccgugaucacgccgggcaccaacaccagcaaccaggucgccgugcuguaccaggacgugaacugcaccgagguccccguggccauccacgccgaccagcugacgcccaccuggcggguguacuccaccggcagcaacgucuuccagacccgcgccgggugccucaucggcgcggagcacgugaacaacuccuacgagugcgacauccccaucggggccggcaucugcgccagcuaccagacgcagaccaacuccccgcggcgcgcccggagcguggcgucccagagcaucaucgccuacaccaugucccugggcgccgagaacagcgucgccuacuccaacaacagcaucgccauccccaccaacuucacgaucuccgugaccaccgagauccugcccgugagcaugaccaagacgagcgucgacugcaccauguacaucugcggggacuccaccgagugcagcaaccuccugcugcaguacggcuccuucugcacccagcucaaccgcgcgcugacggggaucgccguggagcaggacaagaacacccaggagguguucgcccaggucaagcagaucuacaagacgcccccgaucaaggacuucggcggguucaacuucagccagauccugcccgaccccuccaagcccagcaagcgguccuucaucgaggaccuccuguucaacaaggugacccuggccgacgccggcuucaucaagcaguacggcgacugccucggggacaucgcggcccgcgaccugaucugcgcccagaaguucaacggccugaccgugcucccgccccugcugaccgacgagaugaucgcccaguacaccagcgcccuccuggcggggaccaucacguccggcuggaccuucggggccggcgccgcccugcagauccccuucgcgaugcagauggccuaccgguucaacggcaucggggucacccagaacgugcucuacgagaaccagaagcugaucgccaaccaguucaacagcgccaucggcaagauccaggacucccugagcuccaccgccagcgcgcucgggaagcugcaggacguggucaaccagaacgcccaggcccugaacacgcucgugaagcagcuguccagcaacuucggcgccaucuccagcgugcugaacgacauccucucccgccuggacaaggucgaggccgaggugcagaucgaccggcugaucaccgggcgccuccagagccugcagaccuacgugacccagcagcugauccgggcggccgagauccgcgccagcgccaaccucgccgcgaccaagauguccgagugcguccugggccagagcaagcggguggacuucugcggcaagggguaccaccugauguccuucccccagagcgccccgcacggcguggucuuccuccacgugacguacguccccgcccaggagaagaacuucaccaccgcccccgcgaucugccacgacgggaaggcccacuucccccgcgagggcguguucguguccaacgggacccacugguucgucacgcagcggaacuucuacgagccgcagaucaucaccaccgacaacaccuucgugagcggcaacugcgacguggucaucggcaucgugaacaacacgguguacgacccccugcagcccgagcuggacuccggcgggggcgggagcgacaucaucaagcuccugaacgagcaggucaacaaggagaugcaguccagcaaccuguacauguccaugagcuccuggugcuacacccacagccucgacggcgccgggcuguuccuguucgaccacgccgcggaggaguacgagcacgccaagaagcucaucaucuuccugaacgagaacaacgugcccgugcagcugaccuccaucagcgccccggagcacaaguucgagggccucacgcagaucuuccagaaggccuacgagcacgagcagcacaucuccgagagcaucaacaacaucguggaccacgccaucaaguccaaggaccacgcgaccuucaacuuccugcagugguacgucgccgagcagcacgaggaggaggugcuguucaaggacauccucgacaagaucgagcugaucgggaacgagaaccacggccuguaccucgccgaccaguacgugaaggggaucgccaagagccgcaaguccuga

SEQ ID NO: 11923 - RNA, 3948 nt, Artificial Sequence
  SARS-CoV-2/Wuhan/WIV05/2019__EPI_ISL_402128 spike protein CDS gc (1-1147)(K986P_V987P) Ferritin construct
auguucguguuccugguccuccugccccuggugagcucccagugcgugaaccucaccacccgcacgcagcugccgcccgccuacaccaacagcuucacccggggcgucuacuaccccgacaagguguuccgcuccagcgugcugcacuccacccaggaccucuuccugcccuucuucagcaacgucacgugguuccacgccauccacguguccgggaccaacggcaccaagcgguucgacaacccggugcugcccuucaacgacggggucuacuucgcgagcaccgagaaguccaacaucauccgcggcuggaucuucgggacgacccucgacagcaagacccagucccugcugaucgugaacaacgccaccaacguggucaucaaggugugcgaguuccaguucugcaacgaccccuuccucggcguguacuaccacaagaacaacaagagcuggauggaguccgaguuccgggucuacagcuccgccaacaacugcacguucgaguacgugagccagcccuuccugauggaccuggagggcaagcaggggaacuucaagaaccuccgcgaguucguguucaagaacaucgacggcuacuucaagaucuacuccaagcacaccccgaucaaccugguccgggaccugccccagggguucagcgcccucgagccccugguggaccugcccaucggcaucaacaucacccgcuuccagacccuccuggcccugcaccgguccuaccucacgccgggggacagcagcuccggcuggaccgcgggcgccgccgccuacuacgugggguaccugcagccccgcaccuuccugcucaaguacaacgagaacggcaccaucacggacgcggucgacugcgcccuggacccccugagcgagaccaagugcacccucaaguccuucaccguggagaaggggaucuaccagacgagcaacuuccgggugcagcccaccgaguccaucguccgcuucccgaacaucaccaaccugugccccuucggcgagguguucaacgccacccgguucgccagcgucuacgccuggaaccgcaagcggaucuccaacugcguggcggacuacagcgugcuguacaacuccgccagcuucuccacguucaagugcuacggcgucagccccaccaagcucaacgaccugugcuucaccaacguguacgccgacuccuucgugauccgcggggacgagguccggcagaucgcccccggccagaccgggaagaucgccgacuacaacuacaagcugccggacgacuucacgggcugcgugaucgcguggaacagcaacaaccucgacuccaaggucgggggcaacuacaacuaccuguaccgccuguuccgcaagagcaaccucaagcccuucgagcgggacaucuccaccgagaucuaccaggccggcagcacccccugcaacgggguggagggcuucaacugcuacuucccccugcaguccuacggguuccagccgaccaacggcgugggguaccagcccuaccggguggucgugcugagcuucgagcuccugcacgcccccgccacggugugcggccccaagaaguccaccaaccuggucaagaacaagugcgugaacuucaacuucaacggccucaccgggaccggcgugcugaccgagagcaacaagaaguuccugccguuccagcaguucgggcgcgacaucgccgacacgaccgacgcgguccgcgacccccagacccuggagauccucgacaucacccccugcagcuucggcgggguguccgugaucacgccgggcaccaacaccagcaaccaggucgccgugcuguaccaggacgugaacugcaccgagguccccguggccauccacgccgaccagcugacgcccaccuggcggguguacuccaccggcagcaacgucuuccagacccgcgccgggugccucaucggcgcggagcacgugaacaacuccuacgagugcgacauccccaucggggccggcaucugcgccagcuaccagacgcagaccaacuccccgcggcgcgcccggagcguggcgucccagagcaucaucgccuacaccaugucccugggcgccgagaacagcgucgccuacuccaacaacagcaucgccauccccaccaacuucacgaucuccgugaccaccgagauccugcccgugagcaugaccaagacgagcgucgacugcaccauguacaucugcggggacuccaccgagugcagcaaccuccugcugcaguacggcuccuucugcacccagcucaaccgcgcgcugacggggaucgccguggagcaggacaagaacacccaggagguguucgcccaggucaagcagaucuacaagacgcccccgaucaaggacuucggcggguucaacuucagccagauccugcccgaccccuccaagcccagcaagcgguccuucaucgaggaccuccuguucaacaaggugacccuggccgacgccggcuucaucaagcaguacggcgacugccucggggacaucgcggcccgcgaccugaucugcgcccagaaguucaacggccugaccgugcucccgccccugcugaccgacgagaugaucgcccaguacaccagcgcccuccuggcggggaccaucacguccggcuggaccuucggggccggcgccgcccugcagauccccuucgcgaugcagauggccuaccgguucaacggcaucggggucacccagaacgugcucuacgagaaccagaagcugaucgccaaccaguucaacagcgccaucggcaagauccaggacucccugagcuccaccgccagcgcgcucgggaagcugcaggacguggucaaccagaacgcccaggcccugaacacgcucgugaagcagcuguccagcaacuucggcgccaucuccagcgugcugaacgacauccucucccgccuggacccgcccgaggccgaggugcagaucgaccggcugaucaccgggcgccuccagagccugcagaccuacgugacccagcagcugauccgggcggccgagauccgcgccagcgccaaccucgccgcgaccaagauguccgagugcguccugggccagagcaagcggguggacuucugcggcaagggguaccaccugauguccuucccccagagcgccccgcacggcguggucuuccuccacgugacguacguccccgcccaggagaagaacuucaccaccgcccccgcgaucugccacgacgggaaggcccacuucccccgcgagggcguguucguguccaacgggacccacugguucgucacgcagcggaacuucuacgagccgcagaucaucaccaccgacaacaccuucgugagcggcaacugcgacguggucaucggcaucgugaacaacacgguguacgacccccugcagcccgagcuggacuccggcgggggcgggagcgacaucaucaagcuccugaacgagcaggucaacaaggagaugcaguccagcaaccuguacauguccaugagcuccuggugcuacacccacagccucgacggcgccgggcuguuccuguucgaccacgccgcggaggaguacgagcacgccaagaagcucaucaucuuccugaacgagaacaacgugcccgugcagcugaccuccaucagcgccccggagcacaaguucgagggccucacgcagaucuuccagaaggccuacgagcacgagcagcacaucuccgagagcaucaacaacaucguggaccacgccaucaaguccaaggaccacgcgaccuucaacuuccugcagugguacgucgccgagcagcacgaggaggaggugcuguucaaggacauccucgacaagaucgagcugaucgggaacgagaaccacggccuguaccucgccgaccaguacgugaaggggaucgccaagagccgcaaguccuga

SEQ ID NO: 11924 - RNA, 3948 nt, Artificial Sequence
  SARS-CoV-2/Wuhan/WIV05/2019__EPI_ISL_402128 spike protein CDS gc (1-1147)(K986P_V987P_T887WN_A1020W) Ferritin construct
auguucguguuccugguccuccugccccuggugagcucccagugcgugaaccucaccacccgcacgcagcugccgcccgccuacaccaacagcuucacccggggcgucuacuaccccgacaagguguuccgcuccagcgugcugcacuccacccaggaccucuuccugcccuucuucagcaacgucacgugguuccacgccauccacguguccgggaccaacggcaccaagcgguucgacaacccggugcugcccuucaacgacggggucuacuucgcgagcaccgagaaguccaacaucauccgcggcuggaucuucgggacgacccucgacagcaagacccagucccugcugaucgugaacaacgccaccaacguggucaucaaggugugcgaguuccaguucugcaacgaccccuuccucggcguguacuaccacaagaacaacaagagcuggauggaguccgaguuccgggucuacagcuccgccaacaacugcacguucgaguacgugagccagcccuuccugauggaccuggagggcaagcaggggaacuucaagaaccuccgcgaguucguguucaagaacaucgacggcuacuucaagaucuacuccaagcacaccccgaucaaccugguccgggaccugccccagggguucagcgcccucgagccccugguggaccugcccaucggcaucaacaucacccgcuuccagacccuccuggcccugcaccgguccuaccucacgccgggggacagcagcuccggcuggaccgcgggcgccgccgccuacuacgugggguaccugcagccccgcaccuuccugcucaaguacaacgagaacggcaccaucacggacgcggucgacugcgcccuggacccccugagcgagaccaagugcacccucaaguccuucaccguggagaaggggaucuaccagacgagcaacuuccgggugcagcccaccgaguccaucguccgcuucccgaacaucaccaaccugugccccuucggcgagguguucaacgccacccgguucgccagcgucuacgccuggaaccgcaagcggaucuccaacugcguggcggacuacagcgugcuguacaacuccgccagcuucuccacguucaagugcuacggcgucagccccaccaagcucaacgaccugugcuucaccaacguguacgccgacuccuucgugauccgcggggacgagguccggcagaucgcccccggccagaccgggaagaucgccgacuacaacuacaagcugccggacgacuucacgggcugcgugaucgcguggaacagcaacaaccucgacuccaaggucgggggcaacuacaacuaccuguaccgccuguuccgcaagagcaaccucaagcccuucgagcgggacaucuccaccgagaucuaccaggccggcagcacccccugcaacgggguggagggcuucaacugcuacuucccccugcaguccuacggguuccagccgaccaacggcgugggguaccagcccuaccggguggucgugcugagcuucgagcuccugcacgcccccgccacggugugcggccccaagaaguccaccaaccuggucaagaacaagugcgugaacuucaacuucaacggccucaccgggaccggcgugcugaccgagagcaacaagaaguuccugccguuccagcaguucgggcgcgacaucgccgacacgaccgacgcgguccgcgacccccagacccuggagauccucgacaucacccccugcagcuucggcgggguguccgugaucacgccgggcaccaacaccagcaaccaggucgccgugcuguaccaggacgugaacugcaccgagguccccguggccauccacgccgaccagcugacgcccaccuggcggguguacuccaccggcagcaacgucuuccagacccgcgccgggugccucaucggcgcggagcacgugaacaacuccuacgagugcgacauccccaucggggccggcaucugcgccagcuaccagacgcagaccaacuccccgcggcgcgcccggagcguggcgucccagagcaucaucgccuacaccaugucccugggcgccgagaacagcgucgccuacuccaacaacagcaucgccauccccaccaacuucacgaucuccgugaccaccgagauccugcccgugagcaugaccaagacgagcgucgacugcaccauguacaucugcggggacuccaccgagugcagcaaccuccugcugcaguacggcuccuucugcacccagcucaaccgcgcgcugacggggaucgccguggagcaggacaagaacacccaggagguguucgcccaggucaagcagaucuacaagacgcccccgaucaaggacuucggcggguucaacuucagccagauccugcccgaccccuccaagcccagcaagcgguccuucaucgaggaccuccuguucaacaaggugacccuggccgacgccggcuucaucaagcaguacggcgacugccucggggacaucgcggcccgcgaccugaucugcgcccagaaguucaacggccugaccgugcucccgccccugcugaccgacgagaugaucgcccaguacaccagcgcccuccuggcggggaccaucacguccggcuggugguucggggccggcgccgcccugcagauccccuucgcgaugcagauggccuaccgguucaacggcaucggggucacccagaacgugcucuacgagaaccagaagcugaucgccaaccaguucaacagcgccaucggcaagauccaggacucccugagcuccaccgccagcgcgcucgggaagcugcaggacguggucaaccagaacgcccaggcccugaacacgcucgugaagcagcuguccagcaacuucggcgccaucuccagcgugcugaacgacauccucucccgccuggacccgcccgaggccgaggugcagaucgaccggcugaucaccgggcgccuccagagccugcagaccuacgugacccagcagcugauccgggcggccgagauccgcuggagcgccaaccucgccgcgaccaagauguccgagugcguccugggccagagcaagcggguggacuucugcggcaagggguaccaccugauguccuucccccagagcgccccgcacggcguggucuuccuccacgugacguacguccccgcccaggagaagaacuucaccaccgcccccgcgaucugccacgacgggaaggcccacuucccccgcgagggcguguucguguccaacgggacccacugguucgucacgcagcggaacuucuacgagccgcagaucaucaccaccgacaacaccuucgugagcggcaacugcgacguggucaucggcaucgugaacaacacgguguacgacccccugcagcccgagcuggacuccggcgggggcgggagcgacaucaucaagcuccugaacgagcaggucaacaaggagaugcaguccagcaaccuguacauguccaugagcuccuggugcuacacccacagccucgacggcgccgggcuguuccuguucgaccacgccgcggaggaguacgagcacgccaagaagcucaucaucuuccugaacgagaacaacgugcccgugcagcugaccuccaucagcgccccggagcacaaguucgagggccucacgcagaucuuccagaaggccuacgagcacgagcagcacaucuccgagagcaucaacaacaucguggaccacgccaucaaguccaaggaccacgcgaccuucaacuuccugcagugguacgucgccgagcagcacgaggaggaggugcuguucaaggacauccucgacaagaucgagcugaucgggaacgagaaccacggccuguaccucgccgaccaguacgugaaggggaucgccaagagccgcaaguccuga

SEQ ID NO: 11925 - RNA, 3948 nt, Artificial Sequence
  SARS-CoV-2/Wuhan/WIV05/2019__EPI_ISL_402128 spike protein CDS gc (1-1147)(K986P_V987P_P1069F) Ferritin construct
auguucguguuccugguccuccugccccuggugagcucccagugcgugaaccucaccacccgcacgcagcugccgcccgccuacaccaacagcuucacccggggcgucuacuaccccgacaagguguuccgcuccagcgugcugcacuccacccaggaccucuuccugcccuucuucagcaacgucacgugguuccacgccauccacguguccgggaccaacggcaccaagcgguucgacaacccggugcugcccuucaacgacggggucuacuucgcgagcaccgagaaguccaacaucauccgcggcuggaucuucgggacgacccucgacagcaagacccagucccugcugaucgugaacaacgccaccaacguggucaucaaggugugcgaguuccaguucugcaacgaccccuuccucggcguguacuaccacaagaacaacaagagcuggauggaguccgaguuccgggucuacagcuccgccaacaacugcacguucgaguacgugagccagcccuuccugauggaccuggagggcaagcaggggaacuucaagaaccuccgcgaguucguguucaagaacaucgacggcuacuucaagaucuacuccaagcacaccccgaucaaccugguccgggaccugccccagggguucagcgcccucgagccccugguggaccugcccaucggcaucaacaucacccgcuuccagacccuccuggcccugcaccgguccuaccucacgccgggggacagcagcuccggcuggaccgcgggcgccgccgccuacuacgugggguaccugcagccccgcaccuuccugcucaaguacaacgagaacggcaccaucacggacgcggucgacugcgcccuggacccccugagcgagaccaagugcacccucaaguccuucaccguggagaaggggaucuaccagacgagcaacuuccgggugcagcccaccgaguccaucguccgcuucccgaacaucaccaaccugugccccuucggcgagguguucaacgccacccgguucgccagcgucuacgccuggaaccgcaagcggaucuccaacugcguggcggacuacagcgugcuguacaacuccgccagcuucuccacguucaagugcuacggcgucagccccaccaagcucaacgaccugugcuucaccaacguguacgccgacuccuucgugauccgcggggacgagguccggcagaucgcccccggccagaccgggaagaucgccgacuacaacuacaagcugccggacgacuucacgggcugcgugaucgcguggaacagcaacaaccucgacuccaaggucgggggcaacuacaacuaccuguaccgccuguuccgcaagagcaaccucaagcccuucgagcgggacaucuccaccgagaucuaccaggccggcagcacccccugcaacgggguggagggcuucaacugcuacuucccccugcaguccuacggguuccagccgaccaacggcgugggguaccagcccuaccggguggucgugcugagcuucgagcuccugcacgcccccgccacggugugcggccccaagaaguccaccaaccuggucaagaacaagugcgugaacuucaacuucaacggccucaccgggaccggcgugcugaccgagagcaacaagaaguuccugccguuccagcaguucgggcgcgacaucgccgacacgaccgacgcgguccgcgacccccagacccuggagauccucgacaucacccccugcagcuucggcgggguguccgugaucacgccgggcaccaacaccagcaaccaggucgccgugcuguaccaggacgugaacugcaccgagguccccguggccauccacgccgaccagcugacgcccaccuggcggguguacuccaccggcagcaacgucuuccagacccgcgccgggugccucaucggcgcggagcacgugaacaacuccuacgagugcgacauccccaucggggccggcaucugcgccagcuaccagacgcagaccaacuccccgcggcgcgcccggagcguggcgucccagagcaucaucgccuacaccaugucccugggcgccgagaacagcgucgccuacuccaacaacagcaucgccauccccaccaacuucacgaucuccgugaccaccgagauccugcccgugagcaugaccaagacgagcgucgacugcaccauguacaucugcggggacuccaccgagugcagcaaccuccugcugcaguacggcuccuucugcacccagcucaaccgcgcgcugacggggaucgccguggagcaggacaagaacacccaggagguguucgcccaggucaagcagaucuacaagacgcccccgaucaaggacuucggcggguucaacuucagccagauccugcccgaccccuccaagcccagcaagcgguccuucaucgaggaccuccuguucaacaaggugacccuggccgacgccggcuucaucaagcaguacggcgacugccucggggacaucgcggcccgcgaccugaucugcgcccagaaguucaacggccugaccgugcucccgccccugcugaccgacgagaugaucgcccaguacaccagcgcccuccuggcggggaccaucacguccggcuggaccuucggggccggcgccgcccugcagauccccuucgcgaugcagauggccuaccgguucaacggcaucggggucacccagaacgugcucuacgagaaccagaagcugaucgccaaccaguucaacagcgccaucggcaagauccaggacucccugagcuccaccgccagcgcgcucgggaagcugcaggacguggucaaccagaacgcccaggcccugaacacgcucgugaagcagcuguccagcaacuucggcgccaucuccagcgugcugaacgacauccucucccgccuggacccgcccgaggccgaggugcagaucgaccggcugaucaccgggcgccuccagagccugcagaccuacgugacccagcagcugauccgggcggccgagauccgcgccagcgccaaccucgccgcgaccaagauguccgagugcguccugggccagagcaagcggguggacuucugcggcaagggguaccaccugauguccuucccccagagcgccccgcacggcguggucuuccuccacgugacguacgucuucgcccaggagaagaacuucaccaccgcccccgcgaucugccacgacgggaaggcccacuucccccgcgagggcguguucguguccaacgggacccacugguucgucacgcagcggaacuucuacgagccgcagaucaucaccaccgacaacaccuucgugagcggcaacugcgacguggucaucggcaucgugaacaacacgguguacgacccccugcagcccgagcuggacuccggcgggggcgggagcgacaucaucaagcuccugaacgagcaggucaacaaggagaugcaguccagcaaccuguacauguccaugagcuccuggugcuacacccacagccucgacggcgccgggcuguuccuguucgaccacgccgcggaggaguacgagcacgccaagaagcucaucaucuuccugaacgagaacaacgugcccgugcagcugaccuccaucagcgccccggagcacaaguucgagggccucacgcagaucuuccagaaggccuacgagcacgagcagcacaucuccgagagcaucaacaacaucguggaccacgccaucaaguccaaggaccacgcgaccuucaacuuccugcagugguacgucgccgagcagcacgaggaggaggugcuguucaaggacauccucgacaagaucgagcugaucgggaacgagaaccacggccuguaccucgccgaccaguacgugaaggggaucgccaagagccgcaaguccuga

SEQ ID NO: 11926 - RNA, 3948 nt, Artificial Sequence
  SARS-CoV-2/Wuhan/WIV05/2019__EPI_ISL_402128 spike protein CDS gc (1-1147)(K986P_V987P_ H1048Q_H1064N_ H1083N_H1101N) Ferritin construct
auguucguguuccugguccuccugccccuggugagcucccagugcgugaaccucaccacccgcacgcagcugccgcccgccuacaccaacagcuucacccggggcgucuacuaccccgacaagguguuccgcuccagcgugcugcacuccacccaggaccucuuccugcccuucuucagcaacgucacgugguuccacgccauccacguguccgggaccaacggcaccaagcgguucgacaacccggugcugcccuucaacgacggggucuacuucgcgagcaccgagaaguccaacaucauccgcggcuggaucuucgggacgacccucgacagcaagacccagucccugcugaucgugaacaacgccaccaacguggucaucaaggugugcgaguuccaguucugcaacgaccccuuccucggcguguacuaccacaagaacaacaagagcuggauggaguccgaguuccgggucuacagcuccgccaacaacugcacguucgaguacgugagccagcccuuccugauggaccuggagggcaagcaggggaacuucaagaaccuccgcgaguucguguucaagaacaucgacggcuacuucaagaucuacuccaagcacaccccgaucaaccugguccgggaccugccccagggguucagcgcccucgagccccugguggaccugcccaucggcaucaacaucacccgcuuccagacccuccuggcccugcaccgguccuaccucacgccgggggacagcagcuccggcuggaccgcgggcgccgccgccuacuacgugggguaccugcagccccgcaccuuccugcucaaguacaacgagaacggcaccaucacggacgcggucgacugcgcccuggacccccugagcgagaccaagugcacccucaaguccuucaccguggagaaggggaucuaccagacgagcaacuuccgggugcagcccaccgaguccaucguccgcuucccgaacaucaccaaccugugccccuucggcgagguguucaacgccacccgguucgccagcgucuacgccuggaaccgcaagcggaucuccaacugcguggcggacuacagcgugcuguacaacuccgccagcuucuccacguucaagugcuacggcgucagccccaccaagcucaacgaccugugcuucaccaacguguacgccgacuccuucgugauccgcggggacgagguccggcagaucgcccccggccagaccgggaagaucgccgacuacaacuacaagcugccggacgacuucacgggcugcgugaucgcguggaacagcaacaaccucgacuccaaggucgggggcaacuacaacuaccuguaccgccuguuccgcaagagcaaccucaagcccuucgagcgggacaucuccaccgagaucuaccaggccggcagcacccccugcaacgggguggagggcuucaacugcuacuucccccugcaguccuacggguuccagccgaccaacggcgugggguaccagcccuaccggguggucgugcugagcuucgagcuccugcacgcccccgccacggugugcggccccaagaaguccaccaaccuggucaagaacaagugcgugaacuucaacuucaacggccucaccgggaccggcgugcugaccgagagcaacaagaaguuccugccguuccagcaguucgggcgcgacaucgccgacacgaccgacgcgguccgcgacccccagacccuggagauccucgacaucacccccugcagcuucggcgggguguccgugaucacgccgggcaccaacaccagcaaccaggucgccgugcuguaccaggacgugaacugcaccgagguccccguggccauccacgccgaccagcugacgcccaccuggcggguguacuccaccggcagcaacgucuuccagacccgcgccgggugccucaucggcgcggagcacgugaacaacuccuacgagugcgacauccccaucggggccggcaucugcgccagcuaccagacgcagaccaacuccccgcggcgcgcccggagcguggcgucccagagcaucaucgccuacaccaugucccugggcgccgagaacagcgucgccuacuccaacaacagcaucgccauccccaccaacuucacgaucuccgugaccaccgagauccugcccgugagcaugaccaagacgagcgucgacugcaccauguacaucugcggggacuccaccgagugcagcaaccuccugcugcaguacggcuccuucugcacccagcucaaccgcgcgcugacggggaucgccguggagcaggacaagaacacccaggagguguucgcccaggucaagcagaucuacaagacgcccccgaucaaggacuucggcggguucaacuucagccagauccugcccgaccccuccaagcccagcaagcgguccuucaucgaggaccuccuguucaacaaggugacccuggccgacgccggcuucaucaagcaguacggcgacugccucggggacaucgcggcccgcgaccugaucugcgcccagaaguucaacggccugaccgugcucccgccccugcugaccgacgagaugaucgcccaguacaccagcgcccuccuggcggggaccaucacguccggcuggaccuucggggccggcgccgcccugcagauccccuucgcgaugcagauggccuaccgguucaacggcaucggggucacccagaacgugcucuacgagaaccagaagcugaucgccaaccaguucaacagcgccaucggcaagauccaggacucccugagcuccaccgccagcgcgcucgggaagcugcaggacguggucaaccagaacgcccaggcccugaacacgcucgugaagcagcuguccagcaacuucggcgccaucuccagcgugcugaacgacauccucucccgccuggacccgcccgaggccgaggugcagaucgaccggcugaucaccgggcgccuccagagccugcagaccuacgugacccagcagcugauccgggcggccgagauccgcgccagcgccaaccucgccgcgaccaagauguccgagugcguccugggccagagcaagcggguggacuucugcggcaagggguaccagcugauguccuucccccagagcgccccgcacggcguggucuuccucaacgugacguacguccccgcccaggagaagaacuucaccaccgcccccgcgaucugcaacgacgggaaggcccacuucccccgcgagggcguguucguguccaacgggaccaacugguucgucacgcagcggaacuucuacgagccgcagaucaucaccaccgacaacaccuucgugagcggcaacugcgacguggucaucggcaucgugaacaacacgguguacgacccccugcagcccgagcuggacuccggcgggggcgggagcgacaucaucaagcuccugaacgagcaggucaacaaggagaugcaguccagcaaccuguacauguccaugagcuccuggugcuacacccacagccucgacggcgccgggcuguuccuguucgaccacgccgcggaggaguacgagcacgccaagaagcucaucaucuuccugaacgagaacaacgugcccgugcagcugaccuccaucagcgccccggagcacaaguucgagggccucacgcagaucuuccagaaggccuacgagcacgagcagcacaucuccgagagcaucaacaacaucguggaccacgccaucaaguccaaggaccacgcgaccuucaacuuccugcagugguacgucgccgagcagcacgaggaggaggugcuguucaaggacauccucgacaagaucgagcugaucgggaacgagaaccacggccuguaccucgccgaccaguacgugaaggggaucgccaagagccgcaaguccuga

SEQ ID NO: 11927 - RNA, 3948 nt, Artificial Sequence
  SARS-CoV-2/Wuhan/WIV05/2019__EPI_ISL_402128 spike protein CDS gc (1-1147)(I712C_T1077C) Ferritin construct
auguucguguuccugguccuccugccccuggugagcucccagugcgugaaccucaccacccgcacgcagcugccgcccgccuacaccaacagcuucacccggggcgucuacuaccccgacaagguguuccgcuccagcgugcugcacuccacccaggaccucuuccugcccuucuucagcaacgucacgugguuccacgccauccacguguccgggaccaacggcaccaagcgguucgacaacccggugcugcccuucaacgacggggucuacuucgcgagcaccgagaaguccaacaucauccgcggcuggaucuucgggacgacccucgacagcaagacccagucccugcugaucgugaacaacgccaccaacguggucaucaaggugugcgaguuccaguucugcaacgaccccuuccucggcguguacuaccacaagaacaacaagagcuggauggaguccgaguuccgggucuacagcuccgccaacaacugcacguucgaguacgugagccagcccuuccugauggaccuggagggcaagcaggggaacuucaagaaccuccgcgaguucguguucaagaacaucgacggcuacuucaagaucuacuccaagcacaccccgaucaaccugguccgggaccugccccagggguucagcgcccucgagccccugguggaccugcccaucggcaucaacaucacccgcuuccagacccuccuggcccugcaccgguccuaccucacgccgggggacagcagcuccggcuggaccgcgggcgccgccgccuacuacgugggguaccugcagccccgcaccuuccugcucaaguacaacgagaacggcaccaucacggacgcggucgacugcgcccuggacccccugagcgagaccaagugcacccucaaguccuucaccguggagaaggggaucuaccagacgagcaacuuccgggugcagcccaccgaguccaucguccgcuucccgaacaucaccaaccugugccccuucggcgagguguucaacgccacccgguucgccagcgucuacgccuggaaccgcaagcggaucuccaacugcguggcggacuacagcgugcuguacaacuccgccagcuucuccacguucaagugcuacggcgucagccccaccaagcucaacgaccugugcuucaccaacguguacgccgacuccuucgugauccgcggggacgagguccggcagaucgcccccggccagaccgggaagaucgccgacuacaacuacaagcugccggacgacuucacgggcugcgugaucgcguggaacagcaacaaccucgacuccaaggucgggggcaacuacaacuaccuguaccgccuguuccgcaagagcaaccucaagcccuucgagcgggacaucuccaccgagaucuaccaggccggcagcacccccugcaacgggguggagggcuucaacugcuacuucccccugcaguccuacggguuccagccgaccaacggcgugggguaccagcccuaccggguggucgugcugagcuucgagcuccugcacgcccccgccacggugugcggccccaagaaguccaccaaccuggucaagaacaagugcgugaacuucaacuucaacggccucaccgggaccggcgugcugaccgagagcaacaagaaguuccugccguuccagcaguucgggcgcgacaucgccgacacgaccgacgcgguccgcgacccccagacccuggagauccucgacaucacccccugcagcuucggcgggguguccgugaucacgccgggcaccaacaccagcaaccaggucgccgugcuguaccaggacgugaacugcaccgagguccccguggccauccacgccgaccagcugacgcccaccuggcggguguacuccaccggcagcaacgucuuccagacccgcgccgggugccucaucggcgcggagcacgugaacaacuccuacgagugcgacauccccaucggggccggcaucugcgccagcuaccagacgcagaccaacuccccgcggcgcgcccggagcguggcgucccagagcaucaucgccuacaccaugucccugggcgccgagaacagcgucgccuacuccaacaacagcugcgccauccccaccaacuucacgaucuccgugaccaccgagauccugcccgugagcaugaccaagacgagcgucgacugcaccauguacaucugcggggacuccaccgagugcagcaaccuccugcugcaguacggcuccuucugcacccagcucaaccgcgcgcugacggggaucgccguggagcaggacaagaacacccaggagguguucgcccaggucaagcagaucuacaagacgcccccgaucaaggacuucggcggguucaacuucagccagauccugcccgaccccuccaagcccagcaagcgguccuucaucgaggaccuccuguucaacaaggugacccuggccgacgccggcuucaucaagcaguacggcgacugccucggggacaucgcggcccgcgaccugaucugcgcccagaaguucaacggccugaccgugcucccgccccugcugaccgacgagaugaucgcccaguacaccagcgcccuccuggcggggaccaucacguccggcuggaccuucggggccggcgccgcccugcagauccccuucgcgaugcagauggccuaccgguucaacggcaucggggucacccagaacgugcucuacgagaaccagaagcugaucgccaaccaguucaacagcgccaucggcaagauccaggacucccugagcuccaccgccagcgcgcucgggaagcugcaggacguggucaaccagaacgcccaggcccugaacacgcucgugaagcagcuguccagcaacuucggcgccaucuccagcgugcugaacgacauccucucccgccuggacaaggucgaggccgaggugcagaucgaccggcugaucaccgggcgccuccagagccugcagaccuacgugacccagcagcugauccgggcggccgagauccgcgccagcgccaaccucgccgcgaccaagauguccgagugcguccugggccagagcaagcggguggacuucugcggcaagggguaccaccugauguccuucccccagagcgccccgcacggcguggucuuccuccacgugacguacguccccgcccaggagaagaacuucaccugcgcccccgcgaucugccacgacgggaaggcccacuucccccgcgagggcguguucguguccaacgggacccacugguucgucacgcagcggaacuucuacgagccgcagaucaucaccaccgacaacaccuucgugagcggcaacugcgacguggucaucggcaucgugaacaacacgguguacgacccccugcagcccgagcuggacuccggcgggggcgggagcgacaucaucaagcuccugaacgagcaggucaacaaggagaugcaguccagcaaccuguacauguccaugagcuccuggugcuacacccacagccucgacggcgccgggcuguuccuguucgaccacgccgcggaggaguacgagcacgccaagaagcucaucaucuuccugaacgagaacaacgugcccgugcagcugaccuccaucagcgccccggagcacaaguucgagggccucacgcagaucuuccagaaggccuacgagcacgagcagcacaucuccgagagcaucaacaacaucguggaccacgccaucaaguccaaggaccacgcgaccuucaacuuccugcagugguacgucgccgagcagcacgaggaggaggugcuguucaaggacauccucgacaagaucgagcugaucgggaacgagaaccacggccuguaccucgccgaccaguacgugaaggggaucgccaagagccgcaaguccuga

SEQ ID NO: 11928 - RNA, 3948 nt, Artificial Sequence
  SARS-CoV-2/Wuhan/WIV05/2019__EPI_ISL_402128 spike protein CDS gc (1-1147)(I714C_Y1110C) Ferritin construct
auguucguguuccugguccuccugccccuggugagcucccagugcgugaaccucaccacccgcacgcagcugccgcccgccuacaccaacagcuucacccggggcgucuacuaccccgacaagguguuccgcuccagcgugcugcacuccacccaggaccucuuccugcccuucuucagcaacgucacgugguuccacgccauccacguguccgggaccaacggcaccaagcgguucgacaacccggugcugcccuucaacgacggggucuacuucgcgagcaccgagaaguccaacaucauccgcggcuggaucuucgggacgacccucgacagcaagacccagucccugcugaucgugaacaacgccaccaacguggucaucaaggugugcgaguuccaguucugcaacgaccccuuccucggcguguacuaccacaagaacaacaagagcuggauggaguccgaguuccgggucuacagcuccgccaacaacugcacguucgaguacgugagccagcccuuccugauggaccuggagggcaagcaggggaacuucaagaaccuccgcgaguucguguucaagaacaucgacggcuacuucaagaucuacuccaagcacaccccgaucaaccugguccgggaccugccccagggguucagcgcccucgagccccugguggaccugcccaucggcaucaacaucacccgcuuccagacccuccuggcccugcaccgguccuaccucacgccgggggacagcagcuccggcuggaccgcgggcgccgccgccuacuacgugggguaccugcagccccgcaccuuccugcucaaguacaacgagaacggcaccaucacggacgcggucgacugcgcccuggacccccugagcgagaccaagugcacccucaaguccuucaccguggagaaggggaucuaccagacgagcaacuuccgggugcagcccaccgaguccaucguccgcuucccgaacaucaccaaccugugccccuucggcgagguguucaacgccacccgguucgccagcgucuacgccuggaaccgcaagcggaucuccaacugcguggcggacuacagcgugcuguacaacuccgccagcuucuccacguucaagugcuacggcgucagccccaccaagcucaacgaccugugcuucaccaacguguacgccgacuccuucgugauccgcggggacgagguccggcagaucgcccccggccagaccgggaagaucgccgacuacaacuacaagcugccggacgacuucacgggcugcgugaucgcguggaacagcaacaaccucgacuccaaggucgggggcaacuacaacuaccuguaccgccuguuccgcaagagcaaccucaagcccuucgagcgggacaucuccaccgagaucuaccaggccggcagcacccccugcaacgggguggagggcuucaacugcuacuucccccugcaguccuacggguuccagccgaccaacggcgugggguaccagcccuaccggguggucgugcugagcuucgagcuccugcacgcccccgccacggugugcggccccaagaaguccaccaaccuggucaagaacaagugcgugaacuucaacuucaacggccucaccgggaccggcgugcugaccgagagcaacaagaaguuccugccguuccagcaguucgggcgcgacaucgccgacacgaccgacgcgguccgcgacccccagacccuggagauccucgacaucacccccugcagcuucggcgggguguccgugaucacgccgggcaccaacaccagcaaccaggucgccgugcuguaccaggacgugaacugcaccgagguccccguggccauccacgccgaccagcugacgcccaccuggcggguguacuccaccggcagcaacgucuuccagacccgcgccgggugccucaucggcgcggagcacgugaacaacuccuacgagugcgacauccccaucggggccggcaucugcgccagcuaccagacgcagaccaacuccccgcggcgcgcccggagcguggcgucccagagcaucaucgccuacaccaugucccugggcgccgagaacagcgucgccuacuccaacaacagcaucgccugccccaccaacuucacgaucuccgugaccaccgagauccugcccgugagcaugaccaagacgagcgucgacugcaccauguacaucugcggggacuccaccgagugcagcaaccuccugcugcaguacggcuccuucugcacccagcucaaccgcgcgcugacggggaucgccguggagcaggacaagaacacccaggagguguucgcccaggucaagcagaucuacaagacgcccccgaucaaggacuucggcggguucaacuucagccagauccugcccgaccccuccaagcccagcaagcgguccuucaucgaggaccuccuguucaacaaggugacccuggccgacgccggcuucaucaagcaguacggcgacugccucggggacaucgcggcccgcgaccugaucugcgcccagaaguucaacggccugaccgugcucccgccccugcugaccgacgagaugaucgcccaguacaccagcgcccuccuggcggggaccaucacguccggcuggaccuucggggccggcgccgcccugcagauccccuucgcgaugcagauggccuaccgguucaacggcaucggggucacccagaacgugcucuacgagaaccagaagcugaucgccaaccaguucaacagcgccaucggcaagauccaggacucccugagcuccaccgccagcgcgcucgggaagcugcaggacguggucaaccagaacgcccaggcccugaacacgcucgugaagcagcuguccagcaacuucggcgccaucuccagcgugcugaacgacauccucucccgccuggacaaggucgaggccgaggugcagaucgaccggcugaucaccgggcgccuccagagccugcagaccuacgugacccagcagcugauccgggcggccgagauccgcgccagcgccaaccucgccgcgaccaagauguccgagugcguccugggccagagcaagcggguggacuucugcggcaagggguaccaccugauguccuucccccagagcgccccgcacggcguggucuuccuccacgugacguacguccccgcccaggagaagaacuucaccaccgcccccgcgaucugccacgacgggaaggcccacuucccccgcgagggcguguucguguccaacgggacccacugguucgucacgcagcggaacuucugcgagccgcagaucaucaccaccgacaacaccuucgugagcggcaacugcgacguggucaucggcaucgugaacaacacgguguacgacccccugcagcccgagcuggacuccggcgggggcgggagcgacaucaucaagcuccugaacgagcaggucaacaaggagaugcaguccagcaaccuguacauguccaugagcuccuggugcuacacccacagccucgacggcgccgggcuguuccuguucgaccacgccgcggaggaguacgagcacgccaagaagcucaucaucuuccugaacgagaacaacgugcccgugcagcugaccuccaucagcgccccggagcacaaguucgagggccucacgcagaucuuccagaaggccuacgagcacgagcagcacaucuccgagagcaucaacaacaucguggaccacgccaucaaguccaaggaccacgcgaccuucaacuuccugcagugguacgucgccgagcagcacgaggaggaggugcuguucaaggacauccucgacaagaucgagcugaucgggaacgagaaccacggccuguaccucgccgaccaguacgugaaggggaucgccaagagccgcaaguccuga

SEQ ID NO: 11929 - RNA, 3948 nt, Artificial Sequence
  SARS-CoV-2/Wuhan/WIV05/2019__EPI_ISL_402128 spike protein CDS gc (1-1147)(P715C_P1069C) Ferritin construct
auguucguguuccugguccuccugccccuggugagcucccagugcgugaaccucaccacccgcacgcagcugccgcccgccuacaccaacagcuucacccggggcgucuacuaccccgacaagguguuccgcuccagcgugcugcacuccacccaggaccucuuccugcccuucuucagcaacgucacgugguuccacgccauccacguguccgggaccaacggcaccaagcgguucgacaacccggugcugcccuucaacgacggggucuacuucgcgagcaccgagaaguccaacaucauccgcggcuggaucuucgggacgacccucgacagcaagacccagucccugcugaucgugaacaacgccaccaacguggucaucaaggugugcgaguuccaguucugcaacgaccccuuccucggcguguacuaccacaagaacaacaagagcuggauggaguccgaguuccgggucuacagcuccgccaacaacugcacguucgaguacgugagccagcccuuccugauggaccuggagggcaagcaggggaacuucaagaaccuccgcgaguucguguucaagaacaucgacggcuacuucaagaucuacuccaagcacaccccgaucaaccugguccgggaccugccccagggguucagcgcccucgagccccugguggaccugcccaucggcaucaacaucacccgcuuccagacccuccuggcccugcaccgguccuaccucacgccgggggacagcagcuccggcuggaccgcgggcgccgccgccuacuacgugggguaccugcagccccgcaccuuccugcucaaguacaacgagaacggcaccaucacggacgcggucgacugcgcccuggacccccugagcgagaccaagugcacccucaaguccuucaccguggagaaggggaucuaccagacgagcaacuuccgggugcagcccaccgaguccaucguccgcuucccgaacaucaccaaccugugccccuucggcgagguguucaacgccacccgguucgccagcgucuacgccuggaaccgcaagcggaucuccaacugcguggcggacuacagcgugcuguacaacuccgccagcuucuccacguucaagugcuacggcgucagccccaccaagcucaacgaccugugcuucaccaacguguacgccgacuccuucgugauccgcggggacgagguccggcagaucgcccccggccagaccgggaagaucgccgacuacaacuacaagcugccggacgacuucacgggcugcgugaucgcguggaacagcaacaaccucgacuccaaggucgggggcaacuacaacuaccuguaccgccuguuccgcaagagcaaccucaagcccuucgagcgggacaucuccaccgagaucuaccaggccggcagcacccccugcaacgggguggagggcuucaacugcuacuucccccugcaguccuacggguuccagccgaccaacggcgugggguaccagcccuaccggguggucgugcugagcuucgagcuccugcacgcccccgccacggugugcggccccaagaaguccaccaaccuggucaagaacaagugcgugaacuucaacuucaacggccucaccgggaccggcgugcugaccgagagcaacaagaaguuccugccguuccagcaguucgggcgcgacaucgccgacacgaccgacgcgguccgcgacccccagacccuggagauccucgacaucacccccugcagcuucggcgggguguccgugaucacgccgggcaccaacaccagcaaccaggucgccgugcuguaccaggacgugaacugcaccgagguccccguggccauccacgccgaccagcugacgcccaccuggcggguguacuccaccggcagcaacgucuuccagacccgcgccgggugccucaucggcgcggagcacgugaacaacuccuacgagugcgacauccccaucggggccggcaucugcgccagcuaccagacgcagaccaacuccccgcggcgcgcccggagcguggcgucccagagcaucaucgccuacaccaugucccugggcgccgagaacagcgucgccuacuccaacaacagcaucgccaucugcaccaacuucacgaucuccgugaccaccgagauccugcccgugagcaugaccaagacgagcgucgacugcaccauguacaucugcggggacuccaccgagugcagcaaccuccugcugcaguacggcuccuucugcacccagcucaaccgcgcgcugacggggaucgccguggagcaggacaagaacacccaggagguguucgcccaggucaagcagaucuacaagacgcccccgaucaaggacuucggcggguucaacuucagccagauccugcccgaccccuccaagcccagcaagcgguccuucaucgaggaccuccuguucaacaaggugacccuggccgacgccggcuucaucaagcaguacggcgacugccucggggacaucgcggcccgcgaccugaucugcgcccagaaguucaacggccugaccgugcucccgccccugcugaccgacgagaugaucgcccaguacaccagcgcccuccuggcggggaccaucacguccggcuggaccuucggggccggcgccgcccugcagauccccuucgcgaugcagauggccuaccgguucaacggcaucggggucacccagaacgugcucuacgagaaccagaagcugaucgccaaccaguucaacagcgccaucggcaagauccaggacucccugagcuccaccgccagcgcgcucgggaagcugcaggacguggucaaccagaacgcccaggcccugaacacgcucgugaagcagcuguccagcaacuucggcgccaucuccagcgugcugaacgacauccucucccgccuggacaaggucgaggccgaggugcagaucgaccggcugaucaccgggcgccuccagagccugcagaccuacgugacccagcagcugauccgggcggccgagauccgcgccagcgccaaccucgccgcgaccaagauguccgagugcguccugggccagagcaagcggguggacuucugcggcaagggguaccaccugauguccuucccccagagcgccccgcacggcguggucuuccuccacgugacguacgucugcgcccaggagaagaacuucaccaccgcccccgcgaucugccacgacgggaaggcccacuucccccgcgagggcguguucguguccaacgggacccacugguucgucacgcagcggaacuucuacgagccgcagaucaucaccaccgacaacaccuucgugagcggcaacugcgacguggucaucggcaucgugaacaacacgguguacgacccccugcagcccgagcuggacuccggcgggggcgggagcgacaucaucaagcuccugaacgagcaggucaacaaggagaugcaguccagcaaccuguacauguccaugagcuccuggugcuacacccacagccucgacggcgccgggcuguuccuguucgaccacgccgcggaggaguacgagcacgccaagaagcucaucaucuuccugaacgagaacaacgugcccgugcagcugaccuccaucagcgccccggagcacaaguucgagggccucacgcagaucuuccagaaggccuacgagcacgagcagcacaucuccgagagcaucaacaacaucguggaccacgccaucaaguccaaggaccacgcgaccuucaacuuccugcagugguacgucgccgagcagcacgaggaggaggugcuguucaaggacauccucgacaagaucgagcugaucgggaacgagaaccacggccuguaccucgccgaccaguacgugaaggggaucgccaagagccgcaaguccuga

SEQ ID NO: 11930 - RNA, 3948 nt, Artificial Sequence
  SARS-CoV-2/Wuhan/WIV05/2019__EPI_ISL_402128 spike protein CDS gc (1-1147)(G889C_L1034C) Ferritin construct
auguucguguuccugguccuccugccccuggugagcucccagugcgugaaccucaccacccgcacgcagcugccgcccgccuacaccaacagcuucacccggggcgucuacuaccccgacaagguguuccgcuccagcgugcugcacuccacccaggaccucuuccugcccuucuucagcaacgucacgugguuccacgccauccacguguccgggaccaacggcaccaagcgguucgacaacccggugcugcccuucaacgacggggucuacuucgcgagcaccgagaaguccaacaucauccgcggcuggaucuucgggacgacccucgacagcaagacccagucccugcugaucgugaacaacgccaccaacguggucaucaaggugugcgaguuccaguucugcaacgaccccuuccucggcguguacuaccacaagaacaacaagagcuggauggaguccgaguuccgggucuacagcuccgccaacaacugcacguucgaguacgugagccagcccuuccugauggaccuggagggcaagcaggggaacuucaagaaccuccgcgaguucguguucaagaacaucgacggcuacuucaagaucuacuccaagcacaccccgaucaaccugguccgggaccugccccagggguucagcgcccucgagccccugguggaccugcccaucggcaucaacaucacccgcuuccagacccuccuggcccugcaccgguccuaccucacgccgggggacagcagcuccggcuggaccgcgggcgccgccgccuacuacgugggguaccugcagccccgcaccuuccugcucaaguacaacgagaacggcaccaucacggacgcggucgacugcgcccuggacccccugagcgagaccaagugcacccucaaguccuucaccguggagaaggggaucuaccagacgagcaacuuccgggugcagcccaccgaguccaucguccgcuucccgaacaucaccaaccugugccccuucggcgagguguucaacgccacccgguucgccagcgucuacgccuggaaccgcaagcggaucuccaacugcguggcggacuacagcgugcuguacaacuccgccagcuucuccacguucaagugcuacggcgucagccccaccaagcucaacgaccugugcuucaccaacguguacgccgacuccuucgugauccgcggggacgagguccggcagaucgcccccggccagaccgggaagaucgccgacuacaacuacaagcugccggacgacuucacgggcugcgugaucgcguggaacagcaacaaccucgacuccaaggucgggggcaacuacaacuaccuguaccgccuguuccgcaagagcaaccucaagcccuucgagcgggacaucuccaccgagaucuaccaggccggcagcacccccugcaacgggguggagggcuucaacugcuacuucccccugcaguccuacggguuccagccgaccaacggcgugggguaccagcccuaccggguggucgugcugagcuucgagcuccugcacgcccccgccacggugugcggccccaagaaguccaccaaccuggucaagaacaagugcgugaacuucaacuucaacggccucaccgggaccggcgugcugaccgagagcaacaagaaguuccugccguuccagcaguucgggcgcgacaucgccgacacgaccgacgcgguccgcgacccccagacccuggagauccucgacaucacccccugcagcuucggcgggguguccgugaucacgccgggcaccaacaccagcaaccaggucgccgugcuguaccaggacgugaacugcaccgagguccccguggccauccacgccgaccagcugacgcccaccuggcggguguacuccaccggcagcaacgucuuccagacccgcgccgggugccucaucggcgcggagcacgugaacaacuccuacgagugcgacauccccaucggggccggcaucugcgccagcuaccagacgcagaccaacuccccgcggcgcgcccggagcguggcgucccagagcaucaucgccuacaccaugucccugggcgccgagaacagcgucgccuacuccaacaacagcaucgccauccccaccaacuucacgaucuccgugaccaccgagauccugcccgugagcaugaccaagacgagcgucgacugcaccauguacaucugcggggacuccaccgagugcagcaaccuccugcugcaguacggcuccuucugcacccagcucaaccgcgcgcugacggggaucgccguggagcaggacaagaacacccaggagguguucgcccaggucaagcagaucuacaagacgcccccgaucaaggacuucggcggguucaacuucagccagauccugcccgaccccuccaagcccagcaagcgguccuucaucgaggaccuccuguucaacaaggugacccuggccgacgccggcuucaucaagcaguacggcgacugccucggggacaucgcggcccgcgaccugaucugcgcccagaaguucaacggccugaccgugcucccgccccugcugaccgacgagaugaucgcccaguacaccagcgcccuccuggcggggaccaucacguccggcuggaccuucugcgccggcgccgcccugcagauccccuucgcgaugcagauggccuaccgguucaacggcaucggggucacccagaacgugcucuacgagaaccagaagcugaucgccaaccaguucaacagcgccaucggcaagauccaggacucccugagcuccaccgccagcgcgcucgggaagcugcaggacguggucaaccagaacgcccaggcccugaacacgcucgugaagcagcuguccagcaacuucggcgccaucuccagcgugcugaacgacauccucucccgccuggacaaggucgaggccgaggugcagaucgaccggcugaucaccgggcgccuccagagccugcagaccuacgugacccagcagcugauccgggcggccgagauccgcgccagcgccaaccucgccgcgaccaagauguccgagugcgucugcggccagagcaagcggguggacuucugcggcaagggguaccaccugauguccuucccccagagcgccccgcacggcguggucuuccuccacgugacguacguccccgcccaggagaagaacuucaccaccgcccccgcgaucugccacgacgggaaggcccacuucccccgcgagggcguguucguguccaacgggacccacugguucgucacgcagcggaacuucuacgagccgcagaucaucaccaccgacaacaccuucgugagcggcaacugcgacguggucaucggcaucgugaacaacacgguguacgacccccugcagcccgagcuggacuccggcgggggcgggagcgacaucaucaagcuccugaacgagcaggucaacaaggagaugcaguccagcaaccuguacauguccaugagcuccuggugcuacacccacagccucgacggcgccgggcuguuccuguucgaccacgccgcggaggaguacgagcacgccaagaagcucaucaucuuccugaacgagaacaacgugcccgugcagcugaccuccaucagcgccccggagcacaaguucgagggccucacgcagaucuuccagaaggccuacgagcacgagcagcacaucuccgagagcaucaacaacaucguggaccacgccaucaaguccaaggaccacgcgaccuucaacuuccugcagugguacgucgccgagcagcacgaggaggaggugcuguucaaggacauccucgacaagaucgagcugaucgggaacgagaaccacggccuguaccucgccgaccaguacgugaaggggaucgccaagagccgcaaguccuga

SEQ ID NO: 11931 - RNA, 3948 nt, Artificial Sequence
  SARS-CoV-2/Wuhan/WIV05/2019__EPI_ISL_402128 spike protein CDS gc (1-1147)(I909C_Y1047C) Ferritin construct
auguucguguuccugguccuccugccccuggugagcucccagugcgugaaccucaccacccgcacgcagcugccgcccgccuacaccaacagcuucacccggggcgucuacuaccccgacaagguguuccgcuccagcgugcugcacuccacccaggaccucuuccugcccuucuucagcaacgucacgugguuccacgccauccacguguccgggaccaacggcaccaagcgguucgacaacccggugcugcccuucaacgacggggucuacuucgcgagcaccgagaaguccaacaucauccgcggcuggaucuucgggacgacccucgacagcaagacccagucccugcugaucgugaacaacgccaccaacguggucaucaaggugugcgaguuccaguucugcaacgaccccuuccucggcguguacuaccacaagaacaacaagagcuggauggaguccgaguuccgggucuacagcuccgccaacaacugcacguucgaguacgugagccagcccuuccugauggaccuggagggcaagcaggggaacuucaagaaccuccgcgaguucguguucaagaacaucgacggcuacuucaagaucuacuccaagcacaccccgaucaaccugguccgggaccugccccagggguucagcgcccucgagccccugguggaccugcccaucggcaucaacaucacccgcuuccagacccuccuggcccugcaccgguccuaccucacgccgggggacagcagcuccggcuggaccgcgggcgccgccgccuacuacgugggguaccugcagccccgcaccuuccugcucaaguacaacgagaacggcaccaucacggacgcggucgacugcgcccuggacccccugagcgagaccaagugcacccucaaguccuucaccguggagaaggggaucuaccagacgagcaacuuccgggugcagcccaccgaguccaucguccgcuucccgaacaucaccaaccugugccccuucggcgagguguucaacgccacccgguucgccagcgucuacgccuggaaccgcaagcggaucuccaacugcguggcggacuacagcgugcuguacaacuccgccagcuucuccacguucaagugcuacggcgucagccccaccaagcucaacgaccugugcuucaccaacguguacgccgacuccuucgugauccgcggggacgagguccggcagaucgcccccggccagaccgggaagaucgccgacuacaacuacaagcugccggacgacuucacgggcugcgugaucgcguggaacagcaacaaccucgacuccaaggucgggggcaacuacaacuaccuguaccgccuguuccgcaagagcaaccucaagcccuucgagcgggacaucuccaccgagaucuaccaggccggcagcacccccugcaacgggguggagggcuucaacugcuacuucccccugcaguccuacggguuccagccgaccaacggcgugggguaccagcccuaccggguggucgugcugagcuucgagcuccugcacgcccccgccacggugugcggccccaagaaguccaccaaccuggucaagaacaagugcgugaacuucaacuucaacggccucaccgggaccggcgugcugaccgagagcaacaagaaguuccugccguuccagcaguucgggcgcgacaucgccgacacgaccgacgcgguccgcgacccccagacccuggagauccucgacaucacccccugcagcuucggcgggguguccgugaucacgccgggcaccaacaccagcaaccaggucgccgugcuguaccaggacgugaacugcaccgagguccccguggccauccacgccgaccagcugacgcccaccuggcggguguacuccaccggcagcaacgucuuccagacccgcgccgggugccucaucggcgcggagcacgugaacaacuccuacgagugcgacauccccaucggggccggcaucugcgccagcuaccagacgcagaccaacuccccgcggcgcgcccggagcguggcgucccagagcaucaucgccuacaccaugucccugggcgccgagaacagcgucgccuacuccaacaacagcaucgccauccccaccaacuucacgaucuccgugaccaccgagauccugcccgugagcaugaccaagacgagcgucgacugcaccauguacaucugcggggacuccaccgagugcagcaaccuccugcugcaguacggcuccuucugcacccagcucaaccgcgcgcugacggggaucgccguggagcaggacaagaacacccaggagguguucgcccaggucaagcagaucuacaagacgcccccgaucaaggacuucggcggguucaacuucagccagauccugcccgaccccuccaagcccagcaagcgguccuucaucgaggaccuccuguucaacaaggugacccuggccgacgccggcuucaucaagcaguacggcgacugccucggggacaucgcggcccgcgaccugaucugcgcccagaaguucaacggccugaccgugcucccgccccugcugaccgacgagaugaucgcccaguacaccagcgcccuccuggcggggaccaucacguccggcuggaccuucggggccggcgccgcccugcagauccccuucgcgaugcagauggccuaccgguucaacggcugcggggucacccagaacgugcucuacgagaaccagaagcugaucgccaaccaguucaacagcgccaucggcaagauccaggacucccugagcuccaccgccagcgcgcucgggaagcugcaggacguggucaaccagaacgcccaggcccugaacacgcucgugaagcagcuguccagcaacuucggcgccaucuccagcgugcugaacgacauccucucccgccuggacaaggucgaggccgaggugcagaucgaccggcugaucaccgggcgccuccagagccugcagaccuacgugacccagcagcugauccgggcggccgagauccgcgccagcgccaaccucgccgcgaccaagauguccgagugcguccugggccagagcaagcggguggacuucugcggcaaggggugccaccugauguccuucccccagagcgccccgcacggcguggucuuccuccacgugacguacguccccgcccaggagaagaacuucaccaccgcccccgcgaucugccacgacgggaaggcccacuucccccgcgagggcguguucguguccaacgggacccacugguucgucacgcagcggaacuucuacgagccgcagaucaucaccaccgacaacaccuucgugagcggcaacugcgacguggucaucggcaucgugaacaacacgguguacgacccccugcagcccgagcuggacuccggcgggggcgggagcgacaucaucaagcuccugaacgagcaggucaacaaggagaugcaguccagcaaccuguacauguccaugagcuccuggugcuacacccacagccucgacggcgccgggcuguuccuguucgaccacgccgcggaggaguacgagcacgccaagaagcucaucaucuuccugaacgagaacaacgugcccgugcagcugaccuccaucagcgccccggagcacaaguucgagggccucacgcagaucuuccagaaggccuacgagcacgagcagcacaucuccgagagcaucaacaacaucguggaccacgccaucaaguccaaggaccacgcgaccuucaacuuccugcagugguacgucgccgagcagcacgaggaggaggugcuguucaaggacauccucgacaagaucgagcugaucgggaacgagaaccacggccuguaccucgccgaccaguacgugaaggggaucgccaagagccgcaaguccuga

SEQ ID NO: 11932 - RNA, 3948 nt, Artificial Sequence
  SARS-CoV-2/Wuhan/WIV05/2019__EPI_ISL_402128 spike protein CDS gc (1-1147)(Q965C_S1003C) Ferritin construct
auguucguguuccugguccuccugccccuggugagcucccagugcgugaaccucaccacccgcacgcagcugccgcccgccuacaccaacagcuucacccggggcgucuacuaccccgacaagguguuccgcuccagcgugcugcacuccacccaggaccucuuccugcccuucuucagcaacgucacgugguuccacgccauccacguguccgggaccaacggcaccaagcgguucgacaacccggugcugcccuucaacgacggggucuacuucgcgagcaccgagaaguccaacaucauccgcggcuggaucuucgggacgacccucgacagcaagacccagucccugcugaucgugaacaacgccaccaacguggucaucaaggugugcgaguuccaguucugcaacgaccccuuccucggcguguacuaccacaagaacaacaagagcuggauggaguccgaguuccgggucuacagcuccgccaacaacugcacguucgaguacgugagccagcccuuccugauggaccuggagggcaagcaggggaacuucaagaaccuccgcgaguucguguucaagaacaucgacggcuacuucaagaucuacuccaagcacaccccgaucaaccugguccgggaccugccccagggguucagcgcccucgagccccugguggaccugcccaucggcaucaacaucacccgcuuccagacccuccuggcccugcaccgguccuaccucacgccgggggacagcagcuccggcuggaccgcgggcgccgccgccuacuacgugggguaccugcagccccgcaccuuccugcucaaguacaacgagaacggcaccaucacggacgcggucgacugcgcccuggacccccugagcgagaccaagugcacccucaaguccuucaccguggagaaggggaucuaccagacgagcaacuuccgggugcagcccaccgaguccaucguccgcuucccgaacaucaccaaccugugccccuucggcgagguguucaacgccacccgguucgccagcgucuacgccuggaaccgcaagcggaucuccaacugcguggcggacuacagcgugcuguacaacuccgccagcuucuccacguucaagugcuacggcgucagccccaccaagcucaacgaccugugcuucaccaacguguacgccgacuccuucgugauccgcggggacgagguccggcagaucgcccccggccagaccgggaagaucgccgacuacaacuacaagcugccggacgacuucacgggcugcgugaucgcguggaacagcaacaaccucgacuccaaggucgggggcaacuacaacuaccuguaccgccuguuccgcaagagcaaccucaagcccuucgagcgggacaucuccaccgagaucuaccaggccggcagcacccccugcaacgggguggagggcuucaacugcuacuucccccugcaguccuacggguuccagccgaccaacggcgugggguaccagcccuaccggguggucgugcugagcuucgagcuccugcacgcccccgccacggugugcggccccaagaaguccaccaaccuggucaagaacaagugcgugaacuucaacuucaacggccucaccgggaccggcgugcugaccgagagcaacaagaaguuccugccguuccagcaguucgggcgcgacaucgccgacacgaccgacgcgguccgcgacccccagacccuggagauccucgacaucacccccugcagcuucggcgggguguccgugaucacgccgggcaccaacaccagcaaccaggucgccgugcuguaccaggacgugaacugcaccgagguccccguggccauccacgccgaccagcugacgcccaccuggcggguguacuccaccggcagcaacgucuuccagacccgcgccgggugccucaucggcgcggagcacgugaacaacuccuacgagugcgacauccccaucggggccggcaucugcgccagcuaccagacgcagaccaacuccccgcggcgcgcccggagcguggcgucccagagcaucaucgccuacaccaugucccugggcgccgagaacagcgucgccuacuccaacaacagcaucgccauccccaccaacuucacgaucuccgugaccaccgagauccugcccgugagcaugaccaagacgagcgucgacugcaccauguacaucugcggggacuccaccgagugcagcaaccuccugcugcaguacggcuccuucugcacccagcucaaccgcgcgcugacggggaucgccguggagcaggacaagaacacccaggagguguucgcccaggucaagcagaucuacaagacgcccccgaucaaggacuucggcggguucaacuucagccagauccugcccgaccccuccaagcccagcaagcgguccuucaucgaggaccuccuguucaacaaggugacccuggccgacgccggcuucaucaagcaguacggcgacugccucggggacaucgcggcccgcgaccugaucugcgcccagaaguucaacggccugaccgugcucccgccccugcugaccgacgagaugaucgcccaguacaccagcgcccuccuggcggggaccaucacguccggcuggaccuucggggccggcgccgcccugcagauccccuucgcgaugcagauggccuaccgguucaacggcaucggggucacccagaacgugcucuacgagaaccagaagcugaucgccaaccaguucaacagcgccaucggcaagauccaggacucccugagcuccaccgccagcgcgcucgggaagcugcaggacguggucaaccagaacgcccaggcccugaacacgcucgugaagugccuguccagcaacuucggcgccaucuccagcgugcugaacgacauccucucccgccuggacaaggucgaggccgaggugcagaucgaccggcugaucaccgggcgccuccagugccugcagaccuacgugacccagcagcugauccgggcggccgagauccgcgccagcgccaaccucgccgcgaccaagauguccgagugcguccugggccagagcaagcggguggacuucugcggcaagggguaccaccugauguccuucccccagagcgccccgcacggcguggucuuccuccacgugacguacguccccgcccaggagaagaacuucaccaccgcccccgcgaucugccacgacgggaaggcccacuucccccgcgagggcguguucguguccaacgggacccacugguucgucacgcagcggaacuucuacgagccgcagaucaucaccaccgacaacaccuucgugagcggcaacugcgacguggucaucggcaucgugaacaacacgguguacgacccccugcagcccgagcuggacuccggcgggggcgggagcgacaucaucaagcuccugaacgagcaggucaacaaggagaugcaguccagcaaccuguacauguccaugagcuccuggugcuacacccacagccucgacggcgccgggcuguuccuguucgaccacgccgcggaggaguacgagcacgccaagaagcucaucaucuuccugaacgagaacaacgugcccgugcagcugaccuccaucagcgccccggagcacaaguucgagggccucacgcagaucuuccagaaggccuacgagcacgagcagcacaucuccgagagcaucaacaacaucguggaccacgccaucaaguccaaggaccacgcgaccuucaacuuccugcagugguacgucgccgagcagcacgaggaggaggugcuguucaaggacauccucgacaagaucgagcugaucgggaacgagaaccacggccuguaccucgccgaccaguacgugaaggggaucgccaagagccgcaaguccuga

SEQ ID NO: 11933 - RNA, 3948 nt, Artificial Sequence
  SARS-CoV-2/Wuhan/WIV05/2019__EPI_ISL_402128 spike protein CDS gc (1-1147)(F970C_G999C) Ferritin construct
auguucguguuccugguccuccugccccuggugagcucccagugcgugaaccucaccacccgcacgcagcugccgcccgccuacaccaacagcuucacccggggcgucuacuaccccgacaagguguuccgcuccagcgugcugcacuccacccaggaccucuuccugcccuucuucagcaacgucacgugguuccacgccauccacguguccgggaccaacggcaccaagcgguucgacaacccggugcugcccuucaacgacggggucuacuucgcgagcaccgagaaguccaacaucauccgcggcuggaucuucgggacgacccucgacagcaagacccagucccugcugaucgugaacaacgccaccaacguggucaucaaggugugcgaguuccaguucugcaacgaccccuuccucggcguguacuaccacaagaacaacaagagcuggauggaguccgaguuccgggucuacagcuccgccaacaacugcacguucgaguacgugagccagcccuuccugauggaccuggagggcaagcaggggaacuucaagaaccuccgcgaguucguguucaagaacaucgacggcuacuucaagaucuacuccaagcacaccccgaucaaccugguccgggaccugccccagggguucagcgcccucgagccccugguggaccugcccaucggcaucaacaucacccgcuuccagacccuccuggcccugcaccgguccuaccucacgccgggggacagcagcuccggcuggaccgcgggcgccgccgccuacuacgugggguaccugcagccccgcaccuuccugcucaaguacaacgagaacggcaccaucacggacgcggucgacugcgcccuggacccccugagcgagaccaagugcacccucaaguccuucaccguggagaaggggaucuaccagacgagcaacuuccgggugcagcccaccgaguccaucguccgcuucccgaacaucaccaaccugugccccuucggcgagguguucaacgccacccgguucgccagcgucuacgccuggaaccgcaagcggaucuccaacugcguggcggacuacagcgugcuguacaacuccgccagcuucuccacguucaagugcuacggcgucagccccaccaagcucaacgaccugugcuucaccaacguguacgccgacuccuucgugauccgcggggacgagguccggcagaucgcccccggccagaccgggaagaucgccgacuacaacuacaagcugccggacgacuucacgggcugcgugaucgcguggaacagcaacaaccucgacuccaaggucgggggcaacuacaacuaccuguaccgccuguuccgcaagagcaaccucaagcccuucgagcgggacaucuccaccgagaucuaccaggccggcagcacccccugcaacgggguggagggcuucaacugcuacuucccccugcaguccuacggguuccagccgaccaacggcgugggguaccagcccuaccggguggucgugcugagcuucgagcuccugcacgcccccgccacggugugcggccccaagaaguccaccaaccuggucaagaacaagugcgugaacuucaacuucaacggccucaccgggaccggcgugcugaccgagagcaacaagaaguuccugccguuccagcaguucgggcgcgacaucgccgacacgaccgacgcgguccgcgacccccagacccuggagauccucgacaucacccccugcagcuucggcgggguguccgugaucacgccgggcaccaacaccagcaaccaggucgccgugcuguaccaggacgugaacugcaccgagguccccguggccauccacgccgaccagcugacgcccaccuggcggguguacuccaccggcagcaacgucuuccagacccgcgccgggugccucaucggcgcggagcacgugaacaacuccuacgagugcgacauccccaucggggccggcaucugcgccagcuaccagacgcagaccaacuccccgcggcgcgcccggagcguggcgucccagagcaucaucgccuacaccaugucccugggcgccgagaacagcgucgccuacuccaacaacagcaucgccauccccaccaacuucacgaucuccgugaccaccgagauccugcccgugagcaugaccaagacgagcgucgacugcaccauguacaucugcggggacuccaccgagugcagcaaccuccugcugcaguacggcuccuucugcacccagcucaaccgcgcgcugacggggaucgccguggagcaggacaagaacacccaggagguguucgcccaggucaagcagaucuacaagacgcccccgaucaaggacuucggcggguucaacuucagccagauccugcccgaccccuccaagcccagcaagcgguccuucaucgaggaccuccuguucaacaaggugacccuggccgacgccggcuucaucaagcaguacggcgacugccucggggacaucgcggcccgcgaccugaucugcgcccagaaguucaacggccugaccgugcucccgccccugcugaccgacgagaugaucgcccaguacaccagcgcccuccuggcggggaccaucacguccggcuggaccuucggggccggcgccgcccugcagauccccuucgcgaugcagauggccuaccgguucaacggcaucggggucacccagaacgugcucuacgagaaccagaagcugaucgccaaccaguucaacagcgccaucggcaagauccaggacucccugagcuccaccgccagcgcgcucgggaagcugcaggacguggucaaccagaacgcccaggcccugaacacgcucgugaagcagcuguccagcaacugcggcgccaucuccagcgugcugaacgacauccucucccgccuggacaaggucgaggccgaggugcagaucgaccggcugaucaccugucgccuccagagccugcagaccuacgugacccagcagcugauccgggcggccgagauccgcgccagcgccaaccucgccgcgaccaagauguccgagugcguccugggccagagcaagcggguggacuucugcggcaagggguaccaccugauguccuucccccagagcgccccgcacggcguggucuuccuccacgugacguacguccccgcccaggagaagaacuucaccaccgcccccgcgaucugccacgacgggaaggcccacuucccccgcgagggcguguucguguccaacgggacccacugguucgucacgcagcggaacuucuacgagccgcagaucaucaccaccgacaacaccuucgugagcggcaacugcgacguggucaucggcaucgugaacaacacgguguacgacccccugcagcccgagcuggacuccggcgggggcgggagcgacaucaucaagcuccugaacgagcaggucaacaaggagaugcaguccagcaaccuguacauguccaugagcuccuggugcuacacccacagccucgacggcgccgggcuguuccuguucgaccacgccgcggaggaguacgagcacgccaagaagcucaucaucuuccugaacgagaacaacgugcccgugcagcugaccuccaucagcgccccggagcacaaguucgagggccucacgcagaucuuccagaaggccuacgagcacgagcagcacaucuccgagagcaucaacaacaucguggaccacgccaucaaguccaaggaccacgcgaccuucaacuuccugcagugguacgucgccgagcagcacgaggaggaggugcuguucaaggacauccucgacaagaucgagcugaucgggaacgagaaccacggccuguaccucgccgaccaguacgugaaggggaucgccaagagccgcaaguccuga

SEQ ID NO: 11934 - RNA, 3948 nt, Artificial Sequence
  SARS-CoV-2/Wuhan/WIV05/2019__EPI_ISL_402128 spike protein CDS gc (1-1147)(A972C_R995C) Ferritin construct
auguucguguuccugguccuccugccccuggugagcucccagugcgugaaccucaccacccgcacgcagcugccgcccgccuacaccaacagcuucacccggggcgucuacuaccccgacaagguguuccgcuccagcgugcugcacuccacccaggaccucuuccugcccuucuucagcaacgucacgugguuccacgccauccacguguccgggaccaacggcaccaagcgguucgacaacccggugcugcccuucaacgacggggucuacuucgcgagcaccgagaaguccaacaucauccgcggcuggaucuucgggacgacccucgacagcaagacccagucccugcugaucgugaacaacgccaccaacguggucaucaaggugugcgaguuccaguucugcaacgaccccuuccucggcguguacuaccacaagaacaacaagagcuggauggaguccgaguuccgggucuacagcuccgccaacaacugcacguucgaguacgugagccagcccuuccugauggaccuggagggcaagcaggggaacuucaagaaccuccgcgaguucguguucaagaacaucgacggcuacuucaagaucuacuccaagcacaccccgaucaaccugguccgggaccugccccagggguucagcgcccucgagccccugguggaccugcccaucggcaucaacaucacccgcuuccagacccuccuggcccugcaccgguccuaccucacgccgggggacagcagcuccggcuggaccgcgggcgccgccgccuacuacgugggguaccugcagccccgcaccuuccugcucaaguacaacgagaacggcaccaucacggacgcggucgacugcgcccuggacccccugagcgagaccaagugcacccucaaguccuucaccguggagaaggggaucuaccagacgagcaacuuccgggugcagcccaccgaguccaucguccgcuucccgaacaucaccaaccugugccccuucggcgagguguucaacgccacccgguucgccagcgucuacgccuggaaccgcaagcggaucuccaacugcguggcggacuacagcgugcuguacaacuccgccagcuucuccacguucaagugcuacggcgucagccccaccaagcucaacgaccugugcuucaccaacguguacgccgacuccuucgugauccgcggggacgagguccggcagaucgcccccggccagaccgggaagaucgccgacuacaacuacaagcugccggacgacuucacgggcugcgugaucgcguggaacagcaacaaccucgacuccaaggucgggggcaacuacaacuaccuguaccgccuguuccgcaagagcaaccucaagcccuucgagcgggacaucuccaccgagaucuaccaggccggcagcacccccugcaacgggguggagggcuucaacugcuacuucccccugcaguccuacggguuccagccgaccaacggcgugggguaccagcccuaccggguggucgugcugagcuucgagcuccugcacgcccccgccacggugugcggccccaagaaguccaccaaccuggucaagaacaagugcgugaacuucaacuucaacggccucaccgggaccggcgugcugaccgagagcaacaagaaguuccugccguuccagcaguucgggcgcgacaucgccgacacgaccgacgcgguccgcgacccccagacccuggagauccucgacaucacccccugcagcuucggcgggguguccgugaucacgccgggcaccaacaccagcaaccaggucgccgugcuguaccaggacgugaacugcaccgagguccccguggccauccacgccgaccagcugacgcccaccuggcggguguacuccaccggcagcaacgucuuccagacccgcgccgggugccucaucggcgcggagcacgugaacaacuccuacgagugcgacauccccaucggggccggcaucugcgccagcuaccagacgcagaccaacuccccgcggcgcgcccggagcguggcgucccagagcaucaucgccuacaccaugucccugggcgccgagaacagcgucgccuacuccaacaacagcaucgccauccccaccaacuucacgaucuccgugaccaccgagauccugcccgugagcaugaccaagacgagcgucgacugcaccauguacaucugcggggacuccaccgagugcagcaaccuccugcugcaguacggcuccuucugcacccagcucaaccgcgcgcugacggggaucgccguggagcaggacaagaacacccaggagguguucgcccaggucaagcagaucuacaagacgcccccgaucaaggacuucggcggguucaacuucagccagauccugcccgaccccuccaagcccagcaagcgguccuucaucgaggaccuccuguucaacaaggugacccuggccgacgccggcuucaucaagcaguacggcgacugccucggggacaucgcggcccgcgaccugaucugcgcccagaaguucaacggccugaccgugcucccgccccugcugaccgacgagaugaucgcccaguacaccagcgcccuccuggcggggaccaucacguccggcuggaccuucggggccggcgccgcccugcagauccccuucgcgaugcagauggccuaccgguucaacggcaucggggucacccagaacgugcucuacgagaaccagaagcugaucgccaaccaguucaacagcgccaucggcaagauccaggacucccugagcuccaccgccagcgcgcucgggaagcugcaggacguggucaaccagaacgcccaggcccugaacacgcucgugaagcagcuguccagcaacuucggcugcaucuccagcgugcugaacgacauccucucccgccuggacaaggucgaggccgaggugcagaucgacugccugaucaccgggcgccuccagagccugcagaccuacgugacccagcagcugauccgggcggccgagauccgcgccagcgccaaccucgccgcgaccaagauguccgagugcguccugggccagagcaagcggguggacuucugcggcaagggguaccaccugauguccuucccccagagcgccccgcacggcguggucuuccuccacgugacguacguccccgcccaggagaagaacuucaccaccgcccccgcgaucugccacgacgggaaggcccacuucccccgcgagggcguguucguguccaacgggacccacugguucgucacgcagcggaacuucuacgagccgcagaucaucaccaccgacaacaccuucgugagcggcaacugcgacguggucaucggcaucgugaacaacacgguguacgacccccugcagcccgagcuggacuccggcgggggcgggagcgacaucaucaagcuccugaacgagcaggucaacaaggagaugcaguccagcaaccuguacauguccaugagcuccuggugcuacacccacagccucgacggcgccgggcuguuccuguucgaccacgccgcggaggaguacgagcacgccaagaagcucaucaucuuccugaacgagaacaacgugcccgugcagcugaccuccaucagcgccccggagcacaaguucgagggccucacgcagaucuuccagaaggccuacgagcacgagcagcacaucuccgagagcaucaacaacaucguggaccacgccaucaaguccaaggaccacgcgaccuucaacuuccugcagugguacgucgccgagcagcacgaggaggaggugcuguucaaggacauccucgacaagaucgagcugaucgggaacgagaaccacggccuguaccucgccgaccaguacgugaaggggaucgccaagagccgcaaguccuga

SEQ ID NO: 11935 - RNA, 3948 nt, Artificial Sequence
  SARS-CoV-2/Wuhan/WIV05/2019__EPI_ISL_402128 spike protein CDS gc (1-1147)(A890C_V1040C) Ferritin construct
auguucguguuccugguccuccugccccuggugagcucccagugcgugaaccucaccacccgcacgcagcugccgcccgccuacaccaacagcuucacccggggcgucuacuaccccgacaagguguuccgcuccagcgugcugcacuccacccaggaccucuuccugcccuucuucagcaacgucacgugguuccacgccauccacguguccgggaccaacggcaccaagcgguucgacaacccggugcugcccuucaacgacggggucuacuucgcgagcaccgagaaguccaacaucauccgcggcuggaucuucgggacgacccucgacagcaagacccagucccugcugaucgugaacaacgccaccaacguggucaucaaggugugcgaguuccaguucugcaacgaccccuuccucggcguguacuaccacaagaacaacaagagcuggauggaguccgaguuccgggucuacagcuccgccaacaacugcacguucgaguacgugagccagcccuuccugauggaccuggagggcaagcaggggaacuucaagaaccuccgcgaguucguguucaagaacaucgacggcuacuucaagaucuacuccaagcacaccccgaucaaccugguccgggaccugccccagggguucagcgcccucgagccccugguggaccugcccaucggcaucaacaucacccgcuuccagacccuccuggcccugcaccgguccuaccucacgccgggggacagcagcuccggcuggaccgcgggcgccgccgccuacuacgugggguaccugcagccccgcaccuuccugcucaaguacaacgagaacggcaccaucacggacgcggucgacugcgcccuggacccccugagcgagaccaagugcacccucaaguccuucaccguggagaaggggaucuaccagacgagcaacuuccgggugcagcccaccgaguccaucguccgcuucccgaacaucaccaaccugugccccuucggcgagguguucaacgccacccgguucgccagcgucuacgccuggaaccgcaagcggaucuccaacugcguggcggacuacagcgugcuguacaacuccgccagcuucuccacguucaagugcuacggcgucagccccaccaagcucaacgaccugugcuucaccaacguguacgccgacuccuucgugauccgcggggacgagguccggcagaucgcccccggccagaccgggaagaucgccgacuacaacuacaagcugccggacgacuucacgggcugcgugaucgcguggaacagcaacaaccucgacuccaaggucgggggcaacuacaacuaccuguaccgccuguuccgcaagagcaaccucaagcccuucgagcgggacaucuccaccgagaucuaccaggccggcagcacccccugcaacgggguggagggcuucaacugcuacuucccccugcaguccuacggguuccagccgaccaacggcgugggguaccagcccuaccggguggucgugcugagcuucgagcuccugcacgcccccgccacggugugcggccccaagaaguccaccaaccuggucaagaacaagugcgugaacuucaacuucaacggccucaccgggaccggcgugcugaccgagagcaacaagaaguuccugccguuccagcaguucgggcgcgacaucgccgacacgaccgacgcgguccgcgacccccagacccuggagauccucgacaucacccccugcagcuucggcgggguguccgugaucacgccgggcaccaacaccagcaaccaggucgccgugcuguaccaggacgugaacugcaccgagguccccguggccauccacgccgaccagcugacgcccaccuggcggguguacuccaccggcagcaacgucuuccagacccgcgccgggugccucaucggcgcggagcacgugaacaacuccuacgagugcgacauccccaucggggccggcaucugcgccagcuaccagacgcagaccaacuccccgcggcgcgcccggagcguggcgucccagagcaucaucgccuacaccaugucccugggcgccgagaacagcgucgccuacuccaacaacagcaucgccauccccaccaacuucacgaucuccgugaccaccgagauccugcccgugagcaugaccaagacgagcgucgacugcaccauguacaucugcggggacuccaccgagugcagcaaccuccugcugcaguacggcuccuucugcacccagcucaaccgcgcgcugacggggaucgccguggagcaggacaagaacacccaggagguguucgcccaggucaagcagaucuacaagacgcccccgaucaaggacuucggcggguucaacuucagccagauccugcccgaccccuccaagcccagcaagcgguccuucaucgaggaccuccuguucaacaaggugacccuggccgacgccggcuucaucaagcaguacggcgacugccucggggacaucgcggcccgcgaccugaucugcgcccagaaguucaacggccugaccgugcucccgccccugcugaccgacgagaugaucgcccaguacaccagcgcccuccuggcggggaccaucacguccggcuggaccuucgggugcggcgccgcccugcagauccccuucgcgaugcagauggccuaccgguucaacggcaucggggucacccagaacgugcucuacgagaaccagaagcugaucgccaaccaguucaacagcgccaucggcaagauccaggacucccugagcuccaccgccagcgcgcucgggaagcugcaggacguggucaaccagaacgcccaggcccugaacacgcucgugaagcagcuguccagcaacuucggcgccaucuccagcgugcugaacgacauccucucccgccuggacaaggucgaggccgaggugcagaucgaccggcugaucaccgggcgccuccagagccugcagaccuacgugacccagcagcugauccgggcggccgagauccgcgccagcgccaaccucgccgcgaccaagauguccgagugcguccugggccagagcaagcggugcgacuucugcggcaagggguaccaccugauguccuucccccagagcgccccgcacggcguggucuuccuccacgugacguacguccccgcccaggagaagaacuucaccaccgcccccgcgaucugccacgacgggaaggcccacuucccccgcgagggcguguucguguccaacgggacccacugguucgucacgcagcggaacuucuacgagccgcagaucaucaccaccgacaacaccuucgugagcggcaacugcgacguggucaucggcaucgugaacaacacgguguacgacccccugcagcccgagcuggacuccggcgggggcgggagcgacaucaucaagcuccugaacgagcaggucaacaaggagaugcaguccagcaaccuguacauguccaugagcuccuggugcuacacccacagccucgacggcgccgggcuguuccuguucgaccacgccgcggaggaguacgagcacgccaagaagcucaucaucuuccugaacgagaacaacgugcccgugcagcugaccuccaucagcgccccggagcacaaguucgagggccucacgcagaucuuccagaaggccuacgagcacgagcagcacaucuccgagagcaucaacaacaucguggaccacgccaucaaguccaaggaccacgcgaccuucaacuuccugcagugguacgucgccgagcagcacgaggaggaggugcuguucaaggacauccucgacaagaucgagcugaucgggaacgagaaccacggccuguaccucgccgaccaguacgugaaggggaucgccaagagccgcaaguccuga

SEQ ID NO: 11936 - RNA, 3948 nt, Artificial Sequence
  SARS-CoV-2/Wuhan/WIV05/2019__EPI_ISL_402128 spike protein CDS gc (1-1147)(T874C_S1055C) Ferritin construct
auguucguguuccugguccuccugccccuggugagcucccagugcgugaaccucaccacccgcacgcagcugccgcccgccuacaccaacagcuucacccggggcgucuacuaccccgacaagguguuccgcuccagcgugcugcacuccacccaggaccucuuccugcccuucuucagcaacgucacgugguuccacgccauccacguguccgggaccaacggcaccaagcgguucgacaacccggugcugcccuucaacgacggggucuacuucgcgagcaccgagaaguccaacaucauccgcggcuggaucuucgggacgacccucgacagcaagacccagucccugcugaucgugaacaacgccaccaacguggucaucaaggugugcgaguuccaguucugcaacgaccccuuccucggcguguacuaccacaagaacaacaagagcuggauggaguccgaguuccgggucuacagcuccgccaacaacugcacguucgaguacgugagccagcccuuccugauggaccuggagggcaagcaggggaacuucaagaaccuccgcgaguucguguucaagaacaucgacggcuacuucaagaucuacuccaagcacaccccgaucaaccugguccgggaccugccccagggguucagcgcccucgagccccugguggaccugcccaucggcaucaacaucacccgcuuccagacccuccuggcccugcaccgguccuaccucacgccgggggacagcagcuccggcuggaccgcgggcgccgccgccuacuacgugggguaccugcagccccgcaccuuccugcucaaguacaacgagaacggcaccaucacggacgcggucgacugcgcccuggacccccugagcgagaccaagugcacccucaaguccuucaccguggagaaggggaucuaccagacgagcaacuuccgggugcagcccaccgaguccaucguccgcuucccgaacaucaccaaccugugccccuucggcgagguguucaacgccacccgguucgccagcgucuacgccuggaaccgcaagcggaucuccaacugcguggcggacuacagcgugcuguacaacuccgccagcuucuccacguucaagugcuacggcgucagccccaccaagcucaacgaccugugcuucaccaacguguacgccgacuccuucgugauccgcggggacgagguccggcagaucgcccccggccagaccgggaagaucgccgacuacaacuacaagcugccggacgacuucacgggcugcgugaucgcguggaacagcaacaaccucgacuccaaggucgggggcaacuacaacuaccuguaccgccuguuccgcaagagcaaccucaagcccuucgagcgggacaucuccaccgagaucuaccaggccggcagcacccccugcaacgggguggagggcuucaacugcuacuucccccugcaguccuacggguuccagccgaccaacggcgugggguaccagcccuaccggguggucgugcugagcuucgagcuccugcacgcccccgccacggugugcggccccaagaaguccaccaaccuggucaagaacaagugcgugaacuucaacuucaacggccucaccgggaccggcgugcugaccgagagcaacaagaaguuccugccguuccagcaguucgggcgcgacaucgccgacacgaccgacgcgguccgcgacccccagacccuggagauccucgacaucacccccugcagcuucggcgggguguccgugaucacgccgggcaccaacaccagcaaccaggucgccgugcuguaccaggacgugaacugcaccgagguccccguggccauccacgccgaccagcugacgcccaccuggcggguguacuccaccggcagcaacgucuuccagacccgcgccgggugccucaucggcgcggagcacgugaacaacuccuacgagugcgacauccccaucggggccggcaucugcgccagcuaccagacgcagaccaacuccccgcggcgcgcccggagcguggcgucccagagcaucaucgccuacaccaugucccugggcgccgagaacagcgucgccuacuccaacaacagcaucgccauccccaccaacuucacgaucuccgugaccaccgagauccugcccgugagcaugaccaagacgagcgucgacugcaccauguacaucugcggggacuccaccgagugcagcaaccuccugcugcaguacggcuccuucugcacccagcucaaccgcgcgcugacggggaucgccguggagcaggacaagaacacccaggagguguucgcccaggucaagcagaucuacaagacgcccccgaucaaggacuucggcggguucaacuucagccagauccugcccgaccccuccaagcccagcaagcgguccuucaucgaggaccuccuguucaacaaggugacccuggccgacgccggcuucaucaagcaguacggcgacugccucggggacaucgcggcccgcgaccugaucugcgcccagaaguucaacggccugaccgugcucccgccccugcugaccgacgagaugaucgcccaguacugcagcgcccuccuggcggggaccaucacguccggcuggaccuucggggccggcgccgcccugcagauccccuucgcgaugcagauggccuaccgguucaacggcaucggggucacccagaacgugcucuacgagaaccagaagcugaucgccaaccaguucaacagcgccaucggcaagauccaggacucccugagcuccaccgccagcgcgcucgggaagcugcaggacguggucaaccagaacgcccaggcccugaacacgcucgugaagcagcuguccagcaacuucggcgccaucuccagcgugcugaacgacauccucucccgccuggacaaggucgaggccgaggugcagaucgaccggcugaucaccgggcgccuccagagccugcagaccuacgugacccagcagcugauccgggcggccgagauccgcgccagcgccaaccucgccgcgaccaagauguccgagugcguccugggccagagcaagcggguggacuucugcggcaagggguaccaccugauguccuucccccagugcgccccgcacggcguggucuuccuccacgugacguacguccccgcccaggagaagaacuucaccaccgcccccgcgaucugccacgacgggaaggcccacuucccccgcgagggcguguucguguccaacgggacccacugguucgucacgcagcggaacuucuacgagccgcagaucaucaccaccgacaacaccuucgugagcggcaacugcgacguggucaucggcaucgugaacaacacgguguacgacccccugcagcccgagcuggacuccggcgggggcgggagcgacaucaucaagcuccugaacgagcaggucaacaaggagaugcaguccagcaaccuguacauguccaugagcuccuggugcuacacccacagccucgacggcgccgggcuguuccuguucgaccacgccgcggaggaguacgagcacgccaagaagcucaucaucuuccugaacgagaacaacgugcccgugcagcugaccuccaucagcgccccggagcacaaguucgagggccucacgcagaucuuccagaaggccuacgagcacgagcagcacaucuccgagagcaucaacaacaucguggaccacgccaucaaguccaaggaccacgcgaccuucaacuuccugcagugguacgucgccgagcagcacgaggaggaggugcuguucaaggacauccucgacaagaucgagcugaucgggaacgagaaccacggccuguaccucgccgaccaguacgugaaggggaucgccaagagccgcaaguccuga

SEQ ID NO: 11937 - RNA, 3534 nt, Artificial Sequence
  SARS-CoV-2/Wuhan/WIV05/2019__EPI_ISL_402128 spike protein CDS gc (1-1147) Foldon construct
auguucguguuccugguccuccugccccuggugagcucccagugcgugaaccucaccacccgcacgcagcugccgcccgccuacaccaacagcuucacccggggcgucuacuaccccgacaagguguuccgcuccagcgugcugcacuccacccaggaccucuuccugcccuucuucagcaacgucacgugguuccacgccauccacguguccgggaccaacggcaccaagcgguucgacaacccggugcugcccuucaacgacggggucuacuucgcgagcaccgagaaguccaacaucauccgcggcuggaucuucgggacgacccucgacagcaagacccagucccugcugaucgugaacaacgccaccaacguggucaucaaggugugcgaguuccaguucugcaacgaccccuuccucggcguguacuaccacaagaacaacaagagcuggauggaguccgaguuccgggucuacagcuccgccaacaacugcacguucgaguacgugagccagcccuuccugauggaccuggagggcaagcaggggaacuucaagaaccuccgcgaguucguguucaagaacaucgacggcuacuucaagaucuacuccaagcacaccccgaucaaccugguccgggaccugccccagggguucagcgcccucgagccccugguggaccugcccaucggcaucaacaucacccgcuuccagacccuccuggcccugcaccgguccuaccucacgccgggggacagcagcuccggcuggaccgcgggcgccgccgccuacuacgugggguaccugcagccccgcaccuuccugcucaaguacaacgagaacggcaccaucacggacgcggucgacugcgcccuggacccccugagcgagaccaagugcacccucaaguccuucaccguggagaaggggaucuaccagacgagcaacuuccgggugcagcccaccgaguccaucguccgcuucccgaacaucaccaaccugugccccuucggcgagguguucaacgccacccgguucgccagcgucuacgccuggaaccgcaagcggaucuccaacugcguggcggacuacagcgugcuguacaacuccgccagcuucuccacguucaagugcuacggcgucagccccaccaagcucaacgaccugugcuucaccaacguguacgccgacuccuucgugauccgcggggacgagguccggcagaucgcccccggccagaccgggaagaucgccgacuacaacuacaagcugccggacgacuucacgggcugcgugaucgcguggaacagcaacaaccucgacuccaaggucgggggcaacuacaacuaccuguaccgccuguuccgcaagagcaaccucaagcccuucgagcgggacaucuccaccgagaucuaccaggccggcagcacccccugcaacgggguggagggcuucaacugcuacuucccccugcaguccuacggguuccagccgaccaacggcgugggguaccagcccuaccggguggucgugcugagcuucgagcuccugcacgcccccgccacggugugcggccccaagaaguccaccaaccuggucaagaacaagugcgugaacuucaacuucaacggccucaccgggaccggcgugcugaccgagagcaacaagaaguuccugccguuccagcaguucgggcgcgacaucgccgacacgaccgacgcgguccgcgacccccagacccuggagauccucgacaucacccccugcagcuucggcgggguguccgugaucacgccgggcaccaacaccagcaaccaggucgccgugcuguaccaggacgugaacugcaccgagguccccguggccauccacgccgaccagcugacgcccaccuggcggguguacuccaccggcagcaacgucuuccagacccgcgccgggugccucaucggcgcggagcacgugaacaacuccuacgagugcgacauccccaucggggccggcaucugcgccagcuaccagacgcagaccaacuccccgcggcgcgcccggagcguggcgucccagagcaucaucgccuacaccaugucccugggcgccgagaacagcgucgccuacuccaacaacagcaucgccauccccaccaacuucacgaucuccgugaccaccgagauccugcccgugagcaugaccaagacgagcgucgacugcaccauguacaucugcggggacuccaccgagugcagcaaccuccugcugcaguacggcuccuucugcacccagcucaaccgcgcgcugacggggaucgccguggagcaggacaagaacacccaggagguguucgcccaggucaagcagaucuacaagacgcccccgaucaaggacuucggcggguucaacuucagccagauccugcccgaccccuccaagcccagcaagcgguccuucaucgaggaccuccuguucaacaaggugacccuggccgacgccggcuucaucaagcaguacggcgacugccucggggacaucgcggcccgcgaccugaucugcgcccagaaguucaacggccugaccgugcucccgccccugcugaccgacgagaugaucgcccaguacaccagcgcccuccuggcggggaccaucacguccggcuggaccuucggggccggcgccgcccugcagauccccuucgcgaugcagauggccuaccgguucaacggcaucggggucacccagaacgugcucuacgagaaccagaagcugaucgccaaccaguucaacagcgccaucggcaagauccaggacucccugagcuccaccgccagcgcgcucgggaagcugcaggacguggucaaccagaacgcccaggcccugaacacgcucgugaagcagcuguccagcaacuucggcgccaucuccagcgugcugaacgacauccucucccgccuggacaaggucgaggccgaggugcagaucgaccggcugaucaccgggcgccuccagagccugcagaccuacgugacccagcagcugauccgggcggccgagauccgcgccagcgccaaccucgccgcgaccaagauguccgagugcguccugggccagagcaagcggguggacuucugcggcaagggguaccaccugauguccuucccccagagcgccccgcacggcguggucuuccuccacgugacguacguccccgcccaggagaagaacuucaccaccgcccccgcgaucugccacgacgggaaggcccacuucccccgcgagggcguguucguguccaacgggacccacugguucgucacgcagcggaacuucuacgagccgcagaucaucaccaccgacaacaccuucgugagcggcaacugcgacguggucaucggcaucgugaacaacacgguguacgacccccugcagcccgagcuggacuccggcgggagcggcuacauccccgaggccccgcgcgacgggcaggccuacgugcggaaggacggcgaguggguccugcucagcaccuuccuguga

SEQ ID NO: 11938 - RNA, 3534 nt, Artificial Sequence
  SARS-CoV-2/Wuhan/WIV05/2019__EPI_ISL_402128 spike protein CDS gc (1-1147)(K986P_V987P) Foldon construct
auguucguguuccugguccuccugccccuggugagcucccagugcgugaaccucaccacccgcacgcagcugccgcccgccuacaccaacagcuucacccggggcgucuacuaccccgacaagguguuccgcuccagcgugcugcacuccacccaggaccucuuccugcccuucuucagcaacgucacgugguuccacgccauccacguguccgggaccaacggcaccaagcgguucgacaacccggugcugcccuucaacgacggggucuacuucgcgagcaccgagaaguccaacaucauccgcggcuggaucuucgggacgacccucgacagcaagacccagucccugcugaucgugaacaacgccaccaacguggucaucaaggugugcgaguuccaguucugcaacgaccccuuccucggcguguacuaccacaagaacaacaagagcuggauggaguccgaguuccgggucuacagcuccgccaacaacugcacguucgaguacgugagccagcccuuccugauggaccuggagggcaagcaggggaacuucaagaaccuccgcgaguucguguucaagaacaucgacggcuacuucaagaucuacuccaagcacaccccgaucaaccugguccgggaccugccccagggguucagcgcccucgagccccugguggaccugcccaucggcaucaacaucacccgcuuccagacccuccuggcccugcaccgguccuaccucacgccgggggacagcagcuccggcuggaccgcgggcgccgccgccuacuacgugggguaccugcagccccgcaccuuccugcucaaguacaacgagaacggcaccaucacggacgcggucgacugcgcccuggacccccugagcgagaccaagugcacccucaaguccuucaccguggagaaggggaucuaccagacgagcaacuuccgggugcagcccaccgaguccaucguccgcuucccgaacaucaccaaccugugccccuucggcgagguguucaacgccacccgguucgccagcgucuacgccuggaaccgcaagcggaucuccaacugcguggcggacuacagcgugcuguacaacuccgccagcuucuccacguucaagugcuacggcgucagccccaccaagcucaacgaccugugcuucaccaacguguacgccgacuccuucgugauccgcggggacgagguccggcagaucgcccccggccagaccgggaagaucgccgacuacaacuacaagcugccggacgacuucacgggcugcgugaucgcguggaacagcaacaaccucgacuccaaggucgggggcaacuacaacuaccuguaccgccuguuccgcaagagcaaccucaagcccuucgagcgggacaucuccaccgagaucuaccaggccggcagcacccccugcaacgggguggagggcuucaacugcuacuucccccugcaguccuacggguuccagccgaccaacggcgugggguaccagcccuaccggguggucgugcugagcuucgagcuccugcacgcccccgccacggugugcggccccaagaaguccaccaaccuggucaagaacaagugcgugaacuucaacuucaacggccucaccgggaccggcgugcugaccgagagcaacaagaaguuccugccguuccagcaguucgggcgcgacaucgccgacacgaccgacgcgguccgcgacccccagacccuggagauccucgacaucacccccugcagcuucggcgggguguccgugaucacgccgggcaccaacaccagcaaccaggucgccgugcuguaccaggacgugaacugcaccgagguccccguggccauccacgccgaccagcugacgcccaccuggcggguguacuccaccggcagcaacgucuuccagacccgcgccgggugccucaucggcgcggagcacgugaacaacuccuacgagugcgacauccccaucggggccggcaucugcgccagcuaccagacgcagaccaacuccccgcggcgcgcccggagcguggcgucccagagcaucaucgccuacaccaugucccugggcgccgagaacagcgucgccuacuccaacaacagcaucgccauccccaccaacuucacgaucuccgugaccaccgagauccugcccgugagcaugaccaagacgagcgucgacugcaccauguacaucugcggggacuccaccgagugcagcaaccuccugcugcaguacggcuccuucugcacccagcucaaccgcgcgcugacggggaucgccguggagcaggacaagaacacccaggagguguucgcccaggucaagcagaucuacaagacgcccccgaucaaggacuucggcggguucaacuucagccagauccugcccgaccccuccaagcccagcaagcgguccuucaucgaggaccuccuguucaacaaggugacccuggccgacgccggcuucaucaagcaguacggcgacugccucggggacaucgcggcccgcgaccugaucugcgcccagaaguucaacggccugaccgugcucccgccccugcugaccgacgagaugaucgcccaguacaccagcgcccuccuggcggggaccaucacguccggcuggaccuucggggccggcgccgcccugcagauccccuucgcgaugcagauggccuaccgguucaacggcaucggggucacccagaacgugcucuacgagaaccagaagcugaucgccaaccaguucaacagcgccaucggcaagauccaggacucccugagcuccaccgccagcgcgcucgggaagcugcaggacguggucaaccagaacgcccaggcccugaacacgcucgugaagcagcuguccagcaacuucggcgccaucuccagcgugcugaacgacauccucucccgccuggacccgcccgaggccgaggugcagaucgaccggcugaucaccgggcgccuccagagccugcagaccuacgugacccagcagcugauccgggcggccgagauccgcgccagcgccaaccucgccgcgaccaagauguccgagugcguccugggccagagcaagcggguggacuucugcggcaagggguaccaccugauguccuucccccagagcgccccgcacggcguggucuuccuccacgugacguacguccccgcccaggagaagaacuucaccaccgcccccgcgaucugccacgacgggaaggcccacuucccccgcgagggcguguucguguccaacgggacccacugguucgucacgcagcggaacuucuacgagccgcagaucaucaccaccgacaacaccuucgugagcggcaacugcgacguggucaucggcaucgugaacaacacgguguacgacccccugcagcccgagcuggacuccggcgggagcggcuacauccccgaggccccgcgcgacgggcaggccuacgugcggaaggacggcgaguggguccugcucagcaccuuccuguga

SEQ ID NO: 11939 - RNA, 3534 nt, Artificial Sequence
  SARS-CoV-2/Wuhan/WIV05/2019__EPI_ISL_402128 spike protein CDS gc (1-1147)(K986P_V987P_T887WN_A1020W) Foldon construct
auguucguguuccugguccuccugccccuggugagcucccagugcgugaaccucaccacccgcacgcagcugccgcccgccuacaccaacagcuucacccggggcgucuacuaccccgacaagguguuccgcuccagcgugcugcacuccacccaggaccucuuccugcccuucuucagcaacgucacgugguuccacgccauccacguguccgggaccaacggcaccaagcgguucgacaacccggugcugcccuucaacgacggggucuacuucgcgagcaccgagaaguccaacaucauccgcggcuggaucuucgggacgacccucgacagcaagacccagucccugcugaucgugaacaacgccaccaacguggucaucaaggugugcgaguuccaguucugcaacgaccccuuccucggcguguacuaccacaagaacaacaagagcuggauggaguccgaguuccgggucuacagcuccgccaacaacugcacguucgaguacgugagccagcccuuccugauggaccuggagggcaagcaggggaacuucaagaaccuccgcgaguucguguucaagaacaucgacggcuacuucaagaucuacuccaagcacaccccgaucaaccugguccgggaccugccccagggguucagcgcccucgagccccugguggaccugcccaucggcaucaacaucacccgcuuccagacccuccuggcccugcaccgguccuaccucacgccgggggacagcagcuccggcuggaccgcgggcgccgccgccuacuacgugggguaccugcagccccgcaccuuccugcucaaguacaacgagaacggcaccaucacggacgcggucgacugcgcccuggacccccugagcgagaccaagugcacccucaaguccuucaccguggagaaggggaucuaccagacgagcaacuuccgggugcagcccaccgaguccaucguccgcuucccgaacaucaccaaccugugccccuucggcgagguguucaacgccacccgguucgccagcgucuacgccuggaaccgcaagcggaucuccaacugcguggcggacuacagcgugcuguacaacuccgccagcuucuccacguucaagugcuacggcgucagccccaccaagcucaacgaccugugcuucaccaacguguacgccgacuccuucgugauccgcggggacgagguccggcagaucgcccccggccagaccgggaagaucgccgacuacaacuacaagcugccggacgacuucacgggcugcgugaucgcguggaacagcaacaaccucgacuccaaggucgggggcaacuacaacuaccuguaccgccuguuccgcaagagcaaccucaagcccuucgagcgggacaucuccaccgagaucuaccaggccggcagcacccccugcaacgggguggagggcuucaacugcuacuucccccugcaguccuacggguuccagccgaccaacggcgugggguaccagcccuaccggguggucgugcugagcuucgagcuccugcacgcccccgccacggugugcggccccaagaaguccaccaaccuggucaagaacaagugcgugaacuucaacuucaacggccucaccgggaccggcgugcugaccgagagcaacaagaaguuccugccguuccagcaguucgggcgcgacaucgccgacacgaccgacgcgguccgcgacccccagacccuggagauccucgacaucacccccugcagcuucggcgggguguccgugaucacgccgggcaccaacaccagcaaccaggucgccgugcuguaccaggacgugaacugcaccgagguccccguggccauccacgccgaccagcugacgcccaccuggcggguguacuccaccggcagcaacgucuuccagacccgcgccgggugccucaucggcgcggagcacgugaacaacuccuacgagugcgacauccccaucggggccggcaucugcgccagcuaccagacgcagaccaacuccccgcggcgcgcccggagcguggcgucccagagcaucaucgccuacaccaugucccugggcgccgagaacagcgucgccuacuccaacaacagcaucgccauccccaccaacuucacgaucuccgugaccaccgagauccugcccgugagcaugaccaagacgagcgucgacugcaccauguacaucugcggggacuccaccgagugcagcaaccuccugcugcaguacggcuccuucugcacccagcucaaccgcgcgcugacggggaucgccguggagcaggacaagaacacccaggagguguucgcccaggucaagcagaucuacaagacgcccccgaucaaggacuucggcggguucaacuucagccagauccugcccgaccccuccaagcccagcaagcgguccuucaucgaggaccuccuguucaacaaggugacccuggccgacgccggcuucaucaagcaguacggcgacugccucggggacaucgcggcccgcgaccugaucugcgcccagaaguucaacggccugaccgugcucccgccccugcugaccgacgagaugaucgcccaguacaccagcgcccuccuggcggggaccaucacguccggcuggugguucggggccggcgccgcccugcagauccccuucgcgaugcagauggccuaccgguucaacggcaucggggucacccagaacgugcucuacgagaaccagaagcugaucgccaaccaguucaacagcgccaucggcaagauccaggacucccugagcuccaccgccagcgcgcucgggaagcugcaggacguggucaaccagaacgcccaggcccugaacacgcucgugaagcagcuguccagcaacuucggcgccaucuccagcgugcugaacgacauccucucccgccuggacccgcccgaggccgaggugcagaucgaccggcugaucaccgggcgccuccagagccugcagaccuacgugacccagcagcugauccgggcggccgagauccgcuggagcgccaaccucgccgcgaccaagauguccgagugcguccugggccagagcaagcggguggacuucugcggcaagggguaccaccugauguccuucccccagagcgccccgcacggcguggucuuccuccacgugacguacguccccgcccaggagaagaacuucaccaccgcccccgcgaucugccacgacgggaaggcccacuucccccgcgagggcguguucguguccaacgggacccacugguucgucacgcagcggaacuucuacgagccgcagaucaucaccaccgacaacaccuucgugagcggcaacugcgacguggucaucggcaucgugaacaacacgguguacgacccccugcagcccgagcuggacuccggcgggagcggcuacauccccgaggccccgcgcgacgggcaggccuacgugcggaaggacggcgaguggguccugcucagcaccuuccuguga

SEQ ID NO: 11940 - RNA, 3534 nt, Artificial Sequence
  SARS-CoV-2/Wuhan/WIV05/2019__EPI_ISL_402128 spike protein CDS gc (1-1147)(K986P_V987P_P1069F) Foldon construct
auguucguguuccugguccuccugccccuggugagcucccagugcgugaaccucaccacccgcacgcagcugccgcccgccuacaccaacagcuucacccggggcgucuacuaccccgacaagguguuccgcuccagcgugcugcacuccacccaggaccucuuccugcccuucuucagcaacgucacgugguuccacgccauccacguguccgggaccaacggcaccaagcgguucgacaacccggugcugcccuucaacgacggggucuacuucgcgagcaccgagaaguccaacaucauccgcggcuggaucuucgggacgacccucgacagcaagacccagucccugcugaucgugaacaacgccaccaacguggucaucaaggugugcgaguuccaguucugcaacgaccccuuccucggcguguacuaccacaagaacaacaagagcuggauggaguccgaguuccgggucuacagcuccgccaacaacugcacguucgaguacgugagccagcccuuccugauggaccuggagggcaagcaggggaacuucaagaaccuccgcgaguucguguucaagaacaucgacggcuacuucaagaucuacuccaagcacaccccgaucaaccugguccgggaccugccccagggguucagcgcccucgagccccugguggaccugcccaucggcaucaacaucacccgcuuccagacccuccuggcccugcaccgguccuaccucacgccgggggacagcagcuccggcuggaccgcgggcgccgccgccuacuacgugggguaccugcagccccgcaccuuccugcucaaguacaacgagaacggcaccaucacggacgcggucgacugcgcccuggacccccugagcgagaccaagugcacccucaaguccuucaccguggagaaggggaucuaccagacgagcaacuuccgggugcagcccaccgaguccaucguccgcuucccgaacaucaccaaccugugccccuucggcgagguguucaacgccacccgguucgccagcgucuacgccuggaaccgcaagcggaucuccaacugcguggcggacuacagcgugcuguacaacuccgccagcuucuccacguucaagugcuacggcgucagccccaccaagcucaacgaccugugcuucaccaacguguacgccgacuccuucgugauccgcggggacgagguccggcagaucgcccccggccagaccgggaagaucgccgacuacaacuacaagcugccggacgacuucacgggcugcgugaucgcguggaacagcaacaaccucgacuccaaggucgggggcaacuacaacuaccuguaccgccuguuccgcaagagcaaccucaagcccuucgagcgggacaucuccaccgagaucuaccaggccggcagcacccccugcaacgggguggagggcuucaacugcuacuucccccugcaguccuacggguuccagccgaccaacggcgugggguaccagcccuaccggguggucgugcugagcuucgagcuccugcacgcccccgccacggugugcggccccaagaaguccaccaaccuggucaagaacaagugcgugaacuucaacuucaacggccucaccgggaccggcgugcugaccgagagcaacaagaaguuccugccguuccagcaguucgggcgcgacaucgccgacacgaccgacgcgguccgcgacccccagacccuggagauccucgacaucacccccugcagcuucggcgggguguccgugaucacgccgggcaccaacaccagcaaccaggucgccgugcuguaccaggacgugaacugcaccgagguccccguggccauccacgccgaccagcugacgcccaccuggcggguguacuccaccggcagcaacgucuuccagacccgcgccgggugccucaucggcgcggagcacgugaacaacuccuacgagugcgacauccccaucggggccggcaucugcgccagcuaccagacgcagaccaacuccccgcggcgcgcccggagcguggcgucccagagcaucaucgccuacaccaugucccugggcgccgagaacagcgucgccuacuccaacaacagcaucgccauccccaccaacuucacgaucuccgugaccaccgagauccugcccgugagcaugaccaagacgagcgucgacugcaccauguacaucugcggggacuccaccgagugcagcaaccuccugcugcaguacggcuccuucugcacccagcucaaccgcgcgcugacggggaucgccguggagcaggacaagaacacccaggagguguucgcccaggucaagcagaucuacaagacgcccccgaucaaggacuucggcggguucaacuucagccagauccugcccgaccccuccaagcccagcaagcgguccuucaucgaggaccuccuguucaacaaggugacccuggccgacgccggcuucaucaagcaguacggcgacugccucggggacaucgcggcccgcgaccugaucugcgcccagaaguucaacggccugaccgugcucccgccccugcugaccgacgagaugaucgcccaguacaccagcgcccuccuggcggggaccaucacguccggcuggaccuucggggccggcgccgcccugcagauccccuucgcgaugcagauggccuaccgguucaacggcaucggggucacccagaacgugcucuacgagaaccagaagcugaucgccaaccaguucaacagcgccaucggcaagauccaggacucccugagcuccaccgccagcgcgcucgggaagcugcaggacguggucaaccagaacgcccaggcccugaacacgcucgugaagcagcuguccagcaacuucggcgccaucuccagcgugcugaacgacauccucucccgccuggacccgcccgaggccgaggugcagaucgaccggcugaucaccgggcgccuccagagccugcagaccuacgugacccagcagcugauccgggcggccgagauccgcgccagcgccaaccucgccgcgaccaagauguccgagugcguccugggccagagcaagcggguggacuucugcggcaagggguaccaccugauguccuucccccagagcgccccgcacggcguggucuuccuccacgugacguacgucuucgcccaggagaagaacuucaccaccgcccccgcgaucugccacgacgggaaggcccacuucccccgcgagggcguguucguguccaacgggacccacugguucgucacgcagcggaacuucuacgagccgcagaucaucaccaccgacaacaccuucgugagcggcaacugcgacguggucaucggcaucgugaacaacacgguguacgacccccugcagcccgagcuggacuccggcgggagcggcuacauccccgaggccccgcgcgacgggcaggccuacgugcggaaggacggcgaguggguccugcucagcaccuuccuguga

SEQ ID NO: 11941 - RNA, 3534 nt, Artificial Sequence
  SARS-CoV-2/Wuhan/WIV05/2019__EPI_ISL_402128 spike protein CDS gc (1-1147)(K986P_V987P_ H1048Q_H1064N_ H1083N_H1101N) Foldon construct
auguucguguuccugguccuccugccccuggugagcucccagugcgugaaccucaccacccgcacgcagcugccgcccgccuacaccaacagcuucacccggggcgucuacuaccccgacaagguguuccgcuccagcgugcugcacuccacccaggaccucuuccugcccuucuucagcaacgucacgugguuccacgccauccacguguccgggaccaacggcaccaagcgguucgacaacccggugcugcccuucaacgacggggucuacuucgcgagcaccgagaaguccaacaucauccgcggcuggaucuucgggacgacccucgacagcaagacccagucccugcugaucgugaacaacgccaccaacguggucaucaaggugugcgaguuccaguucugcaacgaccccuuccucggcguguacuaccacaagaacaacaagagcuggauggaguccgaguuccgggucuacagcuccgccaacaacugcacguucgaguacgugagccagcccuuccugauggaccuggagggcaagcaggggaacuucaagaaccuccgcgaguucguguucaagaacaucgacggcuacuucaagaucuacuccaagcacaccccgaucaaccugguccgggaccugccccagggguucagcgcccucgagccccugguggaccugcccaucggcaucaacaucacccgcuuccagacccuccuggcccugcaccgguccuaccucacgccgggggacagcagcuccggcuggaccgcgggcgccgccgccuacuacgugggguaccugcagccccgcaccuuccugcucaaguacaacgagaacggcaccaucacggacgcggucgacugcgcccuggacccccugagcgagaccaagugcacccucaaguccuucaccguggagaaggggaucuaccagacgagcaacuuccgggugcagcccaccgaguccaucguccgcuucccgaacaucaccaaccugugccccuucggcgagguguucaacgccacccgguucgccagcgucuacgccuggaaccgcaagcggaucuccaacugcguggcggacuacagcgugcuguacaacuccgccagcuucuccacguucaagugcuacggcgucagccccaccaagcucaacgaccugugcuucaccaacguguacgccgacuccuucgugauccgcggggacgagguccggcagaucgcccccggccagaccgggaagaucgccgacuacaacuacaagcugccggacgacuucacgggcugcgugaucgcguggaacagcaacaaccucgacuccaaggucgggggcaacuacaacuaccuguaccgccuguuccgcaagagcaaccucaagcccuucgagcgggacaucuccaccgagaucuaccaggccggcagcacccccugcaacgggguggagggcuucaacugcuacuucccccugcaguccuacggguuccagccgaccaacggcgugggguaccagcccuaccggguggucgugcugagcuucgagcuccugcacgcccccgccacggugugcggccccaagaaguccaccaaccuggucaagaacaagugcgugaacuucaacuucaacggccucaccgggaccggcgugcugaccgagagcaacaagaaguuccugccguuccagcaguucgggcgcgacaucgccgacacgaccgacgcgguccgcgacccccagacccuggagauccucgacaucacccccugcagcuucggcgggguguccgugaucacgccgggcaccaacaccagcaaccaggucgccgugcuguaccaggacgugaacugcaccgagguccccguggccauccacgccgaccagcugacgcccaccuggcggguguacuccaccggcagcaacgucuuccagacccgcgccgggugccucaucggcgcggagcacgugaacaacuccuacgagugcgacauccccaucggggccggcaucugcgccagcuaccagacgcagaccaacuccccgcggcgcgcccggagcguggcgucccagagcaucaucgccuacaccaugucccugggcgccgagaacagcgucgccuacuccaacaacagcaucgccauccccaccaacuucacgaucuccgugaccaccgagauccugcccgugagcaugaccaagacgagcgucgacugcaccauguacaucugcggggacuccaccgagugcagcaaccuccugcugcaguacggcuccuucugcacccagcucaaccgcgcgcugacggggaucgccguggagcaggacaagaacacccaggagguguucgcccaggucaagcagaucuacaagacgcccccgaucaaggacuucggcggguucaacuucagccagauccugcccgaccccuccaagcccagcaagcgguccuucaucgaggaccuccuguucaacaaggugacccuggccgacgccggcuucaucaagcaguacggcgacugccucggggacaucgcggcccgcgaccugaucugcgcccagaaguucaacggccugaccgugcucccgccccugcugaccgacgagaugaucgcccaguacaccagcgcccuccuggcggggaccaucacguccggcuggaccuucggggccggcgccgcccugcagauccccuucgcgaugcagauggccuaccgguucaacggcaucggggucacccagaacgugcucuacgagaaccagaagcugaucgccaaccaguucaacagcgccaucggcaagauccaggacucccugagcuccaccgccagcgcgcucgggaagcugcaggacguggucaaccagaacgcccaggcccugaacacgcucgugaagcagcuguccagcaacuucggcgccaucuccagcgugcugaacgacauccucucccgccuggacccgcccgaggccgaggugcagaucgaccggcugaucaccgggcgccuccagagccugcagaccuacgugacccagcagcugauccgggcggccgagauccgcgccagcgccaaccucgccgcgaccaagauguccgagugcguccugggccagagcaagcggguggacuucugcggcaagggguaccagcugauguccuucccccagagcgccccgcacggcguggucuuccucaacgugacguacguccccgcccaggagaagaacuucaccaccgcccccgcgaucugcaacgacgggaaggcccacuucccccgcgagggcguguucguguccaacgggaccaacugguucgucacgcagcggaacuucuacgagccgcagaucaucaccaccgacaacaccuucgugagcggcaacugcgacguggucaucggcaucgugaacaacacgguguacgacccccugcagcccgagcuggacuccggcgggagcggcuacauccccgaggccccgcgcgacgggcaggccuacgugcggaaggacggcgaguggguccugcucagcaccuuccuguga

SEQ ID NO: 11942 - RNA, 3534 nt, Artificial Sequence
  SARS-CoV-2/Wuhan/WIV05/2019__EPI_ISL_402128 spike protein CDS gc (1-1147)(I712C_T1077C) Foldon construct
auguucguguuccugguccuccugccccuggugagcucccagugcgugaaccucaccacccgcacgcagcugccgcccgccuacaccaacagcuucacccggggcgucuacuaccccgacaagguguuccgcuccagcgugcugcacuccacccaggaccucuuccugcccuucuucagcaacgucacgugguuccacgccauccacguguccgggaccaacggcaccaagcgguucgacaacccggugcugcccuucaacgacggggucuacuucgcgagcaccgagaaguccaacaucauccgcggcuggaucuucgggacgacccucgacagcaagacccagucccugcugaucgugaacaacgccaccaacguggucaucaaggugugcgaguuccaguucugcaacgaccccuuccucggcguguacuaccacaagaacaacaagagcuggauggaguccgaguuccgggucuacagcuccgccaacaacugcacguucgaguacgugagccagcccuuccugauggaccuggagggcaagcaggggaacuucaagaaccuccgcgaguucguguucaagaacaucgacggcuacuucaagaucuacuccaagcacaccccgaucaaccugguccgggaccugccccagggguucagcgcccucgagccccugguggaccugcccaucggcaucaacaucacccgcuuccagacccuccuggcccugcaccgguccuaccucacgccgggggacagcagcuccggcuggaccgcgggcgccgccgccuacuacgugggguaccugcagccccgcaccuuccugcucaaguacaacgagaacggcaccaucacggacgcggucgacugcgcccuggacccccugagcgagaccaagugcacccucaaguccuucaccguggagaaggggaucuaccagacgagcaacuuccgggugcagcccaccgaguccaucguccgcuucccgaacaucaccaaccugugccccuucggcgagguguucaacgccacccgguucgccagcgucuacgccuggaaccgcaagcggaucuccaacugcguggcggacuacagcgugcuguacaacuccgccagcuucuccacguucaagugcuacggcgucagccccaccaagcucaacgaccugugcuucaccaacguguacgccgacuccuucgugauccgcggggacgagguccggcagaucgcccccggccagaccgggaagaucgccgacuacaacuacaagcugccggacgacuucacgggcugcgugaucgcguggaacagcaacaaccucgacuccaaggucgggggcaacuacaacuaccuguaccgccuguuccgcaagagcaaccucaagcccuucgagcgggacaucuccaccgagaucuaccaggccggcagcacccccugcaacgggguggagggcuucaacugcuacuucccccugcaguccuacggguuccagccgaccaacggcgugggguaccagcccuaccggguggucgugcugagcuucgagcuccugcacgcccccgccacggugugcggccccaagaaguccaccaaccuggucaagaacaagugcgugaacuucaacuucaacggccucaccgggaccggcgugcugaccgagagcaacaagaaguuccugccguuccagcaguucgggcgcgacaucgccgacacgaccgacgcgguccgcgacccccagacccuggagauccucgacaucacccccugcagcuucggcgggguguccgugaucacgccgggcaccaacaccagcaaccaggucgccgugcuguaccaggacgugaacugcaccgagguccccguggccauccacgccgaccagcugacgcccaccuggcggguguacuccaccggcagcaacgucuuccagacccgcgccgggugccucaucggcgcggagcacgugaacaacuccuacgagugcgacauccccaucggggccggcaucugcgccagcuaccagacgcagaccaacuccccgcggcgcgcccggagcguggcgucccagagcaucaucgccuacaccaugucccugggcgccgagaacagcgucgccuacuccaacaacagcugcgccauccccaccaacuucacgaucuccgugaccaccgagauccugcccgugagcaugaccaagacgagcgucgacugcaccauguacaucugcggggacuccaccgagugcagcaaccuccugcugcaguacggcuccuucugcacccagcucaaccgcgcgcugacggggaucgccguggagcaggacaagaacacccaggagguguucgcccaggucaagcagaucuacaagacgcccccgaucaaggacuucggcggguucaacuucagccagauccugcccgaccccuccaagcccagcaagcgguccuucaucgaggaccuccuguucaacaaggugacccuggccgacgccggcuucaucaagcaguacggcgacugccucggggacaucgcggcccgcgaccugaucugcgcccagaaguucaacggccugaccgugcucccgccccugcugaccgacgagaugaucgcccaguacaccagcgcccuccuggcggggaccaucacguccggcuggaccuucggggccggcgccgcccugcagauccccuucgcgaugcagauggccuaccgguucaacggcaucggggucacccagaacgugcucuacgagaaccagaagcugaucgccaaccaguucaacagcgccaucggcaagauccaggacucccugagcuccaccgccagcgcgcucgggaagcugcaggacguggucaaccagaacgcccaggcccugaacacgcucgugaagcagcuguccagcaacuucggcgccaucuccagcgugcugaacgacauccucucccgccuggacaaggucgaggccgaggugcagaucgaccggcugaucaccgggcgccuccagagccugcagaccuacgugacccagcagcugauccgggcggccgagauccgcgccagcgccaaccucgccgcgaccaagauguccgagugcguccugggccagagcaagcggguggacuucugcggcaagggguaccaccugauguccuucccccagagcgccccgcacggcguggucuuccuccacgugacguacguccccgcccaggagaagaacuucaccugcgcccccgcgaucugccacgacgggaaggcccacuucccccgcgagggcguguucguguccaacgggacccacugguucgucacgcagcggaacuucuacgagccgcagaucaucaccaccgacaacaccuucgugagcggcaacugcgacguggucaucggcaucgugaacaacacgguguacgacccccugcagcccgagcuggacuccggcgggagcggcuacauccccgaggccccgcgcgacgggcaggccuacgugcggaaggacggcgaguggguccugcucagcaccuuccuguga

SEQ ID NO: 11943 - RNA, 3534 nt, Artificial Sequence
  SARS-CoV-2/Wuhan/WIV05/2019__EPI_ISL_402128 spike protein CDS gc (1-1147)(I714C_Y1110C) Foldon construct
auguucguguuccugguccuccugccccuggugagcucccagugcgugaaccucaccacccgcacgcagcugccgcccgccuacaccaacagcuucacccggggcgucuacuaccccgacaagguguuccgcuccagcgugcugcacuccacccaggaccucuuccugcccuucuucagcaacgucacgugguuccacgccauccacguguccgggaccaacggcaccaagcgguucgacaacccggugcugcccuucaacgacggggucuacuucgcgagcaccgagaaguccaacaucauccgcggcuggaucuucgggacgacccucgacagcaagacccagucccugcugaucgugaacaacgccaccaacguggucaucaaggugugcgaguuccaguucugcaacgaccccuuccucggcguguacuaccacaagaacaacaagagcuggauggaguccgaguuccgggucuacagcuccgccaacaacugcacguucgaguacgugagccagcccuuccugauggaccuggagggcaagcaggggaacuucaagaaccuccgcgaguucguguucaagaacaucgacggcuacuucaagaucuacuccaagcacaccccgaucaaccugguccgggaccugccccagggguucagcgcccucgagccccugguggaccugcccaucggcaucaacaucacccgcuuccagacccuccuggcccugcaccgguccuaccucacgccgggggacagcagcuccggcuggaccgcgggcgccgccgccuacuacgugggguaccugcagccccgcaccuuccugcucaaguacaacgagaacggcaccaucacggacgcggucgacugcgcccuggacccccugagcgagaccaagugcacccucaaguccuucaccguggagaaggggaucuaccagacgagcaacuuccgggugcagcccaccgaguccaucguccgcuucccgaacaucaccaaccugugccccuucggcgagguguucaacgccacccgguucgccagcgucuacgccuggaaccgcaagcggaucuccaacugcguggcggacuacagcgugcuguacaacuccgccagcuucuccacguucaagugcuacggcgucagccccaccaagcucaacgaccugugcuucaccaacguguacgccgacuccuucgugauccgcggggacgagguccggcagaucgcccccggccagaccgggaagaucgccgacuacaacuacaagcugccggacgacuucacgggcugcgugaucgcguggaacagcaacaaccucgacuccaaggucgggggcaacuacaacuaccuguaccgccuguuccgcaagagcaaccucaagcccuucgagcgggacaucuccaccgagaucuaccaggccggcagcacccccugcaacgggguggagggcuucaacugcuacuucccccugcaguccuacggguuccagccgaccaacggcgugggguaccagcccuaccggguggucgugcugagcuucgagcuccugcacgcccccgccacggugugcggccccaagaaguccaccaaccuggucaagaacaagugcgugaacuucaacuucaacggccucaccgggaccggcgugcugaccgagagcaacaagaaguuccugccguuccagcaguucgggcgcgacaucgccgacacgaccgacgcgguccgcgacccccagacccuggagauccucgacaucacccccugcagcuucggcgggguguccgugaucacgccgggcaccaacaccagcaaccaggucgccgugcuguaccaggacgugaacugcaccgagguccccguggccauccacgccgaccagcugacgcccaccuggcggguguacuccaccggcagcaacgucuuccagacccgcgccgggugccucaucggcgcggagcacgugaacaacuccuacgagugcgacauccccaucggggccggcaucugcgccagcuaccagacgcagaccaacuccccgcggcgcgcccggagcguggcgucccagagcaucaucgccuacaccaugucccugggcgccgagaacagcgucgccuacuccaacaacagcaucgccugccccaccaacuucacgaucuccgugaccaccgagauccugcccgugagcaugaccaagacgagcgucgacugcaccauguacaucugcggggacuccaccgagugcagcaaccuccugcugcaguacggcuccuucugcacccagcucaaccgcgcgcugacggggaucgccguggagcaggacaagaacacccaggagguguucgcccaggucaagcagaucuacaagacgcccccgaucaaggacuucggcggguucaacuucagccagauccugcccgaccccuccaagcccagcaagcgguccuucaucgaggaccuccuguucaacaaggugacccuggccgacgccggcuucaucaagcaguacggcgacugccucggggacaucgcggcccgcgaccugaucugcgcccagaaguucaacggccugaccgugcucccgccccugcugaccgacgagaugaucgcccaguacaccagcgcccuccuggcggggaccaucacguccggcuggaccuucggggccggcgccgcccugcagauccccuucgcgaugcagauggccuaccgguucaacggcaucggggucacccagaacgugcucuacgagaaccagaagcugaucgccaaccaguucaacagcgccaucggcaagauccaggacucccugagcuccaccgccagcgcgcucgggaagcugcaggacguggucaaccagaacgcccaggcccugaacacgcucgugaagcagcuguccagcaacuucggcgccaucuccagcgugcugaacgacauccucucccgccuggacaaggucgaggccgaggugcagaucgaccggcugaucaccgggcgccuccagagccugcagaccuacgugacccagcagcugauccgggcggccgagauccgcgccagcgccaaccucgccgcgaccaagauguccgagugcguccugggccagagcaagcggguggacuucugcggcaagggguaccaccugauguccuucccccagagcgccccgcacggcguggucuuccuccacgugacguacguccccgcccaggagaagaacuucaccaccgcccccgcgaucugccacgacgggaaggcccacuucccccgcgagggcguguucguguccaacgggacccacugguucgucacgcagcggaacuucugcgagccgcagaucaucaccaccgacaacaccuucgugagcggcaacugcgacguggucaucggcaucgugaacaacacgguguacgacccccugcagcccgagcuggacuccggcgggagcggcuacauccccgaggccccgcgcgacgggcaggccuacgugcggaaggacggcgaguggguccugcucagcaccuuccuguga

SEQ ID NO: 11944 - RNA, 3534 nt, Artificial Sequence
  SARS-CoV-2/Wuhan/WIV05/2019__EPI_ISL_402128 spike protein CDS gc (1-1147)(P715C_P1069C) Foldon construct
auguucguguuccugguccuccugccccuggugagcucccagugcgugaaccucaccacccgcacgcagcugccgcccgccuacaccaacagcuucacccggggcgucuacuaccccgacaagguguuccgcuccagcgugcugcacuccacccaggaccucuuccugcccuucuucagcaacgucacgugguuccacgccauccacguguccgggaccaacggcaccaagcgguucgacaacccggugcugcccuucaacgacggggucuacuucgcgagcaccgagaaguccaacaucauccgcggcuggaucuucgggacgacccucgacagcaagacccagucccugcugaucgugaacaacgccaccaacguggucaucaaggugugcgaguuccaguucugcaacgaccccuuccucggcguguacuaccacaagaacaacaagagcuggauggaguccgaguuccgggucuacagcuccgccaacaacugcacguucgaguacgugagccagcccuuccugauggaccuggagggcaagcaggggaacuucaagaaccuccgcgaguucguguucaagaacaucgacggcuacuucaagaucuacuccaagcacaccccgaucaaccugguccgggaccugccccagggguucagcgcccucgagccccugguggaccugcccaucggcaucaacaucacccgcuuccagacccuccuggcccugcaccgguccuaccucacgccgggggacagcagcuccggcuggaccgcgggcgccgccgccuacuacgugggguaccugcagccccgcaccuuccugcucaaguacaacgagaacggcaccaucacggacgcggucgacugcgcccuggacccccugagcgagaccaagugcacccucaaguccuucaccguggagaaggggaucuaccagacgagcaacuuccgggugcagcccaccgaguccaucguccgcuucccgaacaucaccaaccugugccccuucggcgagguguucaacgccacccgguucgccagcgucuacgccuggaaccgcaagcggaucuccaacugcguggcggacuacagcgugcuguacaacuccgccagcuucuccacguucaagugcuacggcgucagccccaccaagcucaacgaccugugcuucaccaacguguacgccgacuccuucgugauccgcggggacgagguccggcagaucgcccccggccagaccgggaagaucgccgacuacaacuacaagcugccggacgacuucacgggcugcgugaucgcguggaacagcaacaaccucgacuccaaggucgggggcaacuacaacuaccuguaccgccuguuccgcaagagcaaccucaagcccuucgagcgggacaucuccaccgagaucuaccaggccggcagcacccccugcaacgggguggagggcuucaacugcuacuucccccugcaguccuacggguuccagccgaccaacggcgugggguaccagcccuaccggguggucgugcugagcuucgagcuccugcacgcccccgccacggugugcggccccaagaaguccaccaaccuggucaagaacaagugcgugaacuucaacuucaacggccucaccgggaccggcgugcugaccgagagcaacaagaaguuccugccguuccagcaguucgggcgcgacaucgccgacacgaccgacgcgguccgcgacccccagacccuggagauccucgacaucacccccugcagcuucggcgggguguccgugaucacgccgggcaccaacaccagcaaccaggucgccgugcuguaccaggacgugaacugcaccgagguccccguggccauccacgccgaccagcugacgcccaccuggcggguguacuccaccggcagcaacgucuuccagacccgcgccgggugccucaucggcgcggagcacgugaacaacuccuacgagugcgacauccccaucggggccggcaucugcgccagcuaccagacgcagaccaacuccccgcggcgcgcccggagcguggcgucccagagcaucaucgccuacaccaugucccugggcgccgagaacagcgucgccuacuccaacaacagcaucgccaucugcaccaacuucacgaucuccgugaccaccgagauccugcccgugagcaugaccaagacgagcgucgacugcaccauguacaucugcggggacuccaccgagugcagcaaccuccugcugcaguacggcuccuucugcacccagcucaaccgcgcgcugacggggaucgccguggagcaggacaagaacacccaggagguguucgcccaggucaagcagaucuacaagacgcccccgaucaaggacuucggcggguucaacuucagccagauccugcccgaccccuccaagcccagcaagcgguccuucaucgaggaccuccuguucaacaaggugacccuggccgacgccggcuucaucaagcaguacggcgacugccucggggacaucgcggcccgcgaccugaucugcgcccagaaguucaacggccugaccgugcucccgccccugcugaccgacgagaugaucgcccaguacaccagcgcccuccuggcggggaccaucacguccggcuggaccuucggggccggcgccgcccugcagauccccuucgcgaugcagauggccuaccgguucaacggcaucggggucacccagaacgugcucuacgagaaccagaagcugaucgccaaccaguucaacagcgccaucggcaagauccaggacucccugagcuccaccgccagcgcgcucgggaagcugcaggacguggucaaccagaacgcccaggcccugaacacgcucgugaagcagcuguccagcaacuucggcgccaucuccagcgugcugaacgacauccucucccgccuggacaaggucgaggccgaggugcagaucgaccggcugaucaccgggcgccuccagagccugcagaccuacgugacccagcagcugauccgggcggccgagauccgcgccagcgccaaccucgccgcgaccaagauguccgagugcguccugggccagagcaagcggguggacuucugcggcaagggguaccaccugauguccuucccccagagcgccccgcacggcguggucuuccuccacgugacguacgucugcgcccaggagaagaacuucaccaccgcccccgcgaucugccacgacgggaaggcccacuucccccgcgagggcguguucguguccaacgggacccacugguucgucacgcagcggaacuucuacgagccgcagaucaucaccaccgacaacaccuucgugagcggcaacugcgacguggucaucggcaucgugaacaacacgguguacgacccccugcagcccgagcuggacuccggcgggagcggcuacauccccgaggccccgcgcgacgggcaggccuacgugcggaaggacggcgaguggguccugcucagcaccuuccuguga

SEQ ID NO: 11945 - RNA, 3534 nt, Artificial Sequence
  SARS-CoV-2/Wuhan/WIV05/2019__EPI_ISL_402128 spike protein CDS gc (1-1147)(G889C_L1034C) Foldon construct
auguucguguuccugguccuccugccccuggugagcucccagugcgugaaccucaccacccgcacgcagcugccgcccgccuacaccaacagcuucacccggggcgucuacuaccccgacaagguguuccgcuccagcgugcugcacuccacccaggaccucuuccugcccuucuucagcaacgucacgugguuccacgccauccacguguccgggaccaacggcaccaagcgguucgacaacccggugcugcccuucaacgacggggucuacuucgcgagcaccgagaaguccaacaucauccgcggcuggaucuucgggacgacccucgacagcaagacccagucccugcugaucgugaacaacgccaccaacguggucaucaaggugugcgaguuccaguucugcaacgaccccuuccucggcguguacuaccacaagaacaacaagagcuggauggaguccgaguuccgggucuacagcuccgccaacaacugcacguucgaguacgugagccagcccuuccugauggaccuggagggcaagcaggggaacuucaagaaccuccgcgaguucguguucaagaacaucgacggcuacuucaagaucuacuccaagcacaccccgaucaaccugguccgggaccugccccagggguucagcgcccucgagccccugguggaccugcccaucggcaucaacaucacccgcuuccagacccuccuggcccugcaccgguccuaccucacgccgggggacagcagcuccggcuggaccgcgggcgccgccgccuacuacgugggguaccugcagccccgcaccuuccugcucaaguacaacgagaacggcaccaucacggacgcggucgacugcgcccuggacccccugagcgagaccaagugcacccucaaguccuucaccguggagaaggggaucuaccagacgagcaacuuccgggugcagcccaccgaguccaucguccgcuucccgaacaucaccaaccugugccccuucggcgagguguucaacgccacccgguucgccagcgucuacgccuggaaccgcaagcggaucuccaacugcguggcggacuacagcgugcuguacaacuccgccagcuucuccacguucaagugcuacggcgucagccccaccaagcucaacgaccugugcuucaccaacguguacgccgacuccuucgugauccgcggggacgagguccggcagaucgcccccggccagaccgggaagaucgccgacuacaacuacaagcugccggacgacuucacgggcugcgugaucgcguggaacagcaacaaccucgacuccaaggucgggggcaacuacaacuaccuguaccgccuguuccgcaagagcaaccucaagcccuucgagcgggacaucuccaccgagaucuaccaggccggcagcacccccugcaacgggguggagggcuucaacugcuacuucccccugcaguccuacggguuccagccgaccaacggcgugggguaccagcccuaccggguggucgugcugagcuucgagcuccugcacgcccccgccacggugugcggccccaagaaguccaccaaccuggucaagaacaagugcgugaacuucaacuucaacggccucaccgggaccggcgugcugaccgagagcaacaagaaguuccugccguuccagcaguucgggcgcgacaucgccgacacgaccgacgcgguccgcgacccccagacccuggagauccucgacaucacccccugcagcuucggcgggguguccgugaucacgccgggcaccaacaccagcaaccaggucgccgugcuguaccaggacgugaacugcaccgagguccccguggccauccacgccgaccagcugacgcccaccuggcggguguacuccaccggcagcaacgucuuccagacccgcgccgggugccucaucggcgcggagcacgugaacaacuccuacgagugcgacauccccaucggggccggcaucugcgccagcuaccagacgcagaccaacuccccgcggcgcgcccggagcguggcgucccagagcaucaucgccuacaccaugucccugggcgccgagaacagcgucgccuacuccaacaacagcaucgccauccccaccaacuucacgaucuccgugaccaccgagauccugcccgugagcaugaccaagacgagcgucgacugcaccauguacaucugcggggacuccaccgagugcagcaaccuccugcugcaguacggcuccuucugcacccagcucaaccgcgcgcugacggggaucgccguggagcaggacaagaacacccaggagguguucgcccaggucaagcagaucuacaagacgcccccgaucaaggacuucggcggguucaacuucagccagauccugcccgaccccuccaagcccagcaagcgguccuucaucgaggaccuccuguucaacaaggugacccuggccgacgccggcuucaucaagcaguacggcgacugccucggggacaucgcggcccgcgaccugaucugcgcccagaaguucaacggccugaccgugcucccgccccugcugaccgacgagaugaucgcccaguacaccagcgcccuccuggcggggaccaucacguccggcuggaccuucugcgccggcgccgcccugcagauccccuucgcgaugcagauggccuaccgguucaacggcaucggggucacccagaacgugcucuacgagaaccagaagcugaucgccaaccaguucaacagcgccaucggcaagauccaggacucccugagcuccaccgccagcgcgcucgggaagcugcaggacguggucaaccagaacgcccaggcccugaacacgcucgugaagcagcuguccagcaacuucggcgccaucuccagcgugcugaacgacauccucucccgccuggacaaggucgaggccgaggugcagaucgaccggcugaucaccgggcgccuccagagccugcagaccuacgugacccagcagcugauccgggcggccgagauccgcgccagcgccaaccucgccgcgaccaagauguccgagugcgucugcggccagagcaagcggguggacuucugcggcaagggguaccaccugauguccuucccccagagcgccccgcacggcguggucuuccuccacgugacguacguccccgcccaggagaagaacuucaccaccgcccccgcgaucugccacgacgggaaggcccacuucccccgcgagggcguguucguguccaacgggacccacugguucgucacgcagcggaacuucuacgagccgcagaucaucaccaccgacaacaccuucgugagcggcaacugcgacguggucaucggcaucgugaacaacacgguguacgacccccugcagcccgagcuggacuccggcgggagcggcuacauccccgaggccccgcgcgacgggcaggccuacgugcggaaggacggcgaguggguccugcucagcaccuuccuguga

SEQ ID NO: 11946 - RNA, 3534 nt, Artificial Sequence
  SARS-CoV-2/Wuhan/WIV05/2019__EPI_ISL_402128 spike protein CDS gc (1-1147)(I909C_Y1047C) Foldon construct
auguucguguuccugguccuccugccccuggugagcucccagugcgugaaccucaccacccgcacgcagcugccgcccgccuacaccaacagcuucacccggggcgucuacuaccccgacaagguguuccgcuccagcgugcugcacuccacccaggaccucuuccugcccuucuucagcaacgucacgugguuccacgccauccacguguccgggaccaacggcaccaagcgguucgacaacccggugcugcccuucaacgacggggucuacuucgcgagcaccgagaaguccaacaucauccgcggcuggaucuucgggacgacccucgacagcaagacccagucccugcugaucgugaacaacgccaccaacguggucaucaaggugugcgaguuccaguucugcaacgaccccuuccucggcguguacuaccacaagaacaacaagagcuggauggaguccgaguuccgggucuacagcuccgccaacaacugcacguucgaguacgugagccagcccuuccugauggaccuggagggcaagcaggggaacuucaagaaccuccgcgaguucguguucaagaacaucgacggcuacuucaagaucuacuccaagcacaccccgaucaaccugguccgggaccugccccagggguucagcgcccucgagccccugguggaccugcccaucggcaucaacaucacccgcuuccagacccuccuggcccugcaccgguccuaccucacgccgggggacagcagcuccggcuggaccgcgggcgccgccgccuacuacgugggguaccugcagccccgcaccuuccugcucaaguacaacgagaacggcaccaucacggacgcggucgacugcgcccuggacccccugagcgagaccaagugcacccucaaguccuucaccguggagaaggggaucuaccagacgagcaacuuccgggugcagcccaccgaguccaucguccgcuucccgaacaucaccaaccugugccccuucggcgagguguucaacgccacccgguucgccagcgucuacgccuggaaccgcaagcggaucuccaacugcguggcggacuacagcgugcuguacaacuccgccagcuucuccacguucaagugcuacggcgucagccccaccaagcucaacgaccugugcuucaccaacguguacgccgacuccuucgugauccgcggggacgagguccggcagaucgcccccggccagaccgggaagaucgccgacuacaacuacaagcugccggacgacuucacgggcugcgugaucgcguggaacagcaacaaccucgacuccaaggucgggggcaacuacaacuaccuguaccgccuguuccgcaagagcaaccucaagcccuucgagcgggacaucuccaccgagaucuaccaggccggcagcacccccugcaacgggguggagggcuucaacugcuacuucccccugcaguccuacggguuccagccgaccaacggcgugggguaccagcccuaccggguggucgugcugagcuucgagcuccugcacgcccccgccacggugugcggccccaagaaguccaccaaccuggucaagaacaagugcgugaacuucaacuucaacggccucaccgggaccggcgugcugaccgagagcaacaagaaguuccugccguuccagcaguucgggcgcgacaucgccgacacgaccgacgcgguccgcgacccccagacccuggagauccucgacaucacccccugcagcuucggcgggguguccgugaucacgccgggcaccaacaccagcaaccaggucgccgugcuguaccaggacgugaacugcaccgagguccccguggccauccacgccgaccagcugacgcccaccuggcggguguacuccaccggcagcaacgucuuccagacccgcgccgggugccucaucggcgcggagcacgugaacaacuccuacgagugcgacauccccaucggggccggcaucugcgccagcuaccagacgcagaccaacuccccgcggcgcgcccggagcguggcgucccagagcaucaucgccuacaccaugucccugggcgccgagaacagcgucgccuacuccaacaacagcaucgccauccccaccaacuucacgaucuccgugaccaccgagauccugcccgugagcaugaccaagacgagcgucgacugcaccauguacaucugcggggacuccaccgagugcagcaaccuccugcugcaguacggcuccuucugcacccagcucaaccgcgcgcugacggggaucgccguggagcaggacaagaacacccaggagguguucgcccaggucaagcagaucuacaagacgcccccgaucaaggacuucggcggguucaacuucagccagauccugcccgaccccuccaagcccagcaagcgguccuucaucgaggaccuccuguucaacaaggugacccuggccgacgccggcuucaucaagcaguacggcgacugccucggggacaucgcggcccgcgaccugaucugcgcccagaaguucaacggccugaccgugcucccgccccugcugaccgacgagaugaucgcccaguacaccagcgcccuccuggcggggaccaucacguccggcuggaccuucggggccggcgccgcccugcagauccccuucgcgaugcagauggccuaccgguucaacggcugcggggucacccagaacgugcucuacgagaaccagaagcugaucgccaaccaguucaacagcgccaucggcaagauccaggacucccugagcuccaccgccagcgcgcucgggaagcugcaggacguggucaaccagaacgcccaggcccugaacacgcucgugaagcagcuguccagcaacuucggcgccaucuccagcgugcugaacgacauccucucccgccuggacaaggucgaggccgaggugcagaucgaccggcugaucaccgggcgccuccagagccugcagaccuacgugacccagcagcugauccgggcggccgagauccgcgccagcgccaaccucgccgcgaccaagauguccgagugcguccugggccagagcaagcggguggacuucugcggcaaggggugccaccugauguccuucccccagagcgccccgcacggcguggucuuccuccacgugacguacguccccgcccaggagaagaacuucaccaccgcccccgcgaucugccacgacgggaaggcccacuucccccgcgagggcguguucguguccaacgggacccacugguucgucacgcagcggaacuucuacgagccgcagaucaucaccaccgacaacaccuucgugagcggcaacugcgacguggucaucggcaucgugaacaacacgguguacgacccccugcagcccgagcuggacuccggcgggagcggcuacauccccgaggccccgcgcgacgggcaggccuacgugcggaaggacggcgaguggguccugcucagcaccuuccuguga

SEQ ID NO: 11947 - RNA, 3534 nt, Artificial Sequence
  SARS-CoV-2/Wuhan/WIV05/2019__EPI_ISL_402128 spike protein CDS gc (1-1147)(Q965C_S1003C) Foldon construct
auguucguguuccugguccuccugccccuggugagcucccagugcgugaaccucaccacccgcacgcagcugccgcccgccuacaccaacagcuucacccggggcgucuacuaccccgacaagguguuccgcuccagcgugcugcacuccacccaggaccucuuccugcccuucuucagcaacgucacgugguuccacgccauccacguguccgggaccaacggcaccaagcgguucgacaacccggugcugcccuucaacgacggggucuacuucgcgagcaccgagaaguccaacaucauccgcggcuggaucuucgggacgacccucgacagcaagacccagucccugcugaucgugaacaacgccaccaacguggucaucaaggugugcgaguuccaguucugcaacgaccccuuccucggcguguacuaccacaagaacaacaagagcuggauggaguccgaguuccgggucuacagcuccgccaacaacugcacguucgaguacgugagccagcccuuccugauggaccuggagggcaagcaggggaacuucaagaaccuccgcgaguucguguucaagaacaucgacggcuacuucaagaucuacuccaagcacaccccgaucaaccugguccgggaccugccccagggguucagcgcccucgagccccugguggaccugcccaucggcaucaacaucacccgcuuccagacccuccuggcccugcaccgguccuaccucacgccgggggacagcagcuccggcuggaccgcgggcgccgccgccuacuacgugggguaccugcagccccgcaccuuccugcucaaguacaacgagaacggcaccaucacggacgcggucgacugcgcccuggacccccugagcgagaccaagugcacccucaaguccuucaccguggagaaggggaucuaccagacgagcaacuuccgggugcagcccaccgaguccaucguccgcuucccgaacaucaccaaccugugccccuucggcgagguguucaacgccacccgguucgccagcgucuacgccuggaaccgcaagcggaucuccaacugcguggcggacuacagcgugcuguacaacuccgccagcuucuccacguucaagugcuacggcgucagccccaccaagcucaacgaccugugcuucaccaacguguacgccgacuccuucgugauccgcggggacgagguccggcagaucgcccccggccagaccgggaagaucgccgacuacaacuacaagcugccggacgacuucacgggcugcgugaucgcguggaacagcaacaaccucgacuccaaggucgggggcaacuacaacuaccuguaccgccuguuccgcaagagcaaccucaagcccuucgagcgggacaucuccaccgagaucuaccaggccggcagcacccccugcaacgggguggagggcuucaacugcuacuucccccugcaguccuacggguuccagccgaccaacggcgugggguaccagcccuaccggguggucgugcugagcuucgagcuccugcacgcccccgccacggugugcggccccaagaaguccaccaaccuggucaagaacaagugcgugaacuucaacuucaacggccucaccgggaccggcgugcugaccgagagcaacaagaaguuccugccguuccagcaguucgggcgcgacaucgccgacacgaccgacgcgguccgcgacccccagacccuggagauccucgacaucacccccugcagcuucggcgggguguccgugaucacgccgggcaccaacaccagcaaccaggucgccgugcuguaccaggacgugaacugcaccgagguccccguggccauccacgccgaccagcugacgcccaccuggcggguguacuccaccggcagcaacgucuuccagacccgcgccgggugccucaucggcgcggagcacgugaacaacuccuacgagugcgacauccccaucggggccggcaucugcgccagcuaccagacgcagaccaacuccccgcggcgcgcccggagcguggcgucccagagcaucaucgccuacaccaugucccugggcgccgagaacagcgucgccuacuccaacaacagcaucgccauccccaccaacuucacgaucuccgugaccaccgagauccugcccgugagcaugaccaagacgagcgucgacugcaccauguacaucugcggggacuccaccgagugcagcaaccuccugcugcaguacggcuccuucugcacccagcucaaccgcgcgcugacggggaucgccguggagcaggacaagaacacccaggagguguucgcccaggucaagcagaucuacaagacgcccccgaucaaggacuucggcggguucaacuucagccagauccugcccgaccccuccaagcccagcaagcgguccuucaucgaggaccuccuguucaacaaggugacccuggccgacgccggcuucaucaagcaguacggcgacugccucggggacaucgcggcccgcgaccugaucugcgcccagaaguucaacggccugaccgugcucccgccccugcugaccgacgagaugaucgcccaguacaccagcgcccuccuggcggggaccaucacguccggcuggaccuucggggccggcgccgcccugcagauccccuucgcgaugcagauggccuaccgguucaacggcaucggggucacccagaacgugcucuacgagaaccagaagcugaucgccaaccaguucaacagcgccaucggcaagauccaggacucccugagcuccaccgccagcgcgcucgggaagcugcaggacguggucaaccagaacgcccaggcccugaacacgcucgugaagugccuguccagcaacuucggcgccaucuccagcgugcugaacgacauccucucccgccuggacaaggucgaggccgaggugcagaucgaccggcugaucaccgggcgccuccagugccugcagaccuacgugacccagcagcugauccgggcggccgagauccgcgccagcgccaaccucgccgcgaccaagauguccgagugcguccugggccagagcaagcggguggacuucugcggcaagggguaccaccugauguccuucccccagagcgccccgcacggcguggucuuccuccacgugacguacguccccgcccaggagaagaacuucaccaccgcccccgcgaucugccacgacgggaaggcccacuucccccgcgagggcguguucguguccaacgggacccacugguucgucacgcagcggaacuucuacgagccgcagaucaucaccaccgacaacaccuucgugagcggcaacugcgacguggucaucggcaucgugaacaacacgguguacgacccccugcagcccgagcuggacuccggcgggagcggcuacauccccgaggccccgcgcgacgggcaggccuacgugcggaaggacggcgaguggguccugcucagcaccuuccuguga

SEQ ID NO: 11948 - RNA, 3534 nt, Artificial Sequence
  SARS-CoV-2/Wuhan/WIV05/2019__EPI_ISL_402128 spike protein CDS gc (1-1147)(F970C_G999C) Foldon construct
auguucguguuccugguccuccugccccuggugagcucccagugcgugaaccucaccacccgcacgcagcugccgcccgccuacaccaacagcuucacccggggcgucuacuaccccgacaagguguuccgcuccagcgugcugcacuccacccaggaccucuuccugcccuucuucagcaacgucacgugguuccacgccauccacguguccgggaccaacggcaccaagcgguucgacaacccggugcugcccuucaacgacggggucuacuucgcgagcaccgagaaguccaacaucauccgcggcuggaucuucgggacgacccucgacagcaagacccagucccugcugaucgugaacaacgccaccaacguggucaucaaggugugcgaguuccaguucugcaacgaccccuuccucggcguguacuaccacaagaacaacaagagcuggauggaguccgaguuccgggucuacagcuccgccaacaacugcacguucgaguacgugagccagcccuuccugauggaccuggagggcaagcaggggaacuucaagaaccuccgcgaguucguguucaagaacaucgacggcuacuucaagaucuacuccaagcacaccccgaucaaccugguccgggaccugccccagggguucagcgcccucgagccccugguggaccugcccaucggcaucaacaucacccgcuuccagacccuccuggcccugcaccgguccuaccucacgccgggggacagcagcuccggcuggaccgcgggcgccgccgccuacuacgugggguaccugcagccccgcaccuuccugcucaaguacaacgagaacggcaccaucacggacgcggucgacugcgcccuggacccccugagcgagaccaagugcacccucaaguccuucaccguggagaaggggaucuaccagacgagcaacuuccgggugcagcccaccgaguccaucguccgcuucccgaacaucaccaaccugugccccuucggcgagguguucaacgccacccgguucgccagcgucuacgccuggaaccgcaagcggaucuccaacugcguggcggacuacagcgugcuguacaacuccgccagcuucuccacguucaagugcuacggcgucagccccaccaagcucaacgaccugugcuucaccaacguguacgccgacuccuucgugauccgcggggacgagguccggcagaucgcccccggccagaccgggaagaucgccgacuacaacuacaagcugccggacgacuucacgggcugcgugaucgcguggaacagcaacaaccucgacuccaaggucgggggcaacuacaacuaccuguaccgccuguuccgcaagagcaaccucaagcccuucgagcgggacaucuccaccgagaucuaccaggccggcagcacccccugcaacgggguggagggcuucaacugcuacuucccccugcaguccuacggguuccagccgaccaacggcgugggguaccagcccuaccggguggucgugcugagcuucgagcuccugcacgcccccgccacggugugcggccccaagaaguccaccaaccuggucaagaacaagugcgugaacuucaacuucaacggccucaccgggaccggcgugcugaccgagagcaacaagaaguuccugccguuccagcaguucgggcgcgacaucgccgacacgaccgacgcgguccgcgacccccagacccuggagauccucgacaucacccccugcagcuucggcgggguguccgugaucacgccgggcaccaacaccagcaaccaggucgccgugcuguaccaggacgugaacugcaccgagguccccguggccauccacgccgaccagcugacgcccaccuggcggguguacuccaccggcagcaacgucuuccagacccgcgccgggugccucaucggcgcggagcacgugaacaacuccuacgagugcgacauccccaucggggccggcaucugcgccagcuaccagacgcagaccaacuccccgcggcgcgcccggagcguggcgucccagagcaucaucgccuacaccaugucccugggcgccgagaacagcgucgccuacuccaacaacagcaucgccauccccaccaacuucacgaucuccgugaccaccgagauccugcccgugagcaugaccaagacgagcgucgacugcaccauguacaucugcggggacuccaccgagugcagcaaccuccugcugcaguacggcuccuucugcacccagcucaaccgcgcgcugacggggaucgccguggagcaggacaagaacacccaggagguguucgcccaggucaagcagaucuacaagacgcccccgaucaaggacuucggcggguucaacuucagccagauccugcccgaccccuccaagcccagcaagcgguccuucaucgaggaccuccuguucaacaaggugacccuggccgacgccggcuucaucaagcaguacggcgacugccucggggacaucgcggcccgcgaccugaucugcgcccagaaguucaacggccugaccgugcucccgccccugcugaccgacgagaugaucgcccaguacaccagcgcccuccuggcggggaccaucacguccggcuggaccuucggggccggcgccgcccugcagauccccuucgcgaugcagauggccuaccgguucaacggcaucggggucacccagaacgugcucuacgagaaccagaagcugaucgccaaccaguucaacagcgccaucggcaagauccaggacucccugagcuccaccgccagcgcgcucgggaagcugcaggacguggucaaccagaacgcccaggcccugaacacgcucgugaagcagcuguccagcaacugcggcgccaucuccagcgugcugaacgacauccucucccgccuggacaaggucgaggccgaggugcagaucgaccggcugaucaccugucgccuccagagccugcagaccuacgugacccagcagcugauccgggcggccgagauccgcgccagcgccaaccucgccgcgaccaagauguccgagugcguccugggccagagcaagcggguggacuucugcggcaagggguaccaccugauguccuucccccagagcgccccgcacggcguggucuuccuccacgugacguacguccccgcccaggagaagaacuucaccaccgcccccgcgaucugccacgacgggaaggcccacuucccccgcgagggcguguucguguccaacgggacccacugguucgucacgcagcggaacuucuacgagccgcagaucaucaccaccgacaacaccuucgugagcggcaacugcgacguggucaucggcaucgugaacaacacgguguacgacccccugcagcccgagcuggacuccggcgggagcggcuacauccccgaggccccgcgcgacgggcaggccuacgugcggaaggacggcgaguggguccugcucagcaccuuccuguga

SEQ ID NO: 11949 - RNA, 3534 nt, Artificial Sequence
  SARS-CoV-2/Wuhan/WIV05/2019__EPI_ISL_402128 spike protein CDS gc (1-1147)(A972C_R995C) Foldon construct
auguucguguuccugguccuccugccccuggugagcucccagugcgugaaccucaccacccgcacgcagcugccgcccgccuacaccaacagcuucacccggggcgucuacuaccccgacaagguguuccgcuccagcgugcugcacuccacccaggaccucuuccugcccuucuucagcaacgucacgugguuccacgccauccacguguccgggaccaacggcaccaagcgguucgacaacccggugcugcccuucaacgacggggucuacuucgcgagcaccgagaaguccaacaucauccgcggcuggaucuucgggacgacccucgacagcaagacccagucccugcugaucgugaacaacgccaccaacguggucaucaaggugugcgaguuccaguucugcaacgaccccuuccucggcguguacuaccacaagaacaacaagagcuggauggaguccgaguuccgggucuacagcuccgccaacaacugcacguucgaguacgugagccagcccuuccugauggaccuggagggcaagcaggggaacuucaagaaccuccgcgaguucguguucaagaacaucgacggcuacuucaagaucuacuccaagcacaccccgaucaaccugguccgggaccugccccagggguucagcgcccucgagccccugguggaccugcccaucggcaucaacaucacccgcuuccagacccuccuggcccugcaccgguccuaccucacgccgggggacagcagcuccggcuggaccgcgggcgccgccgccuacuacgugggguaccugcagccccgcaccuuccugcucaaguacaacgagaacggcaccaucacggacgcggucgacugcgcccuggacccccugagcgagaccaagugcacccucaaguccuucaccguggagaaggggaucuaccagacgagcaacuuccgggugcagcccaccgaguccaucguccgcuucccgaacaucaccaaccugugccccuucggcgagguguucaacgccacccgguucgccagcgucuacgccuggaaccgcaagcggaucuccaacugcguggcggacuacagcgugcuguacaacuccgccagcuucuccacguucaagugcuacggcgucagccccaccaagcucaacgaccugugcuucaccaacguguacgccgacuccuucgugauccgcggggacgagguccggcagaucgcccccggccagaccgggaagaucgccgacuacaacuacaagcugccggacgacuucacgggcugcgugaucgcguggaacagcaacaaccucgacuccaaggucgggggcaacuacaacuaccuguaccgccuguuccgcaagagcaaccucaagcccuucgagcgggacaucuccaccgagaucuaccaggccggcagcacccccugcaacgggguggagggcuucaacugcuacuucccccugcaguccuacggguuccagccgaccaacggcgugggguaccagcccuaccggguggucgugcugagcuucgagcuccugcacgcccccgccacggugugcggccccaagaaguccaccaaccuggucaagaacaagugcgugaacuucaacuucaacggccucaccgggaccggcgugcugaccgagagcaacaagaaguuccugccguuccagcaguucgggcgcgacaucgccgacacgaccgacgcgguccgcgacccccagacccuggagauccucgacaucacccccugcagcuucggcgggguguccgugaucacgccgggcaccaacaccagcaaccaggucgccgugcuguaccaggacgugaacugcaccgagguccccguggccauccacgccgaccagcugacgcccaccuggcggguguacuccaccggcagcaacgucuuccagacccgcgccgggugccucaucggcgcggagcacgugaacaacuccuacgagugcgacauccccaucggggccggcaucugcgccagcuaccagacgcagaccaacuccccgcggcgcgcccggagcguggcgucccagagcaucaucgccuacaccaugucccugggcgccgagaacagcgucgccuacuccaacaacagcaucgccauccccaccaacuucacgaucuccgugaccaccgagauccugcccgugagcaugaccaagacgagcgucgacugcaccauguacaucugcggggacuccaccgagugcagcaaccuccugcugcaguacggcuccuucugcacccagcucaaccgcgcgcugacggggaucgccguggagcaggacaagaacacccaggagguguucgcccaggucaagcagaucuacaagacgcccccgaucaaggacuucggcggguucaacuucagccagauccugcccgaccccuccaagcccagcaagcgguccuucaucgaggaccuccuguucaacaaggugacccuggccgacgccggcuucaucaagcaguacggcgacugccucggggacaucgcggcccgcgaccugaucugcgcccagaaguucaacggccugaccgugcucccgccccugcugaccgacgagaugaucgcccaguacaccagcgcccuccuggcggggaccaucacguccggcuggaccuucggggccggcgccgcccugcagauccccuucgcgaugcagauggccuaccgguucaacggcaucggggucacccagaacgugcucuacgagaaccagaagcugaucgccaaccaguucaacagcgccaucggcaagauccaggacucccugagcuccaccgccagcgcgcucgggaagcugcaggacguggucaaccagaacgcccaggcccugaacacgcucgugaagcagcuguccagcaacuucggcugcaucuccagcgugcugaacgacauccucucccgccuggacaaggucgaggccgaggugcagaucgacugccugaucaccgggcgccuccagagccugcagaccuacgugacccagcagcugauccgggcggccgagauccgcgccagcgccaaccucgccgcgaccaagauguccgagugcguccugggccagagcaagcggguggacuucugcggcaagggguaccaccugauguccuucccccagagcgccccgcacggcguggucuuccuccacgugacguacguccccgcccaggagaagaacuucaccaccgcccccgcgaucugccacgacgggaaggcccacuucccccgcgagggcguguucguguccaacgggacccacugguucgucacgcagcggaacuucuacgagccgcagaucaucaccaccgacaacaccuucgugagcggcaacugcgacguggucaucggcaucgugaacaacacgguguacgacccccugcagcccgagcuggacuccggcgggagcggcuacauccccgaggccccgcgcgacgggcaggccuacgugcggaaggacggcgaguggguccugcucagcaccuuccuguga

SEQ ID NO: 11950 - RNA, 3534 nt, Artificial Sequence
  SARS-CoV-2/Wuhan/WIV05/2019__EPI_ISL_402128 spike protein CDS gc (1-1147)(A890C_V1040C) Foldon construct
auguucguguuccugguccuccugccccuggugagcucccagugcgugaaccucaccacccgcacgcagcugccgcccgccuacaccaacagcuucacccggggcgucuacuaccccgacaagguguuccgcuccagcgugcugcacuccacccaggaccucuuccugcccuucuucagcaacgucacgugguuccacgccauccacguguccgggaccaacggcaccaagcgguucgacaacccggugcugcccuucaacgacggggucuacuucgcgagcaccgagaaguccaacaucauccgcggcuggaucuucgggacgacccucgacagcaagacccagucccugcugaucgugaacaacgccaccaacguggucaucaaggugugcgaguuccaguucugcaacgaccccuuccucggcguguacuaccacaagaacaacaagagcuggauggaguccgaguuccgggucuacagcuccgccaacaacugcacguucgaguacgugagccagcccuuccugauggaccuggagggcaagcaggggaacuucaagaaccuccgcgaguucguguucaagaacaucgacggcuacuucaagaucuacuccaagcacaccccgaucaaccugguccgggaccugccccagggguucagcgcccucgagccccugguggaccugcccaucggcaucaacaucacccgcuuccagacccuccuggcccugcaccgguccuaccucacgccgggggacagcagcuccggcuggaccgcgggcgccgccgccuacuacgugggguaccugcagccccgcaccuuccugcucaaguacaacgagaacggcaccaucacggacgcggucgacugcgcccuggacccccugagcgagaccaagugcacccucaaguccuucaccguggagaaggggaucuaccagacgagcaacuuccgggugcagcccaccgaguccaucguccgcuucccgaacaucaccaaccugugccccuucggcgagguguucaacgccacccgguucgccagcgucuacgccuggaaccgcaagcggaucuccaacugcguggcggacuacagcgugcuguacaacuccgccagcuucuccacguucaagugcuacggcgucagccccaccaagcucaacgaccugugcuucaccaacguguacgccgacuccuucgugauccgcggggacgagguccggcagaucgcccccggccagaccgggaagaucgccgacuacaacuacaagcugccggacgacuucacgggcugcgugaucgcguggaacagcaacaaccucgacuccaaggucgggggcaacuacaacuaccuguaccgccuguuccgcaagagcaaccucaagcccuucgagcgggacaucuccaccgagaucuaccaggccggcagcacccccugcaacgggguggagggcuucaacugcuacuucccccugcaguccuacggguuccagccgaccaacggcgugggguaccagcccuaccggguggucgugcugagcuucgagcuccugcacgcccccgccacggugugcggccccaagaaguccaccaaccuggucaagaacaagugcgugaacuucaacuucaacggccucaccgggaccggcgugcugaccgagagcaacaagaaguuccugccguuccagcaguucgggcgcgacaucgccgacacgaccgacgcgguccgcgacccccagacccuggagauccucgacaucacccccugcagcuucggcgggguguccgugaucacgccgggcaccaacaccagcaaccaggucgccgugcuguaccaggacgugaacugcaccgagguccccguggccauccacgccgaccagcugacgcccaccuggcggguguacuccaccggcagcaacgucuuccagacccgcgccgggugccucaucggcgcggagcacgugaacaacuccuacgagugcgacauccccaucggggccggcaucugcgccagcuaccagacgcagaccaacuccccgcggcgcgcccggagcguggcgucccagagcaucaucgccuacaccaugucccugggcgccgagaacagcgucgccuacuccaacaacagcaucgccauccccaccaacuucacgaucuccgugaccaccgagauccugcccgugagcaugaccaagacgagcgucgacugcaccauguacaucugcggggacuccaccgagugcagcaaccuccugcugcaguacggcuccuucugcacccagcucaaccgcgcgcugacggggaucgccguggagcaggacaagaacacccaggagguguucgcccaggucaagcagaucuacaagacgcccccgaucaaggacuucggcggguucaacuucagccagauccugcccgaccccuccaagcccagcaagcgguccuucaucgaggaccuccuguucaacaaggugacccuggccgacgccggcuucaucaagcaguacggcgacugccucggggacaucgcggcccgcgaccugaucugcgcccagaaguucaacggccugaccgugcucccgccccugcugaccgacgagaugaucgcccaguacaccagcgcccuccuggcggggaccaucacguccggcuggaccuucgggugcggcgccgcccugcagauccccuucgcgaugcagauggccuaccgguucaacggcaucggggucacccagaacgugcucuacgagaaccagaagcugaucgccaaccaguucaacagcgccaucggcaagauccaggacucccugagcuccaccgccagcgcgcucgggaagcugcaggacguggucaaccagaacgcccaggcccugaacacgcucgugaagcagcuguccagcaacuucggcgccaucuccagcgugcugaacgacauccucucccgccuggacaaggucgaggccgaggugcagaucgaccggcugaucaccgggcgccuccagagccugcagaccuacgugacccagcagcugauccgggcggccgagauccgcgccagcgccaaccucgccgcgaccaagauguccgagugcguccugggccagagcaagcggugcgacuucugcggcaagggguaccaccugauguccuucccccagagcgccccgcacggcguggucuuccuccacgugacguacguccccgcccaggagaagaacuucaccaccgcccccgcgaucugccacgacgggaaggcccacuucccccgcgagggcguguucguguccaacgggacccacugguucgucacgcagcggaacuucuacgagccgcagaucaucaccaccgacaacaccuucgugagcggcaacugcgacguggucaucggcaucgugaacaacacgguguacgacccccugcagcccgagcuggacuccggcgggagcggcuacauccccgaggccccgcgcgacgggcaggccuacgugcggaaggacggcgaguggguccugcucagcaccuuccuguga

SEQ ID NO: 11951 - RNA, 3534 nt, Artificial Sequence
  SARS-CoV-2/Wuhan/WIV05/2019__EPI_ISL_402128 spike protein CDS gc (1-1147)(T874C_S1055C) Foldon construct
auguucguguuccugguccuccugccccuggugagcucccagugcgugaaccucaccacccgcacgcagcugccgcccgccuacaccaacagcuucacccggggcgucuacuaccccgacaagguguuccgcuccagcgugcugcacuccacccaggaccucuuccugcccuucuucagcaacgucacgugguuccacgccauccacguguccgggaccaacggcaccaagcgguucgacaacccggugcugcccuucaacgacggggucuacuucgcgagcaccgagaaguccaacaucauccgcggcuggaucuucgggacgacccucgacagcaagacccagucccugcugaucgugaacaacgccaccaacguggucaucaaggugugcgaguuccaguucugcaacgaccccuuccucggcguguacuaccacaagaacaacaagagcuggauggaguccgaguuccgggucuacagcuccgccaacaacugcacguucgaguacgugagccagcccuuccugauggaccuggagggcaagcaggggaacuucaagaaccuccgcgaguucguguucaagaacaucgacggcuacuucaagaucuacuccaagcacaccccgaucaaccugguccgggaccugccccagggguucagcgcccucgagccccugguggaccugcccaucggcaucaacaucacccgcuuccagacccuccuggcccugcaccgguccuaccucacgccgggggacagcagcuccggcuggaccgcgggcgccgccgccuacuacgugggguaccugcagccccgcaccuuccugcucaaguacaacgagaacggcaccaucacggacgcggucgacugcgcccuggacccccugagcgagaccaagugcacccucaaguccuucaccguggagaaggggaucuaccagacgagcaacuuccgggugcagcccaccgaguccaucguccgcuucccgaacaucaccaaccugugccccuucggcgagguguucaacgccacccgguucgccagcgucuacgccuggaaccgcaagcggaucuccaacugcguggcggacuacagcgugcuguacaacuccgccagcuucuccacguucaagugcuacggcgucagccccaccaagcucaacgaccugugcuucaccaacguguacgccgacuccuucgugauccgcggggacgagguccggcagaucgcccccggccagaccgggaagaucgccgacuacaacuacaagcugccggacgacuucacgggcugcgugaucgcguggaacagcaacaaccucgacuccaaggucgggggcaacuacaacuaccuguaccgccuguuccgcaagagcaaccucaagcccuucgagcgggacaucuccaccgagaucuaccaggccggcagcacccccugcaacgggguggagggcuucaacugcuacuucccccugcaguccuacggguuccagccgaccaacggcgugggguaccagcccuaccggguggucgugcugagcuucgagcuccugcacgcccccgccacggugugcggccccaagaaguccaccaaccuggucaagaacaagugcgugaacuucaacuucaacggccucaccgggaccggcgugcugaccgagagcaacaagaaguuccugccguuccagcaguucgggcgcgacaucgccgacacgaccgacgcgguccgcgacccccagacccuggagauccucgacaucacccccugcagcuucggcgggguguccgugaucacgccgggcaccaacaccagcaaccaggucgccgugcuguaccaggacgugaacugcaccgagguccccguggccauccacgccgaccagcugacgcccaccuggcggguguacuccaccggcagcaacgucuuccagacccgcgccgggugccucaucggcgcggagcacgugaacaacuccuacgagugcgacauccccaucggggccggcaucugcgccagcuaccagacgcagaccaacuccccgcggcgcgcccggagcguggcgucccagagcaucaucgccuacaccaugucccugggcgccgagaacagcgucgccuacuccaacaacagcaucgccauccccaccaacuucacgaucuccgugaccaccgagauccugcccgugagcaugaccaagacgagcgucgacugcaccauguacaucugcggggacuccaccgagugcagcaaccuccugcugcaguacggcuccuucugcacccagcucaaccgcgcgcugacggggaucgccguggagcaggacaagaacacccaggagguguucgcccaggucaagcagaucuacaagacgcccccgaucaaggacuucggcggguucaacuucagccagauccugcccgaccccuccaagcccagcaagcgguccuucaucgaggaccuccuguucaacaaggugacccuggccgacgccggcuucaucaagcaguacggcgacugccucggggacaucgcggcccgcgaccugaucugcgcccagaaguucaacggccugaccgugcucccgccccugcugaccgacgagaugaucgcccaguacugcagcgcccuccuggcggggaccaucacguccggcuggaccuucggggccggcgccgcccugcagauccccuucgcgaugcagauggccuaccgguucaacggcaucggggucacccagaacgugcucuacgagaaccagaagcugaucgccaaccaguucaacagcgccaucggcaagauccaggacucccugagcuccaccgccagcgcgcucgggaagcugcaggacguggucaaccagaacgcccaggcccugaacacgcucgugaagcagcuguccagcaacuucggcgccaucuccagcgugcugaacgacauccucucccgccuggacaaggucgaggccgaggugcagaucgaccggcugaucaccgggcgccuccagagccugcagaccuacgugacccagcagcugauccgggcggccgagauccgcgccagcgccaaccucgccgcgaccaagauguccgagugcguccugggccagagcaagcggguggacuucugcggcaagggguaccaccugauguccuucccccagugcgccccgcacggcguggucuuccuccacgugacguacguccccgcccaggagaagaacuucaccaccgcccccgcgaucugccacgacgggaaggcccacuucccccgcgagggcguguucguguccaacgggacccacugguucgucacgcagcggaacuucuacgagccgcagaucaucaccaccgacaacaccuucgugagcggcaacugcgacguggucaucggcaucgugaacaacacgguguacgacccccugcagcccgagcuggacuccggcgggagcggcuacauccccgaggccccgcgcgacgggcaggccuacgugcggaaggacggcgaguggguccugcucagcaccuuccuguga

SEQ ID NO: 11952 - RNA, 3906 nt, Artificial Sequence
  SARS-CoV-2/Wuhan/WIV05/2019__EPI_ISL_402128 spike protein CDS gc (1-1147) WhcAg construct
auguucguguuccugguccuccugccccuggugagcucccagugcgugaaccucaccacccgcacgcagcugccgcccgccuacaccaacagcuucacccggggcgucuacuaccccgacaagguguuccgcuccagcgugcugcacuccacccaggaccucuuccugcccuucuucagcaacgucacgugguuccacgccauccacguguccgggaccaacggcaccaagcgguucgacaacccggugcugcccuucaacgacggggucuacuucgcgagcaccgagaaguccaacaucauccgcggcuggaucuucgggacgacccucgacagcaagacccagucccugcugaucgugaacaacgccaccaacguggucaucaaggugugcgaguuccaguucugcaacgaccccuuccucggcguguacuaccacaagaacaacaagagcuggauggaguccgaguuccgggucuacagcuccgccaacaacugcacguucgaguacgugagccagcccuuccugauggaccuggagggcaagcaggggaacuucaagaaccuccgcgaguucguguucaagaacaucgacggcuacuucaagaucuacuccaagcacaccccgaucaaccugguccgggaccugccccagggguucagcgcccucgagccccugguggaccugcccaucggcaucaacaucacccgcuuccagacccuccuggcccugcaccgguccuaccucacgccgggggacagcagcuccggcuggaccgcgggcgccgccgccuacuacgugggguaccugcagccccgcaccuuccugcucaaguacaacgagaacggcaccaucacggacgcggucgacugcgcccuggacccccugagcgagaccaagugcacccucaaguccuucaccguggagaaggggaucuaccagacgagcaacuuccgggugcagcccaccgaguccaucguccgcuucccgaacaucaccaaccugugccccuucggcgagguguucaacgccacccgguucgccagcgucuacgccuggaaccgcaagcggaucuccaacugcguggcggacuacagcgugcuguacaacuccgccagcuucuccacguucaagugcuacggcgucagccccaccaagcucaacgaccugugcuucaccaacguguacgccgacuccuucgugauccgcggggacgagguccggcagaucgcccccggccagaccgggaagaucgccgacuacaacuacaagcugccggacgacuucacgggcugcgugaucgcguggaacagcaacaaccucgacuccaaggucgggggcaacuacaacuaccuguaccgccuguuccgcaagagcaaccucaagcccuucgagcgggacaucuccaccgagaucuaccaggccggcagcacccccugcaacgggguggagggcuucaacugcuacuucccccugcaguccuacggguuccagccgaccaacggcgugggguaccagcccuaccggguggucgugcugagcuucgagcuccugcacgcccccgccacggugugcggccccaagaaguccaccaaccuggucaagaacaagugcgugaacuucaacuucaacggccucaccgggaccggcgugcugaccgagagcaacaagaaguuccugccguuccagcaguucgggcgcgacaucgccgacacgaccgacgcgguccgcgacccccagacccuggagauccucgacaucacccccugcagcuucggcgggguguccgugaucacgccgggcaccaacaccagcaaccaggucgccgugcuguaccaggacgugaacugcaccgagguccccguggccauccacgccgaccagcugacgcccaccuggcggguguacuccaccggcagcaacgucuuccagacccgcgccgggugccucaucggcgcggagcacgugaacaacuccuacgagugcgacauccccaucggggccggcaucugcgccagcuaccagacgcagaccaacuccccgcggcgcgcccggagcguggcgucccagagcaucaucgccuacaccaugucccugggcgccgagaacagcgucgccuacuccaacaacagcaucgccauccccaccaacuucacgaucuccgugaccaccgagauccugcccgugagcaugaccaagacgagcgucgacugcaccauguacaucugcggggacuccaccgagugcagcaaccuccugcugcaguacggcuccuucugcacccagcucaaccgcgcgcugacggggaucgccguggagcaggacaagaacacccaggagguguucgcccaggucaagcagaucuacaagacgcccccgaucaaggacuucggcggguucaacuucagccagauccugcccgaccccuccaagcccagcaagcgguccuucaucgaggaccuccuguucaacaaggugacccuggccgacgccggcuucaucaagcaguacggcgacugccucggggacaucgcggcccgcgaccugaucugcgcccagaaguucaacggccugaccgugcucccgccccugcugaccgacgagaugaucgcccaguacaccagcgcccuccuggcggggaccaucacguccggcuggaccuucggggccggcgccgcccugcagauccccuucgcgaugcagauggccuaccgguucaacggcaucggggucacccagaacgugcucuacgagaaccagaagcugaucgccaaccaguucaacagcgccaucggcaagauccaggacucccugagcuccaccgccagcgcgcucgggaagcugcaggacguggucaaccagaacgcccaggcccugaacacgcucgugaagcagcuguccagcaacuucggcgccaucuccagcgugcugaacgacauccucucccgccuggacaaggucgaggccgaggugcagaucgaccggcugaucaccgggcgccuccagagccugcagaccuacgugacccagcagcugauccgggcggccgagauccgcgccagcgccaaccucgccgcgaccaagauguccgagugcguccugggccagagcaagcggguggacuucugcggcaagggguaccaccugauguccuucccccagagcgccccgcacggcguggucuuccuccacgugacguacguccccgcccaggagaagaacuucaccaccgcccccgcgaucugccacgacgggaaggcccacuucccccgcgagggcguguucguguccaacgggacccacugguucgucacgcagcggaacuucuacgagccgcagaucaucaccaccgacaacaccuucgugagcggcaacugcgacguggucaucggcaucgugaacaacacgguguacgacccccugcagcccgagcuggacuccggcgggggcgggagcgacaucgaccccuacaaggaguucggcagcuccuaccagcugcucaacuuccugccccuggacuucuuccccgaccucaacgcccugguggacaccgccaccgcgcuguacgaggaggagcucacggggcgcgagcacugcagcccccaccacaccgccauccggcaggcccuggucugcugggacgagcugaccaagcucaucgccuggauguccagcaacaucaccuccgagcagguccgcacgaucaucgugaaccacgucaacgacaccuggggccugaaggugcggcagagccugugguuccaccucuccugccugaccuucgggcagcacaccgugcaggaguuccuggucagcuucggcguguggauccgcacgcccgccccguaccggccgcccaacgcgccgauccucuccacccugccggagcacaccgugaucugcuga

SEQ ID NO: 11953 - RNA, 3906 nt, Artificial Sequence
  SARS-CoV-2/Wuhan/WIV05/2019__EPI_ISL_402128 spike protein CDS gc (1-1147)(K986P_V987P) WhcAg construct
auguucguguuccugguccuccugccccuggugagcucccagugcgugaaccucaccacccgcacgcagcugccgcccgccuacaccaacagcuucacccggggcgucuacuaccccgacaagguguuccgcuccagcgugcugcacuccacccaggaccucuuccugcccuucuucagcaacgucacgugguuccacgccauccacguguccgggaccaacggcaccaagcgguucgacaacccggugcugcccuucaacgacggggucuacuucgcgagcaccgagaaguccaacaucauccgcggcuggaucuucgggacgacccucgacagcaagacccagucccugcugaucgugaacaacgccaccaacguggucaucaaggugugcgaguuccaguucugcaacgaccccuuccucggcguguacuaccacaagaacaacaagagcuggauggaguccgaguuccgggucuacagcuccgccaacaacugcacguucgaguacgugagccagcccuuccugauggaccuggagggcaagcaggggaacuucaagaaccuccgcgaguucguguucaagaacaucgacggcuacuucaagaucuacuccaagcacaccccgaucaaccugguccgggaccugccccagggguucagcgcccucgagccccugguggaccugcccaucggcaucaacaucacccgcuuccagacccuccuggcccugcaccgguccuaccucacgccgggggacagcagcuccggcuggaccgcgggcgccgccgccuacuacgugggguaccugcagccccgcaccuuccugcucaaguacaacgagaacggcaccaucacggacgcggucgacugcgcccuggacccccugagcgagaccaagugcacccucaaguccuucaccguggagaaggggaucuaccagacgagcaacuuccgggugcagcccaccgaguccaucguccgcuucccgaacaucaccaaccugugccccuucggcgagguguucaacgccacccgguucgccagcgucuacgccuggaaccgcaagcggaucuccaacugcguggcggacuacagcgugcuguacaacuccgccagcuucuccacguucaagugcuacggcgucagccccaccaagcucaacgaccugugcuucaccaacguguacgccgacuccuucgugauccgcggggacgagguccggcagaucgcccccggccagaccgggaagaucgccgacuacaacuacaagcugccggacgacuucacgggcugcgugaucgcguggaacagcaacaaccucgacuccaaggucgggggcaacuacaacuaccuguaccgccuguuccgcaagagcaaccucaagcccuucgagcgggacaucuccaccgagaucuaccaggccggcagcacccccugcaacgggguggagggcuucaacugcuacuucccccugcaguccuacggguuccagccgaccaacggcgugggguaccagcccuaccggguggucgugcugagcuucgagcuccugcacgcccccgccacggugugcggccccaagaaguccaccaaccuggucaagaacaagugcgugaacuucaacuucaacggccucaccgggaccggcgugcugaccgagagcaacaagaaguuccugccguuccagcaguucgggcgcgacaucgccgacacgaccgacgcgguccgcgacccccagacccuggagauccucgacaucacccccugcagcuucggcgggguguccgugaucacgccgggcaccaacaccagcaaccaggucgccgugcuguaccaggacgugaacugcaccgagguccccguggccauccacgccgaccagcugacgcccaccuggcggguguacuccaccggcagcaacgucuuccagacccgcgccgggugccucaucggcgcggagcacgugaacaacuccuacgagugcgacauccccaucggggccggcaucugcgccagcuaccagacgcagaccaacuccccgcggcgcgcccggagcguggcgucccagagcaucaucgccuacaccaugucccugggcgccgagaacagcgucgccuacuccaacaacagcaucgccauccccaccaacuucacgaucuccgugaccaccgagauccugcccgugagcaugaccaagacgagcgucgacugcaccauguacaucugcggggacuccaccgagugcagcaaccuccugcugcaguacggcuccuucugcacccagcucaaccgcgcgcugacggggaucgccguggagcaggacaagaacacccaggagguguucgcccaggucaagcagaucuacaagacgcccccgaucaaggacuucggcggguucaacuucagccagauccugcccgaccccuccaagcccagcaagcgguccuucaucgaggaccuccuguucaacaaggugacccuggccgacgccggcuucaucaagcaguacggcgacugccucggggacaucgcggcccgcgaccugaucugcgcccagaaguucaacggccugaccgugcucccgccccugcugaccgacgagaugaucgcccaguacaccagcgcccuccuggcggggaccaucacguccggcuggaccuucggggccggcgccgcccugcagauccccuucgcgaugcagauggccuaccgguucaacggcaucggggucacccagaacgugcucuacgagaaccagaagcugaucgccaaccaguucaacagcgccaucggcaagauccaggacucccugagcuccaccgccagcgcgcucgggaagcugcaggacguggucaaccagaacgcccaggcccugaacacgcucgugaagcagcuguccagcaacuucggcgccaucuccagcgugcugaacgacauccucucccgccuggacccgcccgaggccgaggugcagaucgaccggcugaucaccgggcgccuccagagccugcagaccuacgugacccagcagcugauccgggcggccgagauccgcgccagcgccaaccucgccgcgaccaagauguccgagugcguccugggccagagcaagcggguggacuucugcggcaagggguaccaccugauguccuucccccagagcgccccgcacggcguggucuuccuccacgugacguacguccccgcccaggagaagaacuucaccaccgcccccgcgaucugccacgacgggaaggcccacuucccccgcgagggcguguucguguccaacgggacccacugguucgucacgcagcggaacuucuacgagccgcagaucaucaccaccgacaacaccuucgugagcggcaacugcgacguggucaucggcaucgugaacaacacgguguacgacccccugcagcccgagcuggacuccggcgggggcgggagcgacaucgaccccuacaaggaguucggcagcuccuaccagcugcucaacuuccugccccuggacuucuuccccgaccucaacgcccugguggacaccgccaccgcgcuguacgaggaggagcucacggggcgcgagcacugcagcccccaccacaccgccauccggcaggcccuggucugcugggacgagcugaccaagcucaucgccuggauguccagcaacaucaccuccgagcagguccgcacgaucaucgugaaccacgucaacgacaccuggggccugaaggugcggcagagccugugguuccaccucuccugccugaccuucgggcagcacaccgugcaggaguuccuggucagcuucggcguguggauccgcacgcccgccccguaccggccgcccaacgcgccgauccucuccacccugccggagcacaccgugaucugcuga

SEQ ID NO: 11954 - RNA, 3906 nt, Artificial Sequence
  SARS-CoV-2/Wuhan/WIV05/2019__EPI_ISL_402128 spike protein CDS gc (1-1147)(K986P_V987P_T887WN_A1020W) WhcAg construct
auguucguguuccugguccuccugccccuggugagcucccagugcgugaaccucaccacccgcacgcagcugccgcccgccuacaccaacagcuucacccggggcgucuacuaccccgacaagguguuccgcuccagcgugcugcacuccacccaggaccucuuccugcccuucuucagcaacgucacgugguuccacgccauccacguguccgggaccaacggcaccaagcgguucgacaacccggugcugcccuucaacgacggggucuacuucgcgagcaccgagaaguccaacaucauccgcggcuggaucuucgggacgacccucgacagcaagacccagucccugcugaucgugaacaacgccaccaacguggucaucaaggugugcgaguuccaguucugcaacgaccccuuccucggcguguacuaccacaagaacaacaagagcuggauggaguccgaguuccgggucuacagcuccgccaacaacugcacguucgaguacgugagccagcccuuccugauggaccuggagggcaagcaggggaacuucaagaaccuccgcgaguucguguucaagaacaucgacggcuacuucaagaucuacuccaagcacaccccgaucaaccugguccgggaccugccccagggguucagcgcccucgagccccugguggaccugcccaucggcaucaacaucacccgcuuccagacccuccuggcccugcaccgguccuaccucacgccgggggacagcagcuccggcuggaccgcgggcgccgccgccuacuacgugggguaccugcagccccgcaccuuccugcucaaguacaacgagaacggcaccaucacggacgcggucgacugcgcccuggacccccugagcgagaccaagugcacccucaaguccuucaccguggagaaggggaucuaccagacgagcaacuuccgggugcagcccaccgaguccaucguccgcuucccgaacaucaccaaccugugccccuucggcgagguguucaacgccacccgguucgccagcgucuacgccuggaaccgcaagcggaucuccaacugcguggcggacuacagcgugcuguacaacuccgccagcuucuccacguucaagugcuacggcgucagccccaccaagcucaacgaccugugcuucaccaacguguacgccgacuccuucgugauccgcggggacgagguccggcagaucgcccccggccagaccgggaagaucgccgacuacaacuacaagcugccggacgacuucacgggcugcgugaucgcguggaacagcaacaaccucgacuccaaggucgggggcaacuacaacuaccuguaccgccuguuccgcaagagcaaccucaagcccuucgagcgggacaucuccaccgagaucuaccaggccggcagcacccccugcaacgggguggagggcuucaacugcuacuucccccugcaguccuacggguuccagccgaccaacggcgugggguaccagcccuaccggguggucgugcugagcuucgagcuccugcacgcccccgccacggugugcggccccaagaaguccaccaaccuggucaagaacaagugcgugaacuucaacuucaacggccucaccgggaccggcgugcugaccgagagcaacaagaaguuccugccguuccagcaguucgggcgcgacaucgccgacacgaccgacgcgguccgcgacccccagacccuggagauccucgacaucacccccugcagcuucggcgggguguccgugaucacgccgggcaccaacaccagcaaccaggucgccgugcuguaccaggacgugaacugcaccgagguccccguggccauccacgccgaccagcugacgcccaccuggcggguguacuccaccggcagcaacgucuuccagacccgcgccgggugccucaucggcgcggagcacgugaacaacuccuacgagugcgacauccccaucggggccggcaucugcgccagcuaccagacgcagaccaacuccccgcggcgcgcccggagcguggcgucccagagcaucaucgccuacaccaugucccugggcgccgagaacagcgucgccuacuccaacaacagcaucgccauccccaccaacuucacgaucuccgugaccaccgagauccugcccgugagcaugaccaagacgagcgucgacugcaccauguacaucugcggggacuccaccgagugcagcaaccuccugcugcaguacggcuccuucugcacccagcucaaccgcgcgcugacggggaucgccguggagcaggacaagaacacccaggagguguucgcccaggucaagcagaucuacaagacgcccccgaucaaggacuucggcggguucaacuucagccagauccugcccgaccccuccaagcccagcaagcgguccuucaucgaggaccuccuguucaacaaggugacccuggccgacgccggcuucaucaagcaguacggcgacugccucggggacaucgcggcccgcgaccugaucugcgcccagaaguucaacggccugaccgugcucccgccccugcugaccgacgagaugaucgcccaguacaccagcgcccuccuggcggggaccaucacguccggcuggugguucggggccggcgccgcccugcagauccccuucgcgaugcagauggccuaccgguucaacggcaucggggucacccagaacgugcucuacgagaaccagaagcugaucgccaaccaguucaacagcgccaucggcaagauccaggacucccugagcuccaccgccagcgcgcucgggaagcugcaggacguggucaaccagaacgcccaggcccugaacacgcucgugaagcagcuguccagcaacuucggcgccaucuccagcgugcugaacgacauccucucccgccuggacccgcccgaggccgaggugcagaucgaccggcugaucaccgggcgccuccagagccugcagaccuacgugacccagcagcugauccgggcggccgagauccgcuggagcgccaaccucgccgcgaccaagauguccgagugcguccugggccagagcaagcggguggacuucugcggcaagggguaccaccugauguccuucccccagagcgccccgcacggcguggucuuccuccacgugacguacguccccgcccaggagaagaacuucaccaccgcccccgcgaucugccacgacgggaaggcccacuucccccgcgagggcguguucguguccaacgggacccacugguucgucacgcagcggaacuucuacgagccgcagaucaucaccaccgacaacaccuucgugagcggcaacugcgacguggucaucggcaucgugaacaacacgguguacgacccccugcagcccgagcuggacuccggcgggggcgggagcgacaucgaccccuacaaggaguucggcagcuccuaccagcugcucaacuuccugccccuggacuucuuccccgaccucaacgcccugguggacaccgccaccgcgcuguacgaggaggagcucacggggcgcgagcacugcagcccccaccacaccgccauccggcaggcccuggucugcugggacgagcugaccaagcucaucgccuggauguccagcaacaucaccuccgagcagguccgcacgaucaucgugaaccacgucaacgacaccuggggccugaaggugcggcagagccugugguuccaccucuccugccugaccuucgggcagcacaccgugcaggaguuccuggucagcuucggcguguggauccgcacgcccgccccguaccggccgcccaacgcgccgauccucuccacccugccggagcacaccgugaucugcuga

SEQ ID NO: 11955 - RNA, 3906 nt, Artificial Sequence
  SARS-CoV-2/Wuhan/WIV05/2019__EPI_ISL_402128 spike protein CDS gc (1-1147)(K986P_V987P_P1069F) WhcAg construct
auguucguguuccugguccuccugccccuggugagcucccagugcgugaaccucaccacccgcacgcagcugccgcccgccuacaccaacagcuucacccggggcgucuacuaccccgacaagguguuccgcuccagcgugcugcacuccacccaggaccucuuccugcccuucuucagcaacgucacgugguuccacgccauccacguguccgggaccaacggcaccaagcgguucgacaacccggugcugcccuucaacgacggggucuacuucgcgagcaccgagaaguccaacaucauccgcggcuggaucuucgggacgacccucgacagcaagacccagucccugcugaucgugaacaacgccaccaacguggucaucaaggugugcgaguuccaguucugcaacgaccccuuccucggcguguacuaccacaagaacaacaagagcuggauggaguccgaguuccgggucuacagcuccgccaacaacugcacguucgaguacgugagccagcccuuccugauggaccuggagggcaagcaggggaacuucaagaaccuccgcgaguucguguucaagaacaucgacggcuacuucaagaucuacuccaagcacaccccgaucaaccugguccgggaccugccccagggguucagcgcccucgagccccugguggaccugcccaucggcaucaacaucacccgcuuccagacccuccuggcccugcaccgguccuaccucacgccgggggacagcagcuccggcuggaccgcgggcgccgccgccuacuacgugggguaccugcagccccgcaccuuccugcucaaguacaacgagaacggcaccaucacggacgcggucgacugcgcccuggacccccugagcgagaccaagugcacccucaaguccuucaccguggagaaggggaucuaccagacgagcaacuuccgggugcagcccaccgaguccaucguccgcuucccgaacaucaccaaccugugccccuucggcgagguguucaacgccacccgguucgccagcgucuacgccuggaaccgcaagcggaucuccaacugcguggcggacuacagcgugcuguacaacuccgccagcuucuccacguucaagugcuacggcgucagccccaccaagcucaacgaccugugcuucaccaacguguacgccgacuccuucgugauccgcggggacgagguccggcagaucgcccccggccagaccgggaagaucgccgacuacaacuacaagcugccggacgacuucacgggcugcgugaucgcguggaacagcaacaaccucgacuccaaggucgggggcaacuacaacuaccuguaccgccuguuccgcaagagcaaccucaagcccuucgagcgggacaucuccaccgagaucuaccaggccggcagcacccccugcaacgggguggagggcuucaacugcuacuucccccugcaguccuacggguuccagccgaccaacggcgugggguaccagcccuaccggguggucgugcugagcuucgagcuccugcacgcccccgccacggugugcggccccaagaaguccaccaaccuggucaagaacaagugcgugaacuucaacuucaacggccucaccgggaccggcgugcugaccgagagcaacaagaaguuccugccguuccagcaguucgggcgcgacaucgccgacacgaccgacgcgguccgcgacccccagacccuggagauccucgacaucacccccugcagcuucggcgggguguccgugaucacgccgggcaccaacaccagcaaccaggucgccgugcuguaccaggacgugaacugcaccgagguccccguggccauccacgccgaccagcugacgcccaccuggcggguguacuccaccggcagcaacgucuuccagacccgcgccgggugccucaucggcgcggagcacgugaacaacuccuacgagugcgacauccccaucggggccggcaucugcgccagcuaccagacgcagaccaacuccccgcggcgcgcccggagcguggcgucccagagcaucaucgccuacaccaugucccugggcgccgagaacagcgucgccuacuccaacaacagcaucgccauccccaccaacuucacgaucuccgugaccaccgagauccugcccgugagcaugaccaagacgagcgucgacugcaccauguacaucugcggggacuccaccgagugcagcaaccuccugcugcaguacggcuccuucugcacccagcucaaccgcgcgcugacggggaucgccguggagcaggacaagaacacccaggagguguucgcccaggucaagcagaucuacaagacgcccccgaucaaggacuucggcggguucaacuucagccagauccugcccgaccccuccaagcccagcaagcgguccuucaucgaggaccuccuguucaacaaggugacccuggccgacgccggcuucaucaagcaguacggcgacugccucggggacaucgcggcccgcgaccugaucugcgcccagaaguucaacggccugaccgugcucccgccccugcugaccgacgagaugaucgcccaguacaccagcgcccuccuggcggggaccaucacguccggcuggaccuucggggccggcgccgcccugcagauccccuucgcgaugcagauggccuaccgguucaacggcaucggggucacccagaacgugcucuacgagaaccagaagcugaucgccaaccaguucaacagcgccaucggcaagauccaggacucccugagcuccaccgccagcgcgcucgggaagcugcaggacguggucaaccagaacgcccaggcccugaacacgcucgugaagcagcuguccagcaacuucggcgccaucuccagcgugcugaacgacauccucucccgccuggacccgcccgaggccgaggugcagaucgaccggcugaucaccgggcgccuccagagccugcagaccuacgugacccagcagcugauccgggcggccgagauccgcgccagcgccaaccucgccgcgaccaagauguccgagugcguccugggccagagcaagcggguggacuucugcggcaagggguaccaccugauguccuucccccagagcgccccgcacggcguggucuuccuccacgugacguacgucuucgcccaggagaagaacuucaccaccgcccccgcgaucugccacgacgggaaggcccacuucccccgcgagggcguguucguguccaacgggacccacugguucgucacgcagcggaacuucuacgagccgcagaucaucaccaccgacaacaccuucgugagcggcaacugcgacguggucaucggcaucgugaacaacacgguguacgacccccugcagcccgagcuggacuccggcgggggcgggagcgacaucgaccccuacaaggaguucggcagcuccuaccagcugcucaacuuccugccccuggacuucuuccccgaccucaacgcccugguggacaccgccaccgcgcuguacgaggaggagcucacggggcgcgagcacugcagcccccaccacaccgccauccggcaggcccuggucugcugggacgagcugaccaagcucaucgccuggauguccagcaacaucaccuccgagcagguccgcacgaucaucgugaaccacgucaacgacaccuggggccugaaggugcggcagagccugugguuccaccucuccugccugaccuucgggcagcacaccgugcaggaguuccuggucagcuucggcguguggauccgcacgcccgccccguaccggccgcccaacgcgccgauccucuccacccugccggagcacaccgugaucugcuga

SEQ ID NO: 11956 - RNA, 3906 nt, Artificial Sequence
  SARS-CoV-2/Wuhan/WIV05/2019__EPI_ISL_402128 spike protein CDS gc (1-1147)(K986P_V987P_ H1048Q_H1064N_ H1083N_H1101N) WhcAg construct
auguucguguuccugguccuccugccccuggugagcucccagugcgugaaccucaccacccgcacgcagcugccgcccgccuacaccaacagcuucacccggggcgucuacuaccccgacaagguguuccgcuccagcgugcugcacuccacccaggaccucuuccugcccuucuucagcaacgucacgugguuccacgccauccacguguccgggaccaacggcaccaagcgguucgacaacccggugcugcccuucaacgacggggucuacuucgcgagcaccgagaaguccaacaucauccgcggcuggaucuucgggacgacccucgacagcaagacccagucccugcugaucgugaacaacgccaccaacguggucaucaaggugugcgaguuccaguucugcaacgaccccuuccucggcguguacuaccacaagaacaacaagagcuggauggaguccgaguuccgggucuacagcuccgccaacaacugcacguucgaguacgugagccagcccuuccugauggaccuggagggcaagcaggggaacuucaagaaccuccgcgaguucguguucaagaacaucgacggcuacuucaagaucuacuccaagcacaccccgaucaaccugguccgggaccugccccagggguucagcgcccucgagccccugguggaccugcccaucggcaucaacaucacccgcuuccagacccuccuggcccugcaccgguccuaccucacgccgggggacagcagcuccggcuggaccgcgggcgccgccgccuacuacgugggguaccugcagccccgcaccuuccugcucaaguacaacgagaacggcaccaucacggacgcggucgacugcgcccuggacccccugagcgagaccaagugcacccucaaguccuucaccguggagaaggggaucuaccagacgagcaacuuccgggugcagcccaccgaguccaucguccgcuucccgaacaucaccaaccugugccccuucggcgagguguucaacgccacccgguucgccagcgucuacgccuggaaccgcaagcggaucuccaacugcguggcggacuacagcgugcuguacaacuccgccagcuucuccacguucaagugcuacggcgucagccccaccaagcucaacgaccugugcuucaccaacguguacgccgacuccuucgugauccgcggggacgagguccggcagaucgcccccggccagaccgggaagaucgccgacuacaacuacaagcugccggacgacuucacgggcugcgugaucgcguggaacagcaacaaccucgacuccaaggucgggggcaacuacaacuaccuguaccgccuguuccgcaagagcaaccucaagcccuucgagcgggacaucuccaccgagaucuaccaggccggcagcacccccugcaacgggguggagggcuucaacugcuacuucccccugcaguccuacggguuccagccgaccaacggcgugggguaccagcccuaccggguggucgugcugagcuucgagcuccugcacgcccccgccacggugugcggccccaagaaguccaccaaccuggucaagaacaagugcgugaacuucaacuucaacggccucaccgggaccggcgugcugaccgagagcaacaagaaguuccugccguuccagcaguucgggcgcgacaucgccgacacgaccgacgcgguccgcgacccccagacccuggagauccucgacaucacccccugcagcuucggcgggguguccgugaucacgccgggcaccaacaccagcaaccaggucgccgugcuguaccaggacgugaacugcaccgagguccccguggccauccacgccgaccagcugacgcccaccuggcggguguacuccaccggcagcaacgucuuccagacccgcgccgggugccucaucggcgcggagcacgugaacaacuccuacgagugcgacauccccaucggggccggcaucugcgccagcuaccagacgcagaccaacuccccgcggcgcgcccggagcguggcgucccagagcaucaucgccuacaccaugucccugggcgccgagaacagcgucgccuacuccaacaacagcaucgccauccccaccaacuucacgaucuccgugaccaccgagauccugcccgugagcaugaccaagacgagcgucgacugcaccauguacaucugcggggacuccaccgagugcagcaaccuccugcugcaguacggcuccuucugcacccagcucaaccgcgcgcugacggggaucgccguggagcaggacaagaacacccaggagguguucgcccaggucaagcagaucuacaagacgcccccgaucaaggacuucggcggguucaacuucagccagauccugcccgaccccuccaagcccagcaagcgguccuucaucgaggaccuccuguucaacaaggugacccuggccgacgccggcuucaucaagcaguacggcgacugccucggggacaucgcggcccgcgaccugaucugcgcccagaaguucaacggccugaccgugcucccgccccugcugaccgacgagaugaucgcccaguacaccagcgcccuccuggcggggaccaucacguccggcuggaccuucggggccggcgccgcccugcagauccccuucgcgaugcagauggccuaccgguucaacggcaucggggucacccagaacgugcucuacgagaaccagaagcugaucgccaaccaguucaacagcgccaucggcaagauccaggacucccugagcuccaccgccagcgcgcucgggaagcugcaggacguggucaaccagaacgcccaggcccugaacacgcucgugaagcagcuguccagcaacuucggcgccaucuccagcgugcugaacgacauccucucccgccuggacccgcccgaggccgaggugcagaucgaccggcugaucaccgggcgccuccagagccugcagaccuacgugacccagcagcugauccgggcggccgagauccgcgccagcgccaaccucgccgcgaccaagauguccgagugcguccugggccagagcaagcggguggacuucugcggcaagggguaccagcugauguccuucccccagagcgccccgcacggcguggucuuccucaacgugacguacguccccgcccaggagaagaacuucaccaccgcccccgcgaucugcaacgacgggaaggcccacuucccccgcgagggcguguucguguccaacgggaccaacugguucgucacgcagcggaacuucuacgagccgcagaucaucaccaccgacaacaccuucgugagcggcaacugcgacguggucaucggcaucgugaacaacacgguguacgacccccugcagcccgagcuggacuccggcgggggcgggagcgacaucgaccccuacaaggaguucggcagcuccuaccagcugcucaacuuccugccccuggacuucuuccccgaccucaacgcccugguggacaccgccaccgcgcuguacgaggaggagcucacggggcgcgagcacugcagcccccaccacaccgccauccggcaggcccuggucugcugggacgagcugaccaagcucaucgccuggauguccagcaacaucaccuccgagcagguccgcacgaucaucgugaaccacgucaacgacaccuggggccugaaggugcggcagagccugugguuccaccucuccugccugaccuucgggcagcacaccgugcaggaguuccuggucagcuucggcguguggauccgcacgcccgccccguaccggccgcccaacgcgccgauccucuccacccugccggagcacaccgugaucugcuga

SEQ ID NO: 11957 - RNA, 3906 nt, Artificial Sequence
  SARS-CoV-2/Wuhan/WIV05/2019__EPI_ISL_402128 spike protein CDS gc (1-1147)(I712C_T1077C) WhcAg construct
auguucguguuccugguccuccugccccuggugagcucccagugcgugaaccucaccacccgcacgcagcugccgcccgccuacaccaacagcuucacccggggcgucuacuaccccgacaagguguuccgcuccagcgugcugcacuccacccaggaccucuuccugcccuucuucagcaacgucacgugguuccacgccauccacguguccgggaccaacggcaccaagcgguucgacaacccggugcugcccuucaacgacggggucuacuucgcgagcaccgagaaguccaacaucauccgcggcuggaucuucgggacgacccucgacagcaagacccagucccugcugaucgugaacaacgccaccaacguggucaucaaggugugcgaguuccaguucugcaacgaccccuuccucggcguguacuaccacaagaacaacaagagcuggauggaguccgaguuccgggucuacagcuccgccaacaacugcacguucgaguacgugagccagcccuuccugauggaccuggagggcaagcaggggaacuucaagaaccuccgcgaguucguguucaagaacaucgacggcuacuucaagaucuacuccaagcacaccccgaucaaccugguccgggaccugccccagggguucagcgcccucgagccccugguggaccugcccaucggcaucaacaucacccgcuuccagacccuccuggcccugcaccgguccuaccucacgccgggggacagcagcuccggcuggaccgcgggcgccgccgccuacuacgugggguaccugcagccccgcaccuuccugcucaaguacaacgagaacggcaccaucacggacgcggucgacugcgcccuggacccccugagcgagaccaagugcacccucaaguccuucaccguggagaaggggaucuaccagacgagcaacuuccgggugcagcccaccgaguccaucguccgcuucccgaacaucaccaaccugugccccuucggcgagguguucaacgccacccgguucgccagcgucuacgccuggaaccgcaagcggaucuccaacugcguggcggacuacagcgugcuguacaacuccgccagcuucuccacguucaagugcuacggcgucagccccaccaagcucaacgaccugugcuucaccaacguguacgccgacuccuucgugauccgcggggacgagguccggcagaucgcccccggccagaccgggaagaucgccgacuacaacuacaagcugccggacgacuucacgggcugcgugaucgcguggaacagcaacaaccucgacuccaaggucgggggcaacuacaacuaccuguaccgccuguuccgcaagagcaaccucaagcccuucgagcgggacaucuccaccgagaucuaccaggccggcagcacccccugcaacgggguggagggcuucaacugcuacuucccccugcaguccuacggguuccagccgaccaacggcgugggguaccagcccuaccggguggucgugcugagcuucgagcuccugcacgcccccgccacggugugcggccccaagaaguccaccaaccuggucaagaacaagugcgugaacuucaacuucaacggccucaccgggaccggcgugcugaccgagagcaacaagaaguuccugccguuccagcaguucgggcgcgacaucgccgacacgaccgacgcgguccgcgacccccagacccuggagauccucgacaucacccccugcagcuucggcgggguguccgugaucacgccgggcaccaacaccagcaaccaggucgccgugcuguaccaggacgugaacugcaccgagguccccguggccauccacgccgaccagcugacgcccaccuggcggguguacuccaccggcagcaacgucuuccagacccgcgccgggugccucaucggcgcggagcacgugaacaacuccuacgagugcgacauccccaucggggccggcaucugcgccagcuaccagacgcagaccaacuccccgcggcgcgcccggagcguggcgucccagagcaucaucgccuacaccaugucccugggcgccgagaacagcgucgccuacuccaacaacagcugcgccauccccaccaacuucacgaucuccgugaccaccgagauccugcccgugagcaugaccaagacgagcgucgacugcaccauguacaucugcggggacuccaccgagugcagcaaccuccugcugcaguacggcuccuucugcacccagcucaaccgcgcgcugacggggaucgccguggagcaggacaagaacacccaggagguguucgcccaggucaagcagaucuacaagacgcccccgaucaaggacuucggcggguucaacuucagccagauccugcccgaccccuccaagcccagcaagcgguccuucaucgaggaccuccuguucaacaaggugacccuggccgacgccggcuucaucaagcaguacggcgacugccucggggacaucgcggcccgcgaccugaucugcgcccagaaguucaacggccugaccgugcucccgccccugcugaccgacgagaugaucgcccaguacaccagcgcccuccuggcggggaccaucacguccggcuggaccuucggggccggcgccgcccugcagauccccuucgcgaugcagauggccuaccgguucaacggcaucggggucacccagaacgugcucuacgagaaccagaagcugaucgccaaccaguucaacagcgccaucggcaagauccaggacucccugagcuccaccgccagcgcgcucgggaagcugcaggacguggucaaccagaacgcccaggcccugaacacgcucgugaagcagcuguccagcaacuucggcgccaucuccagcgugcugaacgacauccucucccgccuggacaaggucgaggccgaggugcagaucgaccggcugaucaccgggcgccuccagagccugcagaccuacgugacccagcagcugauccgggcggccgagauccgcgccagcgccaaccucgccgcgaccaagauguccgagugcguccugggccagagcaagcggguggacuucugcggcaagggguaccaccugauguccuucccccagagcgccccgcacggcguggucuuccuccacgugacguacguccccgcccaggagaagaacuucaccugcgcccccgcgaucugccacgacgggaaggcccacuucccccgcgagggcguguucguguccaacgggacccacugguucgucacgcagcggaacuucuacgagccgcagaucaucaccaccgacaacaccuucgugagcggcaacugcgacguggucaucggcaucgugaacaacacgguguacgacccccugcagcccgagcuggacuccggcgggggcgggagcgacaucgaccccuacaaggaguucggcagcuccuaccagcugcucaacuuccugccccuggacuucuuccccgaccucaacgcccugguggacaccgccaccgcgcuguacgaggaggagcucacggggcgcgagcacugcagcccccaccacaccgccauccggcaggcccuggucugcugggacgagcugaccaagcucaucgccuggauguccagcaacaucaccuccgagcagguccgcacgaucaucgugaaccacgucaacgacaccuggggccugaaggugcggcagagccugugguuccaccucuccugccugaccuucgggcagcacaccgugcaggaguuccuggucagcuucggcguguggauccgcacgcccgccccguaccggccgcccaacgcgccgauccucuccacccugccggagcacaccgugaucugcuga

SEQ ID NO: 11958 - RNA, 3906 nt, Artificial Sequence
  SARS-CoV-2/Wuhan/WIV05/2019__EPI_ISL_402128 spike protein CDS gc (1-1147)(I714C_Y1110C) WhcAg construct
auguucguguuccugguccuccugccccuggugagcucccagugcgugaaccucaccacccgcacgcagcugccgcccgccuacaccaacagcuucacccggggcgucuacuaccccgacaagguguuccgcuccagcgugcugcacuccacccaggaccucuuccugcccuucuucagcaacgucacgugguuccacgccauccacguguccgggaccaacggcaccaagcgguucgacaacccggugcugcccuucaacgacggggucuacuucgcgagcaccgagaaguccaacaucauccgcggcuggaucuucgggacgacccucgacagcaagacccagucccugcugaucgugaacaacgccaccaacguggucaucaaggugugcgaguuccaguucugcaacgaccccuuccucggcguguacuaccacaagaacaacaagagcuggauggaguccgaguuccgggucuacagcuccgccaacaacugcacguucgaguacgugagccagcccuuccugauggaccuggagggcaagcaggggaacuucaagaaccuccgcgaguucguguucaagaacaucgacggcuacuucaagaucuacuccaagcacaccccgaucaaccugguccgggaccugccccagggguucagcgcccucgagccccugguggaccugcccaucggcaucaacaucacccgcuuccagacccuccuggcccugcaccgguccuaccucacgccgggggacagcagcuccggcuggaccgcgggcgccgccgccuacuacgugggguaccugcagccccgcaccuuccugcucaaguacaacgagaacggcaccaucacggacgcggucgacugcgcccuggacccccugagcgagaccaagugcacccucaaguccuucaccguggagaaggggaucuaccagacgagcaacuuccgggugcagcccaccgaguccaucguccgcuucccgaacaucaccaaccugugccccuucggcgagguguucaacgccacccgguucgccagcgucuacgccuggaaccgcaagcggaucuccaacugcguggcggacuacagcgugcuguacaacuccgccagcuucuccacguucaagugcuacggcgucagccccaccaagcucaacgaccugugcuucaccaacguguacgccgacuccuucgugauccgcggggacgagguccggcagaucgcccccggccagaccgggaagaucgccgacuacaacuacaagcugccggacgacuucacgggcugcgugaucgcguggaacagcaacaaccucgacuccaaggucgggggcaacuacaacuaccuguaccgccuguuccgcaagagcaaccucaagcccuucgagcgggacaucuccaccgagaucuaccaggccggcagcacccccugcaacgggguggagggcuucaacugcuacuucccccugcaguccuacggguuccagccgaccaacggcgugggguaccagcccuaccggguggucgugcugagcuucgagcuccugcacgcccccgccacggugugcggccccaagaaguccaccaaccuggucaagaacaagugcgugaacuucaacuucaacggccucaccgggaccggcgugcugaccgagagcaacaagaaguuccugccguuccagcaguucgggcgcgacaucgccgacacgaccgacgcgguccgcgacccccagacccuggagauccucgacaucacccccugcagcuucggcgggguguccgugaucacgccgggcaccaacaccagcaaccaggucgccgugcuguaccaggacgugaacugcaccgagguccccguggccauccacgccgaccagcugacgcccaccuggcggguguacuccaccggcagcaacgucuuccagacccgcgccgggugccucaucggcgcggagcacgugaacaacuccuacgagugcgacauccccaucggggccggcaucugcgccagcuaccagacgcagaccaacuccccgcggcgcgcccggagcguggcgucccagagcaucaucgccuacaccaugucccugggcgccgagaacagcgucgccuacuccaacaacagcaucgccugccccaccaacuucacgaucuccgugaccaccgagauccugcccgugagcaugaccaagacgagcgucgacugcaccauguacaucugcggggacuccaccgagugcagcaaccuccugcugcaguacggcuccuucugcacccagcucaaccgcgcgcugacggggaucgccguggagcaggacaagaacacccaggagguguucgcccaggucaagcagaucuacaagacgcccccgaucaaggacuucggcggguucaacuucagccagauccugcccgaccccuccaagcccagcaagcgguccuucaucgaggaccuccuguucaacaaggugacccuggccgacgccggcuucaucaagcaguacggcgacugccucggggacaucgcggcccgcgaccugaucugcgcccagaaguucaacggccugaccgugcucccgccccugcugaccgacgagaugaucgcccaguacaccagcgcccuccuggcggggaccaucacguccggcuggaccuucggggccggcgccgcccugcagauccccuucgcgaugcagauggccuaccgguucaacggcaucggggucacccagaacgugcucuacgagaaccagaagcugaucgccaaccaguucaacagcgccaucggcaagauccaggacucccugagcuccaccgccagcgcgcucgggaagcugcaggacguggucaaccagaacgcccaggcccugaacacgcucgugaagcagcuguccagcaacuucggcgccaucuccagcgugcugaacgacauccucucccgccuggacaaggucgaggccgaggugcagaucgaccggcugaucaccgggcgccuccagagccugcagaccuacgugacccagcagcugauccgggcggccgagauccgcgccagcgccaaccucgccgcgaccaagauguccgagugcguccugggccagagcaagcggguggacuucugcggcaagggguaccaccugauguccuucccccagagcgccccgcacggcguggucuuccuccacgugacguacguccccgcccaggagaagaacuucaccaccgcccccgcgaucugccacgacgggaaggcccacuucccccgcgagggcguguucguguccaacgggacccacugguucgucacgcagcggaacuucugcgagccgcagaucaucaccaccgacaacaccuucgugagcggcaacugcgacguggucaucggcaucgugaacaacacgguguacgacccccugcagcccgagcuggacuccggcgggggcgggagcgacaucgaccccuacaaggaguucggcagcuccuaccagcugcucaacuuccugccccuggacuucuuccccgaccucaacgcccugguggacaccgccaccgcgcuguacgaggaggagcucacggggcgcgagcacugcagcccccaccacaccgccauccggcaggcccuggucugcugggacgagcugaccaagcucaucgccuggauguccagcaacaucaccuccgagcagguccgcacgaucaucgugaaccacgucaacgacaccuggggccugaaggugcggcagagccugugguuccaccucuccugccugaccuucgggcagcacaccgugcaggaguuccuggucagcuucggcguguggauccgcacgcccgccccguaccggccgcccaacgcgccgauccucuccacccugccggagcacaccgugaucugcuga

SEQ ID NO: 11959 - RNA, 3906 nt, Artificial Sequence
  SARS-CoV-2/Wuhan/WIV05/2019__EPI_ISL_402128 spike protein CDS gc (1-1147)(P715C_P1069C) WhcAg construct
auguucguguuccugguccuccugccccuggugagcucccagugcgugaaccucaccacccgcacgcagcugccgcccgccuacaccaacagcuucacccggggcgucuacuaccccgacaagguguuccgcuccagcgugcugcacuccacccaggaccucuuccugcccuucuucagcaacgucacgugguuccacgccauccacguguccgggaccaacggcaccaagcgguucgacaacccggugcugcccuucaacgacggggucuacuucgcgagcaccgagaaguccaacaucauccgcggcuggaucuucgggacgacccucgacagcaagacccagucccugcugaucgugaacaacgccaccaacguggucaucaaggugugcgaguuccaguucugcaacgaccccuuccucggcguguacuaccacaagaacaacaagagcuggauggaguccgaguuccgggucuacagcuccgccaacaacugcacguucgaguacgugagccagcccuuccugauggaccuggagggcaagcaggggaacuucaagaaccuccgcgaguucguguucaagaacaucgacggcuacuucaagaucuacuccaagcacaccccgaucaaccugguccgggaccugccccagggguucagcgcccucgagccccugguggaccugcccaucggcaucaacaucacccgcuuccagacccuccuggcccugcaccgguccuaccucacgccgggggacagcagcuccggcuggaccgcgggcgccgccgccuacuacgugggguaccugcagccccgcaccuuccugcucaaguacaacgagaacggcaccaucacggacgcggucgacugcgcccuggacccccugagcgagaccaagugcacccucaaguccuucaccguggagaaggggaucuaccagacgagcaacuuccgggugcagcccaccgaguccaucguccgcuucccgaacaucaccaaccugugccccuucggcgagguguucaacgccacccgguucgccagcgucuacgccuggaaccgcaagcggaucuccaacugcguggcggacuacagcgugcuguacaacuccgccagcuucuccacguucaagugcuacggcgucagccccaccaagcucaacgaccugugcuucaccaacguguacgccgacuccuucgugauccgcggggacgagguccggcagaucgcccccggccagaccgggaagaucgccgacuacaacuacaagcugccggacgacuucacgggcugcgugaucgcguggaacagcaacaaccucgacuccaaggucgggggcaacuacaacuaccuguaccgccuguuccgcaagagcaaccucaagcccuucgagcgggacaucuccaccgagaucuaccaggccggcagcacccccugcaacgggguggagggcuucaacugcuacuucccccugcaguccuacggguuccagccgaccaacggcgugggguaccagcccuaccggguggucgugcugagcuucgagcuccugcacgcccccgccacggugugcggccccaagaaguccaccaaccuggucaagaacaagugcgugaacuucaacuucaacggccucaccgggaccggcgugcugaccgagagcaacaagaaguuccugccguuccagcaguucgggcgcgacaucgccgacacgaccgacgcgguccgcgacccccagacccuggagauccucgacaucacccccugcagcuucggcgggguguccgugaucacgccgggcaccaacaccagcaaccaggucgccgugcuguaccaggacgugaacugcaccgagguccccguggccauccacgccgaccagcugacgcccaccuggcggguguacuccaccggcagcaacgucuuccagacccgcgccgggugccucaucggcgcggagcacgugaacaacuccuacgagugcgacauccccaucggggccggcaucugcgccagcuaccagacgcagaccaacuccccgcggcgcgcccggagcguggcgucccagagcaucaucgccuacaccaugucccugggcgccgagaacagcgucgccuacuccaacaacagcaucgccaucugcaccaacuucacgaucuccgugaccaccgagauccugcccgugagcaugaccaagacgagcgucgacugcaccauguacaucugcggggacuccaccgagugcagcaaccuccugcugcaguacggcuccuucugcacccagcucaaccgcgcgcugacggggaucgccguggagcaggacaagaacacccaggagguguucgcccaggucaagcagaucuacaagacgcccccgaucaaggacuucggcggguucaacuucagccagauccugcccgaccccuccaagcccagcaagcgguccuucaucgaggaccuccuguucaacaaggugacccuggccgacgccggcuucaucaagcaguacggcgacugccucggggacaucgcggcccgcgaccugaucugcgcccagaaguucaacggccugaccgugcucccgccccugcugaccgacgagaugaucgcccaguacaccagcgcccuccuggcggggaccaucacguccggcuggaccuucggggccggcgccgcccugcagauccccuucgcgaugcagauggccuaccgguucaacggcaucggggucacccagaacgugcucuacgagaaccagaagcugaucgccaaccaguucaacagcgccaucggcaagauccaggacucccugagcuccaccgccagcgcgcucgggaagcugcaggacguggucaaccagaacgcccaggcccugaacacgcucgugaagcagcuguccagcaacuucggcgccaucuccagcgugcugaacgacauccucucccgccuggacaaggucgaggccgaggugcagaucgaccggcugaucaccgggcgccuccagagccugcagaccuacgugacccagcagcugauccgggcggccgagauccgcgccagcgccaaccucgccgcgaccaagauguccgagugcguccugggccagagcaagcggguggacuucugcggcaagggguaccaccugauguccuucccccagagcgccccgcacggcguggucuuccuccacgugacguacgucugcgcccaggagaagaacuucaccaccgcccccgcgaucugccacgacgggaaggcccacuucccccgcgagggcguguucguguccaacgggacccacugguucgucacgcagcggaacuucuacgagccgcagaucaucaccaccgacaacaccuucgugagcggcaacugcgacguggucaucggcaucgugaacaacacgguguacgacccccugcagcccgagcuggacuccggcgggggcgggagcgacaucgaccccuacaaggaguucggcagcuccuaccagcugcucaacuuccugccccuggacuucuuccccgaccucaacgcccugguggacaccgccaccgcgcuguacgaggaggagcucacggggcgcgagcacugcagcccccaccacaccgccauccggcaggcccuggucugcugggacgagcugaccaagcucaucgccuggauguccagcaacaucaccuccgagcagguccgcacgaucaucgugaaccacgucaacgacaccuggggccugaaggugcggcagagccugugguuccaccucuccugccugaccuucgggcagcacaccgugcaggaguuccuggucagcuucggcguguggauccgcacgcccgccccguaccggccgcccaacgcgccgauccucuccacccugccggagcacaccgugaucugcuga

SEQ ID NO: 11960 - RNA, 3906 nt, Artificial Sequence
  SARS-CoV-2/Wuhan/WIV05/2019__EPI_ISL_402128 spike protein CDS gc (1-1147)(G889C_L1034C) WhcAg construct
auguucguguuccugguccuccugccccuggugagcucccagugcgugaaccucaccacccgcacgcagcugccgcccgccuacaccaacagcuucacccggggcgucuacuaccccgacaagguguuccgcuccagcgugcugcacuccacccaggaccucuuccugcccuucuucagcaacgucacgugguuccacgccauccacguguccgggaccaacggcaccaagcgguucgacaacccggugcugcccuucaacgacggggucuacuucgcgagcaccgagaaguccaacaucauccgcggcuggaucuucgggacgacccucgacagcaagacccagucccugcugaucgugaacaacgccaccaacguggucaucaaggugugcgaguuccaguucugcaacgaccccuuccucggcguguacuaccacaagaacaacaagagcuggauggaguccgaguuccgggucuacagcuccgccaacaacugcacguucgaguacgugagccagcccuuccugauggaccuggagggcaagcaggggaacuucaagaaccuccgcgaguucguguucaagaacaucgacggcuacuucaagaucuacuccaagcacaccccgaucaaccugguccgggaccugccccagggguucagcgcccucgagccccugguggaccugcccaucggcaucaacaucacccgcuuccagacccuccuggcccugcaccgguccuaccucacgccgggggacagcagcuccggcuggaccgcgggcgccgccgccuacuacgugggguaccugcagccccgcaccuuccugcucaaguacaacgagaacggcaccaucacggacgcggucgacugcgcccuggacccccugagcgagaccaagugcacccucaaguccuucaccguggagaaggggaucuaccagacgagcaacuuccgggugcagcccaccgaguccaucguccgcuucccgaacaucaccaaccugugccccuucggcgagguguucaacgccacccgguucgccagcgucuacgccuggaaccgcaagcggaucuccaacugcguggcggacuacagcgugcuguacaacuccgccagcuucuccacguucaagugcuacggcgucagccccaccaagcucaacgaccugugcuucaccaacguguacgccgacuccuucgugauccgcggggacgagguccggcagaucgcccccggccagaccgggaagaucgccgacuacaacuacaagcugccggacgacuucacgggcugcgugaucgcguggaacagcaacaaccucgacuccaaggucgggggcaacuacaacuaccuguaccgccuguuccgcaagagcaaccucaagcccuucgagcgggacaucuccaccgagaucuaccaggccggcagcacccccugcaacgggguggagggcuucaacugcuacuucccccugcaguccuacggguuccagccgaccaacggcgugggguaccagcccuaccggguggucgugcugagcuucgagcuccugcacgcccccgccacggugugcggccccaagaaguccaccaaccuggucaagaacaagugcgugaacuucaacuucaacggccucaccgggaccggcgugcugaccgagagcaacaagaaguuccugccguuccagcaguucgggcgcgacaucgccgacacgaccgacgcgguccgcgacccccagacccuggagauccucgacaucacccccugcagcuucggcgggguguccgugaucacgccgggcaccaacaccagcaaccaggucgccgugcuguaccaggacgugaacugcaccgagguccccguggccauccacgccgaccagcugacgcccaccuggcggguguacuccaccggcagcaacgucuuccagacccgcgccgggugccucaucggcgcggagcacgugaacaacuccuacgagugcgacauccccaucggggccggcaucugcgccagcuaccagacgcagaccaacuccccgcggcgcgcccggagcguggcgucccagagcaucaucgccuacaccaugucccugggcgccgagaacagcgucgccuacuccaacaacagcaucgccauccccaccaacuucacgaucuccgugaccaccgagauccugcccgugagcaugaccaagacgagcgucgacugcaccauguacaucugcggggacuccaccgagugcagcaaccuccugcugcaguacggcuccuucugcacccagcucaaccgcgcgcugacggggaucgccguggagcaggacaagaacacccaggagguguucgcccaggucaagcagaucuacaagacgcccccgaucaaggacuucggcggguucaacuucagccagauccugcccgaccccuccaagcccagcaagcgguccuucaucgaggaccuccuguucaacaaggugacccuggccgacgccggcuucaucaagcaguacggcgacugccucggggacaucgcggcccgcgaccugaucugcgcccagaaguucaacggccugaccgugcucccgccccugcugaccgacgagaugaucgcccaguacaccagcgcccuccuggcggggaccaucacguccggcuggaccuucugcgccggcgccgcccugcagauccccuucgcgaugcagauggccuaccgguucaacggcaucggggucacccagaacgugcucuacgagaaccagaagcugaucgccaaccaguucaacagcgccaucggcaagauccaggacucccugagcuccaccgccagcgcgcucgggaagcugcaggacguggucaaccagaacgcccaggcccugaacacgcucgugaagcagcuguccagcaacuucggcgccaucuccagcgugcugaacgacauccucucccgccuggacaaggucgaggccgaggugcagaucgaccggcugaucaccgggcgccuccagagccugcagaccuacgugacccagcagcugauccgggcggccgagauccgcgccagcgccaaccucgccgcgaccaagauguccgagugcgucugcggccagagcaagcggguggacuucugcggcaagggguaccaccugauguccuucccccagagcgccccgcacggcguggucuuccuccacgugacguacguccccgcccaggagaagaacuucaccaccgcccccgcgaucugccacgacgggaaggcccacuucccccgcgagggcguguucguguccaacgggacccacugguucgucacgcagcggaacuucuacgagccgcagaucaucaccaccgacaacaccuucgugagcggcaacugcgacguggucaucggcaucgugaacaacacgguguacgacccccugcagcccgagcuggacuccggcgggggcgggagcgacaucgaccccuacaaggaguucggcagcuccuaccagcugcucaacuuccugccccuggacuucuuccccgaccucaacgcccugguggacaccgccaccgcgcuguacgaggaggagcucacggggcgcgagcacugcagcccccaccacaccgccauccggcaggcccuggucugcugggacgagcugaccaagcucaucgccuggauguccagcaacaucaccuccgagcagguccgcacgaucaucgugaaccacgucaacgacaccuggggccugaaggugcggcagagccugugguuccaccucuccugccugaccuucgggcagcacaccgugcaggaguuccuggucagcuucggcguguggauccgcacgcccgccccguaccggccgcccaacgcgccgauccucuccacccugccggagcacaccgugaucugcuga

SEQ ID NO: 11961 - RNA, 3906 nt, Artificial Sequence
  SARS-CoV-2/Wuhan/WIV05/2019__EPI_ISL_402128 spike protein CDS gc (1-1147)(I909C_Y1047C) WhcAg construct
auguucguguuccugguccuccugccccuggugagcucccagugcgugaaccucaccacccgcacgcagcugccgcccgccuacaccaacagcuucacccggggcgucuacuaccccgacaagguguuccgcuccagcgugcugcacuccacccaggaccucuuccugcccuucuucagcaacgucacgugguuccacgccauccacguguccgggaccaacggcaccaagcgguucgacaacccggugcugcccuucaacgacggggucuacuucgcgagcaccgagaaguccaacaucauccgcggcuggaucuucgggacgacccucgacagcaagacccagucccugcugaucgugaacaacgccaccaacguggucaucaaggugugcgaguuccaguucugcaacgaccccuuccucggcguguacuaccacaagaacaacaagagcuggauggaguccgaguuccgggucuacagcuccgccaacaacugcacguucgaguacgugagccagcccuuccugauggaccuggagggcaagcaggggaacuucaagaaccuccgcgaguucguguucaagaacaucgacggcuacuucaagaucuacuccaagcacaccccgaucaaccugguccgggaccugccccagggguucagcgcccucgagccccugguggaccugcccaucggcaucaacaucacccgcuuccagacccuccuggcccugcaccgguccuaccucacgccgggggacagcagcuccggcuggaccgcgggcgccgccgccuacuacgugggguaccugcagccccgcaccuuccugcucaaguacaacgagaacggcaccaucacggacgcggucgacugcgcccuggacccccugagcgagaccaagugcacccucaaguccuucaccguggagaaggggaucuaccagacgagcaacuuccgggugcagcccaccgaguccaucguccgcuucccgaacaucaccaaccugugccccuucggcgagguguucaacgccacccgguucgccagcgucuacgccuggaaccgcaagcggaucuccaacugcguggcggacuacagcgugcuguacaacuccgccagcuucuccacguucaagugcuacggcgucagccccaccaagcucaacgaccugugcuucaccaacguguacgccgacuccuucgugauccgcggggacgagguccggcagaucgcccccggccagaccgggaagaucgccgacuacaacuacaagcugccggacgacuucacgggcugcgugaucgcguggaacagcaacaaccucgacuccaaggucgggggcaacuacaacuaccuguaccgccuguuccgcaagagcaaccucaagcccuucgagcgggacaucuccaccgagaucuaccaggccggcagcacccccugcaacgggguggagggcuucaacugcuacuucccccugcaguccuacggguuccagccgaccaacggcgugggguaccagcccuaccggguggucgugcugagcuucgagcuccugcacgcccccgccacggugugcggccccaagaaguccaccaaccuggucaagaacaagugcgugaacuucaacuucaacggccucaccgggaccggcgugcugaccgagagcaacaagaaguuccugccguuccagcaguucgggcgcgacaucgccgacacgaccgacgcgguccgcgacccccagacccuggagauccucgacaucacccccugcagcuucggcgggguguccgugaucacgccgggcaccaacaccagcaaccaggucgccgugcuguaccaggacgugaacugcaccgagguccccguggccauccacgccgaccagcugacgcccaccuggcggguguacuccaccggcagcaacgucuuccagacccgcgccgggugccucaucggcgcggagcacgugaacaacuccuacgagugcgacauccccaucggggccggcaucugcgccagcuaccagacgcagaccaacuccccgcggcgcgcccggagcguggcgucccagagcaucaucgccuacaccaugucccugggcgccgagaacagcgucgccuacuccaacaacagcaucgccauccccaccaacuucacgaucuccgugaccaccgagauccugcccgugagcaugaccaagacgagcgucgacugcaccauguacaucugcggggacuccaccgagugcagcaaccuccugcugcaguacggcuccuucugcacccagcucaaccgcgcgcugacggggaucgccguggagcaggacaagaacacccaggagguguucgcccaggucaagcagaucuacaagacgcccccgaucaaggacuucggcggguucaacuucagccagauccugcccgaccccuccaagcccagcaagcgguccuucaucgaggaccuccuguucaacaaggugacccuggccgacgccggcuucaucaagcaguacggcgacugccucggggacaucgcggcccgcgaccugaucugcgcccagaaguucaacggccugaccgugcucccgccccugcugaccgacgagaugaucgcccaguacaccagcgcccuccuggcggggaccaucacguccggcuggaccuucggggccggcgccgcccugcagauccccuucgcgaugcagauggccuaccgguucaacggcugcggggucacccagaacgugcucuacgagaaccagaagcugaucgccaaccaguucaacagcgccaucggcaagauccaggacucccugagcuccaccgccagcgcgcucgggaagcugcaggacguggucaaccagaacgcccaggcccugaacacgcucgugaagcagcuguccagcaacuucggcgccaucuccagcgugcugaacgacauccucucccgccuggacaaggucgaggccgaggugcagaucgaccggcugaucaccgggcgccuccagagccugcagaccuacgugacccagcagcugauccgggcggccgagauccgcgccagcgccaaccucgccgcgaccaagauguccgagugcguccugggccagagcaagcggguggacuucugcggcaaggggugccaccugauguccuucccccagagcgccccgcacggcguggucuuccuccacgugacguacguccccgcccaggagaagaacuucaccaccgcccccgcgaucugccacgacgggaaggcccacuucccccgcgagggcguguucguguccaacgggacccacugguucgucacgcagcggaacuucuacgagccgcagaucaucaccaccgacaacaccuucgugagcggcaacugcgacguggucaucggcaucgugaacaacacgguguacgacccccugcagcccgagcuggacuccggcgggggcgggagcgacaucgaccccuacaaggaguucggcagcuccuaccagcugcucaacuuccugccccuggacuucuuccccgaccucaacgcccugguggacaccgccaccgcgcuguacgaggaggagcucacggggcgcgagcacugcagcccccaccacaccgccauccggcaggcccuggucugcugggacgagcugaccaagcucaucgccuggauguccagcaacaucaccuccgagcagguccgcacgaucaucgugaaccacgucaacgacaccuggggccugaaggugcggcagagccugugguuccaccucuccugccugaccuucgggcagcacaccgugcaggaguuccuggucagcuucggcguguggauccgcacgcccgccccguaccggccgcccaacgcgccgauccucuccacccugccggagcacaccgugaucugcuga

SEQ ID NO: 11962 - RNA, 3906 nt, Artificial Sequence
  SARS-CoV-2/Wuhan/WIV05/2019__EPI_ISL_402128 spike protein CDS gc (1-1147)(Q965C_S1003C) WhcAg construct
auguucguguuccugguccuccugccccuggugagcucccagugcgugaaccucaccacccgcacgcagcugccgcccgccuacaccaacagcuucacccggggcgucuacuaccccgacaagguguuccgcuccagcgugcugcacuccacccaggaccucuuccugcccuucuucagcaacgucacgugguuccacgccauccacguguccgggaccaacggcaccaagcgguucgacaacccggugcugcccuucaacgacggggucuacuucgcgagcaccgagaaguccaacaucauccgcggcuggaucuucgggacgacccucgacagcaagacccagucccugcugaucgugaacaacgccaccaacguggucaucaaggugugcgaguuccaguucugcaacgaccccuuccucggcguguacuaccacaagaacaacaagagcuggauggaguccgaguuccgggucuacagcuccgccaacaacugcacguucgaguacgugagccagcccuuccugauggaccuggagggcaagcaggggaacuucaagaaccuccgcgaguucguguucaagaacaucgacggcuacuucaagaucuacuccaagcacaccccgaucaaccugguccgggaccugccccagggguucagcgcccucgagccccugguggaccugcccaucggcaucaacaucacccgcuuccagacccuccuggcccugcaccgguccuaccucacgccgggggacagcagcuccggcuggaccgcgggcgccgccgccuacuacgugggguaccugcagccccgcaccuuccugcucaaguacaacgagaacggcaccaucacggacgcggucgacugcgcccuggacccccugagcgagaccaagugcacccucaaguccuucaccguggagaaggggaucuaccagacgagcaacuuccgggugcagcccaccgaguccaucguccgcuucccgaacaucaccaaccugugccccuucggcgagguguucaacgccacccgguucgccagcgucuacgccuggaaccgcaagcggaucuccaacugcguggcggacuacagcgugcuguacaacuccgccagcuucuccacguucaagugcuacggcgucagccccaccaagcucaacgaccugugcuucaccaacguguacgccgacuccuucgugauccgcggggacgagguccggcagaucgcccccggccagaccgggaagaucgccgacuacaacuacaagcugccggacgacuucacgggcugcgugaucgcguggaacagcaacaaccucgacuccaaggucgggggcaacuacaacuaccuguaccgccuguuccgcaagagcaaccucaagcccuucgagcgggacaucuccaccgagaucuaccaggccggcagcacccccugcaacgggguggagggcuucaacugcuacuucccccugcaguccuacggguuccagccgaccaacggcgugggguaccagcccuaccggguggucgugcugagcuucgagcuccugcacgcccccgccacggugugcggccccaagaaguccaccaaccuggucaagaacaagugcgugaacuucaacuucaacggccucaccgggaccggcgugcugaccgagagcaacaagaaguuccugccguuccagcaguucgggcgcgacaucgccgacacgaccgacgcgguccgcgacccccagacccuggagauccucgacaucacccccugcagcuucggcgggguguccgugaucacgccgggcaccaacaccagcaaccaggucgccgugcuguaccaggacgugaacugcaccgagguccccguggccauccacgccgaccagcugacgcccaccuggcggguguacuccaccggcagcaacgucuuccagacccgcgccgggugccucaucggcgcggagcacgugaacaacuccuacgagugcgacauccccaucggggccggcaucugcgccagcuaccagacgcagaccaacuccccgcggcgcgcccggagcguggcgucccagagcaucaucgccuacaccaugucccugggcgccgagaacagcgucgccuacuccaacaacagcaucgccauccccaccaacuucacgaucuccgugaccaccgagauccugcccgugagcaugaccaagacgagcgucgacugcaccauguacaucugcggggacuccaccgagugcagcaaccuccugcugcaguacggcuccuucugcacccagcucaaccgcgcgcugacggggaucgccguggagcaggacaagaacacccaggagguguucgcccaggucaagcagaucuacaagacgcccccgaucaaggacuucggcggguucaacuucagccagauccugcccgaccccuccaagcccagcaagcgguccuucaucgaggaccuccuguucaacaaggugacccuggccgacgccggcuucaucaagcaguacggcgacugccucggggacaucgcggcccgcgaccugaucugcgcccagaaguucaacggccugaccgugcucccgccccugcugaccgacgagaugaucgcccaguacaccagcgcccuccuggcggggaccaucacguccggcuggaccuucggggccggcgccgcccugcagauccccuucgcgaugcagauggccuaccgguucaacggcaucggggucacccagaacgugcucuacgagaaccagaagcugaucgccaaccaguucaacagcgccaucggcaagauccaggacucccugagcuccaccgccagcgcgcucgggaagcugcaggacguggucaaccagaacgcccaggcccugaacacgcucgugaagugccuguccagcaacuucggcgccaucuccagcgugcugaacgacauccucucccgccuggacaaggucgaggccgaggugcagaucgaccggcugaucaccgggcgccuccagugccugcagaccuacgugacccagcagcugauccgggcggccgagauccgcgccagcgccaaccucgccgcgaccaagauguccgagugcguccugggccagagcaagcggguggacuucugcggcaagggguaccaccugauguccuucccccagagcgccccgcacggcguggucuuccuccacgugacguacguccccgcccaggagaagaacuucaccaccgcccccgcgaucugccacgacgggaaggcccacuucccccgcgagggcguguucguguccaacgggacccacugguucgucacgcagcggaacuucuacgagccgcagaucaucaccaccgacaacaccuucgugagcggcaacugcgacguggucaucggcaucgugaacaacacgguguacgacccccugcagcccgagcuggacuccggcgggggcgggagcgacaucgaccccuacaaggaguucggcagcuccuaccagcugcucaacuuccugccccuggacuucuuccccgaccucaacgcccugguggacaccgccaccgcgcuguacgaggaggagcucacggggcgcgagcacugcagcccccaccacaccgccauccggcaggcccuggucugcugggacgagcugaccaagcucaucgccuggauguccagcaacaucaccuccgagcagguccgcacgaucaucgugaaccacgucaacgacaccuggggccugaaggugcggcagagccugugguuccaccucuccugccugaccuucgggcagcacaccgugcaggaguuccuggucagcuucggcguguggauccgcacgcccgccccguaccggccgcccaacgcgccgauccucuccacccugccggagcacaccgugaucugcuga

SEQ ID NO: 11963 - RNA, 3906 nt, Artificial Sequence
  SARS-CoV-2/Wuhan/WIV05/2019__EPI_ISL_402128 spike protein CDS gc (1-1147)(F970C_G999C) WhcAg construct
auguucguguuccugguccuccugccccuggugagcucccagugcgugaaccucaccacccgcacgcagcugccgcccgccuacaccaacagcuucacccggggcgucuacuaccccgacaagguguuccgcuccagcgugcugcacuccacccaggaccucuuccugcccuucuucagcaacgucacgugguuccacgccauccacguguccgggaccaacggcaccaagcgguucgacaacccggugcugcccuucaacgacggggucuacuucgcgagcaccgagaaguccaacaucauccgcggcuggaucuucgggacgacccucgacagcaagacccagucccugcugaucgugaacaacgccaccaacguggucaucaaggugugcgaguuccaguucugcaacgaccccuuccucggcguguacuaccacaagaacaacaagagcuggauggaguccgaguuccgggucuacagcuccgccaacaacugcacguucgaguacgugagccagcccuuccugauggaccuggagggcaagcaggggaacuucaagaaccuccgcgaguucguguucaagaacaucgacggcuacuucaagaucuacuccaagcacaccccgaucaaccugguccgggaccugccccagggguucagcgcccucgagccccugguggaccugcccaucggcaucaacaucacccgcuuccagacccuccuggcccugcaccgguccuaccucacgccgggggacagcagcuccggcuggaccgcgggcgccgccgccuacuacgugggguaccugcagccccgcaccuuccugcucaaguacaacgagaacggcaccaucacggacgcggucgacugcgcccuggacccccugagcgagaccaagugcacccucaaguccuucaccguggagaaggggaucuaccagacgagcaacuuccgggugcagcccaccgaguccaucguccgcuucccgaacaucaccaaccugugccccuucggcgagguguucaacgccacccgguucgccagcgucuacgccuggaaccgcaagcggaucuccaacugcguggcggacuacagcgugcuguacaacuccgccagcuucuccacguucaagugcuacggcgucagccccaccaagcucaacgaccugugcuucaccaacguguacgccgacuccuucgugauccgcggggacgagguccggcagaucgcccccggccagaccgggaagaucgccgacuacaacuacaagcugccggacgacuucacgggcugcgugaucgcguggaacagcaacaaccucgacuccaaggucgggggcaacuacaacuaccuguaccgccuguuccgcaagagcaaccucaagcccuucgagcgggacaucuccaccgagaucuaccaggccggcagcacccccugcaacgggguggagggcuucaacugcuacuucccccugcaguccuacggguuccagccgaccaacggcgugggguaccagcccuaccggguggucgugcugagcuucgagcuccugcacgcccccgccacggugugcggccccaagaaguccaccaaccuggucaagaacaagugcgugaacuucaacuucaacggccucaccgggaccggcgugcugaccgagagcaacaagaaguuccugccguuccagcaguucgggcgcgacaucgccgacacgaccgacgcgguccgcgacccccagacccuggagauccucgacaucacccccugcagcuucggcgggguguccgugaucacgccgggcaccaacaccagcaaccaggucgccgugcuguaccaggacgugaacugcaccgagguccccguggccauccacgccgaccagcugacgcccaccuggcggguguacuccaccggcagcaacgucuuccagacccgcgccgggugccucaucggcgcggagcacgugaacaacuccuacgagugcgacauccccaucggggccggcaucugcgccagcuaccagacgcagaccaacuccccgcggcgcgcccggagcguggcgucccagagcaucaucgccuacaccaugucccugggcgccgagaacagcgucgccuacuccaacaacagcaucgccauccccaccaacuucacgaucuccgugaccaccgagauccugcccgugagcaugaccaagacgagcgucgacugcaccauguacaucugcggggacuccaccgagugcagcaaccuccugcugcaguacggcuccuucugcacccagcucaaccgcgcgcugacggggaucgccguggagcaggacaagaacacccaggagguguucgcccaggucaagcagaucuacaagacgcccccgaucaaggacuucggcggguucaacuucagccagauccugcccgaccccuccaagcccagcaagcgguccuucaucgaggaccuccuguucaacaaggugacccuggccgacgccggcuucaucaagcaguacggcgacugccucggggacaucgcggcccgcgaccugaucugcgcccagaaguucaacggccugaccgugcucccgccccugcugaccgacgagaugaucgcccaguacaccagcgcccuccuggcggggaccaucacguccggcuggaccuucggggccggcgccgcccugcagauccccuucgcgaugcagauggccuaccgguucaacggcaucggggucacccagaacgugcucuacgagaaccagaagcugaucgccaaccaguucaacagcgccaucggcaagauccaggacucccugagcuccaccgccagcgcgcucgggaagcugcaggacguggucaaccagaacgcccaggcccugaacacgcucgugaagcagcuguccagcaacugcggcgccaucuccagcgugcugaacgacauccucucccgccuggacaaggucgaggccgaggugcagaucgaccggcugaucaccugucgccuccagagccugcagaccuacgugacccagcagcugauccgggcggccgagauccgcgccagcgccaaccucgccgcgaccaagauguccgagugcguccugggccagagcaagcggguggacuucugcggcaagggguaccaccugauguccuucccccagagcgccccgcacggcguggucuuccuccacgugacguacguccccgcccaggagaagaacuucaccaccgcccccgcgaucugccacgacgggaaggcccacuucccccgcgagggcguguucguguccaacgggacccacugguucgucacgcagcggaacuucuacgagccgcagaucaucaccaccgacaacaccuucgugagcggcaacugcgacguggucaucggcaucgugaacaacacgguguacgacccccugcagcccgagcuggacuccggcgggggcgggagcgacaucgaccccuacaaggaguucggcagcuccuaccagcugcucaacuuccugccccuggacuucuuccccgaccucaacgcccugguggacaccgccaccgcgcuguacgaggaggagcucacggggcgcgagcacugcagcccccaccacaccgccauccggcaggcccuggucugcugggacgagcugaccaagcucaucgccuggauguccagcaacaucaccuccgagcagguccgcacgaucaucgugaaccacgucaacgacaccuggggccugaaggugcggcagagccugugguuccaccucuccugccugaccuucgggcagcacaccgugcaggaguuccuggucagcuucggcguguggauccgcacgcccgccccguaccggccgcccaacgcgccgauccucuccacccugccggagcacaccgugaucugcuga

SEQ ID NO: 11964 - RNA, 3906 nt, Artificial Sequence
  SARS-CoV-2/Wuhan/WIV05/2019__EPI_ISL_402128 spike protein CDS gc (1-1147)(A972C_R995C) WhcAg construct
auguucguguuccugguccuccugccccuggugagcucccagugcgugaaccucaccacccgcacgcagcugccgcccgccuacaccaacagcuucacccggggcgucuacuaccccgacaagguguuccgcuccagcgugcugcacuccacccaggaccucuuccugcccuucuucagcaacgucacgugguuccacgccauccacguguccgggaccaacggcaccaagcgguucgacaacccggugcugcccuucaacgacggggucuacuucgcgagcaccgagaaguccaacaucauccgcggcuggaucuucgggacgacccucgacagcaagacccagucccugcugaucgugaacaacgccaccaacguggucaucaaggugugcgaguuccaguucugcaacgaccccuuccucggcguguacuaccacaagaacaacaagagcuggauggaguccgaguuccgggucuacagcuccgccaacaacugcacguucgaguacgugagccagcccuuccugauggaccuggagggcaagcaggggaacuucaagaaccuccgcgaguucguguucaagaacaucgacggcuacuucaagaucuacuccaagcacaccccgaucaaccugguccgggaccugccccagggguucagcgcccucgagccccugguggaccugcccaucggcaucaacaucacccgcuuccagacccuccuggcccugcaccgguccuaccucacgccgggggacagcagcuccggcuggaccgcgggcgccgccgccuacuacgugggguaccugcagccccgcaccuuccugcucaaguacaacgagaacggcaccaucacggacgcggucgacugcgcccuggacccccugagcgagaccaagugcacccucaaguccuucaccguggagaaggggaucuaccagacgagcaacuuccgggugcagcccaccgaguccaucguccgcuucccgaacaucaccaaccugugccccuucggcgagguguucaacgccacccgguucgccagcgucuacgccuggaaccgcaagcggaucuccaacugcguggcggacuacagcgugcuguacaacuccgccagcuucuccacguucaagugcuacggcgucagccccaccaagcucaacgaccugugcuucaccaacguguacgccgacuccuucgugauccgcggggacgagguccggcagaucgcccccggccagaccgggaagaucgccgacuacaacuacaagcugccggacgacuucacgggcugcgugaucgcguggaacagcaacaaccucgacuccaaggucgggggcaacuacaacuaccuguaccgccuguuccgcaagagcaaccucaagcccuucgagcgggacaucuccaccgagaucuaccaggccggcagcacccccugcaacgggguggagggcuucaacugcuacuucccccugcaguccuacggguuccagccgaccaacggcgugggguaccagcccuaccggguggucgugcugagcuucgagcuccugcacgcccccgccacggugugcggccccaagaaguccaccaaccuggucaagaacaagugcgugaacuucaacuucaacggccucaccgggaccggcgugcugaccgagagcaacaagaaguuccugccguuccagcaguucgggcgcgacaucgccgacacgaccgacgcgguccgcgacccccagacccuggagauccucgacaucacccccugcagcuucggcgggguguccgugaucacgccgggcaccaacaccagcaaccaggucgccgugcuguaccaggacgugaacugcaccgagguccccguggccauccacgccgaccagcugacgcccaccuggcggguguacuccaccggcagcaacgucuuccagacccgcgccgggugccucaucggcgcggagcacgugaacaacuccuacgagugcgacauccccaucggggccggcaucugcgccagcuaccagacgcagaccaacuccccgcggcgcgcccggagcguggcgucccagagcaucaucgccuacaccaugucccugggcgccgagaacagcgucgccuacuccaacaacagcaucgccauccccaccaacuucacgaucuccgugaccaccgagauccugcccgugagcaugaccaagacgagcgucgacugcaccauguacaucugcggggacuccaccgagugcagcaaccuccugcugcaguacggcuccuucugcacccagcucaaccgcgcgcugacggggaucgccguggagcaggacaagaacacccaggagguguucgcccaggucaagcagaucuacaagacgcccccgaucaaggacuucggcggguucaacuucagccagauccugcccgaccccuccaagcccagcaagcgguccuucaucgaggaccuccuguucaacaaggugacccuggccgacgccggcuucaucaagcaguacggcgacugccucggggacaucgcggcccgcgaccugaucugcgcccagaaguucaacggccugaccgugcucccgccccugcugaccgacgagaugaucgcccaguacaccagcgcccuccuggcggggaccaucacguccggcuggaccuucggggccggcgccgcccugcagauccccuucgcgaugcagauggccuaccgguucaacggcaucggggucacccagaacgugcucuacgagaaccagaagcugaucgccaaccaguucaacagcgccaucggcaagauccaggacucccugagcuccaccgccagcgcgcucgggaagcugcaggacguggucaaccagaacgcccaggcccugaacacgcucgugaagcagcuguccagcaacuucggcugcaucuccagcgugcugaacgacauccucucccgccuggacaaggucgaggccgaggugcagaucgacugccugaucaccgggcgccuccagagccugcagaccuacgugacccagcagcugauccgggcggccgagauccgcgccagcgccaaccucgccgcgaccaagauguccgagugcguccugggccagagcaagcggguggacuucugcggcaagggguaccaccugauguccuucccccagagcgccccgcacggcguggucuuccuccacgugacguacguccccgcccaggagaagaacuucaccaccgcccccgcgaucugccacgacgggaaggcccacuucccccgcgagggcguguucguguccaacgggacccacugguucgucacgcagcggaacuucuacgagccgcagaucaucaccaccgacaacaccuucgugagcggcaacugcgacguggucaucggcaucgugaacaacacgguguacgacccccugcagcccgagcuggacuccggcgggggcgggagcgacaucgaccccuacaaggaguucggcagcuccuaccagcugcucaacuuccugccccuggacuucuuccccgaccucaacgcccugguggacaccgccaccgcgcuguacgaggaggagcucacggggcgcgagcacugcagcccccaccacaccgccauccggcaggcccuggucugcugggacgagcugaccaagcucaucgccuggauguccagcaacaucaccuccgagcagguccgcacgaucaucgugaaccacgucaacgacaccuggggccugaaggugcggcagagccugugguuccaccucuccugccugaccuucgggcagcacaccgugcaggaguuccuggucagcuucggcguguggauccgcacgcccgccccguaccggccgcccaacgcgccgauccucuccacccugccggagcacaccgugaucugcuga

SEQ ID NO: 11965 - RNA, 3906 nt, Artificial Sequence
  SARS-CoV-2/Wuhan/WIV05/2019__EPI_ISL_402128 spike protein CDS gc (1-1147)(A890C_V1040C) WhcAg construct
auguucguguuccugguccuccugccccuggugagcucccagugcgugaaccucaccacccgcacgcagcugccgcccgccuacaccaacagcuucacccggggcgucuacuaccccgacaagguguuccgcuccagcgugcugcacuccacccaggaccucuuccugcccuucuucagcaacgucacgugguuccacgccauccacguguccgggaccaacggcaccaagcgguucgacaacccggugcugcccuucaacgacggggucuacuucgcgagcaccgagaaguccaacaucauccgcggcuggaucuucgggacgacccucgacagcaagacccagucccugcugaucgugaacaacgccaccaacguggucaucaaggugugcgaguuccaguucugcaacgaccccuuccucggcguguacuaccacaagaacaacaagagcuggauggaguccgaguuccgggucuacagcuccgccaacaacugcacguucgaguacgugagccagcccuuccugauggaccuggagggcaagcaggggaacuucaagaaccuccgcgaguucguguucaagaacaucgacggcuacuucaagaucuacuccaagcacaccccgaucaaccugguccgggaccugccccagggguucagcgcccucgagccccugguggaccugcccaucggcaucaacaucacccgcuuccagacccuccuggcccugcaccgguccuaccucacgccgggggacagcagcuccggcuggaccgcgggcgccgccgccuacuacgugggguaccugcagccccgcaccuuccugcucaaguacaacgagaacggcaccaucacggacgcggucgacugcgcccuggacccccugagcgagaccaagugcacccucaaguccuucaccguggagaaggggaucuaccagacgagcaacuuccgggugcagcccaccgaguccaucguccgcuucccgaacaucaccaaccugugccccuucggcgagguguucaacgccacccgguucgccagcgucuacgccuggaaccgcaagcggaucuccaacugcguggcggacuacagcgugcuguacaacuccgccagcuucuccacguucaagugcuacggcgucagccccaccaagcucaacgaccugugcuucaccaacguguacgccgacuccuucgugauccgcggggacgagguccggcagaucgcccccggccagaccgggaagaucgccgacuacaacuacaagcugccggacgacuucacgggcugcgugaucgcguggaacagcaacaaccucgacuccaaggucgggggcaacuacaacuaccuguaccgccuguuccgcaagagcaaccucaagcccuucgagcgggacaucuccaccgagaucuaccaggccggcagcacccccugcaacgggguggagggcuucaacugcuacuucccccugcaguccuacggguuccagccgaccaacggcgugggguaccagcccuaccggguggucgugcugagcuucgagcuccugcacgcccccgccacggugugcggccccaagaaguccaccaaccuggucaagaacaagugcgugaacuucaacuucaacggccucaccgggaccggcgugcugaccgagagcaacaagaaguuccugccguuccagcaguucgggcgcgacaucgccgacacgaccgacgcgguccgcgacccccagacccuggagauccucgacaucacccccugcagcuucggcgggguguccgugaucacgccgggcaccaacaccagcaaccaggucgccgugcuguaccaggacgugaacugcaccgagguccccguggccauccacgccgaccagcugacgcccaccuggcggguguacuccaccggcagcaacgucuuccagacccgcgccgggugccucaucggcgcggagcacgugaacaacuccuacgagugcgacauccccaucggggccggcaucugcgccagcuaccagacgcagaccaacuccccgcggcgcgcccggagcguggcgucccagagcaucaucgccuacaccaugucccugggcgccgagaacagcgucgccuacuccaacaacagcaucgccauccccaccaacuucacgaucuccgugaccaccgagauccugcccgugagcaugaccaagacgagcgucgacugcaccauguacaucugcggggacuccaccgagugcagcaaccuccugcugcaguacggcuccuucugcacccagcucaaccgcgcgcugacggggaucgccguggagcaggacaagaacacccaggagguguucgcccaggucaagcagaucuacaagacgcccccgaucaaggacuucggcggguucaacuucagccagauccugcccgaccccuccaagcccagcaagcgguccuucaucgaggaccuccuguucaacaaggugacccuggccgacgccggcuucaucaagcaguacggcgacugccucggggacaucgcggcccgcgaccugaucugcgcccagaaguucaacggccugaccgugcucccgccccugcugaccgacgagaugaucgcccaguacaccagcgcccuccuggcggggaccaucacguccggcuggaccuucgggugcggcgccgcccugcagauccccuucgcgaugcagauggccuaccgguucaacggcaucggggucacccagaacgugcucuacgagaaccagaagcugaucgccaaccaguucaacagcgccaucggcaagauccaggacucccugagcuccaccgccagcgcgcucgggaagcugcaggacguggucaaccagaacgcccaggcccugaacacgcucgugaagcagcuguccagcaacuucggcgccaucuccagcgugcugaacgacauccucucccgccuggacaaggucgaggccgaggugcagaucgaccggcugaucaccgggcgccuccagagccugcagaccuacgugacccagcagcugauccgggcggccgagauccgcgccagcgccaaccucgccgcgaccaagauguccgagugcguccugggccagagcaagcggugcgacuucugcggcaagggguaccaccugauguccuucccccagagcgccccgcacggcguggucuuccuccacgugacguacguccccgcccaggagaagaacuucaccaccgcccccgcgaucugccacgacgggaaggcccacuucccccgcgagggcguguucguguccaacgggacccacugguucgucacgcagcggaacuucuacgagccgcagaucaucaccaccgacaacaccuucgugagcggcaacugcgacguggucaucggcaucgugaacaacacgguguacgacccccugcagcccgagcuggacuccggcgggggcgggagcgacaucgaccccuacaaggaguucggcagcuccuaccagcugcucaacuuccugccccuggacuucuuccccgaccucaacgcccugguggacaccgccaccgcgcuguacgaggaggagcucacggggcgcgagcacugcagcccccaccacaccgccauccggcaggcccuggucugcugggacgagcugaccaagcucaucgccuggauguccagcaacaucaccuccgagcagguccgcacgaucaucgugaaccacgucaacgacaccuggggccugaaggugcggcagagccugugguuccaccucuccugccugaccuucgggcagcacaccgugcaggaguuccuggucagcuucggcguguggauccgcacgcccgccccguaccggccgcccaacgcgccgauccucuccacccugccggagcacaccgugaucugcuga

SEQ ID NO: 11966 - RNA, 3906 nt, Artificial Sequence
  SARS-CoV-2/Wuhan/WIV05/2019__EPI_ISL_402128 spike protein CDS gc (1-1147)(T874C_S1055C) WhcAg construct
auguucguguuccugguccuccugccccuggugagcucccagugcgugaaccucaccacccgcacgcagcugccgcccgccuacaccaacagcuucacccggggcgucuacuaccccgacaagguguuccgcuccagcgugcugcacuccacccaggaccucuuccugcccuucuucagcaacgucacgugguuccacgccauccacguguccgggaccaacggcaccaagcgguucgacaacccggugcugcccuucaacgacggggucuacuucgcgagcaccgagaaguccaacaucauccgcggcuggaucuucgggacgacccucgacagcaagacccagucccugcugaucgugaacaacgccaccaacguggucaucaaggugugcgaguuccaguucugcaacgaccccuuccucggcguguacuaccacaagaacaacaagagcuggauggaguccgaguuccgggucuacagcuccgccaacaacugcacguucgaguacgugagccagcccuuccugauggaccuggagggcaagcaggggaacuucaagaaccuccgcgaguucguguucaagaacaucgacggcuacuucaagaucuacuccaagcacaccccgaucaaccugguccgggaccugccccagggguucagcgcccucgagccccugguggaccugcccaucggcaucaacaucacccgcuuccagacccuccuggcccugcaccgguccuaccucacgccgggggacagcagcuccggcuggaccgcgggcgccgccgccuacuacgugggguaccugcagccccgcaccuuccugcucaaguacaacgagaacggcaccaucacggacgcggucgacugcgcccuggacccccugagcgagaccaagugcacccucaaguccuucaccguggagaaggggaucuaccagacgagcaacuuccgggugcagcccaccgaguccaucguccgcuucccgaacaucaccaaccugugccccuucggcgagguguucaacgccacccgguucgccagcgucuacgccuggaaccgcaagcggaucuccaacugcguggcggacuacagcgugcuguacaacuccgccagcuucuccacguucaagugcuacggcgucagccccaccaagcucaacgaccugugcuucaccaacguguacgccgacuccuucgugauccgcggggacgagguccggcagaucgcccccggccagaccgggaagaucgccgacuacaacuacaagcugccggacgacuucacgggcugcgugaucgcguggaacagcaacaaccucgacuccaaggucgggggcaacuacaacuaccuguaccgccuguuccgcaagagcaaccucaagcccuucgagcgggacaucuccaccgagaucuaccaggccggcagcacccccugcaacgggguggagggcuucaacugcuacuucccccugcaguccuacggguuccagccgaccaacggcgugggguaccagcccuaccggguggucgugcugagcuucgagcuccugcacgcccccgccacggugugcggccccaagaaguccaccaaccuggucaagaacaagugcgugaacuucaacuucaacggccucaccgggaccggcgugcugaccgagagcaacaagaaguuccugccguuccagcaguucgggcgcgacaucgccgacacgaccgacgcgguccgcgacccccagacccuggagauccucgacaucacccccugcagcuucggcgggguguccgugaucacgccgggcaccaacaccagcaaccaggucgccgugcuguaccaggacgugaacugcaccgagguccccguggccauccacgccgaccagcugacgcccaccuggcggguguacuccaccggcagcaacgucuuccagacccgcgccgggugccucaucggcgcggagcacgugaacaacuccuacgagugcgacauccccaucggggccggcaucugcgccagcuaccagacgcagaccaacuccccgcggcgcgcccggagcguggcgucccagagcaucaucgccuacaccaugucccugggcgccgagaacagcgucgccuacuccaacaacagcaucgccauccccaccaacuucacgaucuccgugaccaccgagauccugcccgugagcaugaccaagacgagcgucgacugcaccauguacaucugcggggacuccaccgagugcagcaaccuccugcugcaguacggcuccuucugcacccagcucaaccgcgcgcugacggggaucgccguggagcaggacaagaacacccaggagguguucgcccaggucaagcagaucuacaagacgcccccgaucaaggacuucggcggguucaacuucagccagauccugcccgaccccuccaagcccagcaagcgguccuucaucgaggaccuccuguucaacaaggugacccuggccgacgccggcuucaucaagcaguacggcgacugccucggggacaucgcggcccgcgaccugaucugcgcccagaaguucaacggccugaccgugcucccgccccugcugaccgacgagaugaucgcccaguacugcagcgcccuccuggcggggaccaucacguccggcuggaccuucggggccggcgccgcccugcagauccccuucgcgaugcagauggccuaccgguucaacggcaucggggucacccagaacgugcucuacgagaaccagaagcugaucgccaaccaguucaacagcgccaucggcaagauccaggacucccugagcuccaccgccagcgcgcucgggaagcugcaggacguggucaaccagaacgcccaggcccugaacacgcucgugaagcagcuguccagcaacuucggcgccaucuccagcgugcugaacgacauccucucccgccuggacaaggucgaggccgaggugcagaucgaccggcugaucaccgggcgccuccagagccugcagaccuacgugacccagcagcugauccgggcggccgagauccgcgccagcgccaaccucgccgcgaccaagauguccgagugcguccugggccagagcaagcggguggacuucugcggcaagggguaccaccugauguccuucccccagugcgccccgcacggcguggucuuccuccacgugacguacguccccgcccaggagaagaacuucaccaccgcccccgcgaucugccacgacgggaaggcccacuucccccgcgagggcguguucguguccaacgggacccacugguucgucacgcagcggaacuucuacgagccgcagaucaucaccaccgacaacaccuucgugagcggcaacugcgacguggucaucggcaucgugaacaacacgguguacgacccccugcagcccgagcuggacuccggcgggggcgggagcgacaucgaccccuacaaggaguucggcagcuccuaccagcugcucaacuuccugccccuggacuucuuccccgaccucaacgcccugguggacaccgccaccgcgcuguacgaggaggagcucacggggcgcgagcacugcagcccccaccacaccgccauccggcaggcccuggucugcugggacgagcugaccaagcucaucgccuggauguccagcaacaucaccuccgagcagguccgcacgaucaucgugaaccacgucaacgacaccuggggccugaaggugcggcagagccugugguuccaccucuccugccugaccuucgggcagcacaccgugcaggaguuccuggucagcuucggcguguggauccgcacgcccgccccguaccggccgcccaacgcgccgauccucuccacccugccggagcacaccgugaucugcuga

SEQ ID NO: 11967 - RNA, 3822 nt, Artificial Sequence
  SARS-CoV-2/Wuhan/WIV05/2019__EPI_ISL_402128 spike protein CDS human (1-1273)
auguucguguuucugguccuccuuccccugguuagcucccagugcgugaacuugaccacaagaacucaauuaccuccagccuacacuaauucuuucaccaggggcguauauuacccggacaagguguuucggucaaguguccugcacagcacacaggaucuauuccuccccuuuuucuccaacgugacuugguuucaugcuauccacguuucugggaccaauggaacaaaacgcuucgacaacccugugcugccauuuaaugauggugucuauuucgcaucgaccgagaagucaaacauuauacgaggcuggaucuuugggacuacacuugacagcaaaacccagagucuguugauugugaauaacgccacgaauguaguuaucaaggugugugaguuccaguuuugcaacgaucccuuccucggagucuacuaucauaaaaauaacaaguccuggauggagucugaguuccguguguacagcuccgcgaauaacuguacuuuugaauaugugucacaaccuuuccugauggaccuggaaggcaagcaggguaauuuuaaaaaccucagagaguucgucuuuaagaacauugauggguacuucaaaaucuacaguaagcacaccccaauaaauuuaguuagggaccugccccagggauuuagcgcucuugagccuuugguggaucugccaaucggcauuaacaucacacgguuccagacucuacucgcccugcaucgcucuuaucuuaccccgggcgacuccucaagcggguggacagcaggagccgcugcauacuauguagguuaccugcaacccagaaccuuuuugcucaaauauaaugaaaacggcacgauuacugaugccguggacugcgcucuggauccuuuaagugagacaaaguguacccugaagucuuucacugucgaaaaagggaucuaccagacauccaauuuuagggugcagccaaccgagagcauaguucgguuccccaacauuacgaaucucugcccuuuuggagagguguucaacgccacccgcuucgcgucggucuaugcauggaaucgaaagagaaucucuaacuguguggccgacuacuccguacuuuacaauucagcuaguuuuagcacauucaaaugcuauggcguuuccccaacuaagcugaacgacuuguguuuuaccaauguguacgccgauucuuucgucauuaggggugacgaagugcggcagaucgcacccgggcaaacaggaaaaaucgcugauuauaacuacaagcuaccggacgauuuuacuggcugcgucauugccuggaauagcaacaaccuggacucaaaagugggcgggaauuauaacuaccucuaucgucuguuccgcaagaguaaucuuaagccuuuugagagagauauauccaccgaaaucuaccaggcgggaagcacacccuguaacgguguugagggcuucaauugcuacuuuccacugcagucuuauggguuccaaccuaccaacggagugggcuaccagcccuauaggguagucguguugucauuugaacuccugcacgccccagcaacuguuugcggucccaaaaagaguacgaauuuagugaaaaacaagugugucaauuucaacuuuaaugggcugacaggcaccggagugcuaacugagagcaacaaaaaguuccucccuuuccagcaguuuggccgggacauugcugauaccacagacgccguacgagauccacaaacccuggagauccuugacauaacuccgugcuccuucgggggagugucuguuauuacacccgguacgaauaccucgaaccaggucgcuguguuguaccaggacgugaauuguacugaagucccuguugccauccacgcagaucagcugacaccaaccuggcgcguguauagcacaggcuccaacguguuucaaacuagagccgggugccucaucggagcugagcauguaaacaauucauacgaaugugacauucccaucggcgcggguauuugcgcaaguuaucagacccagacgaacucuccuaggcgggcccgcagcgucgcuucccagucaauaaucgccuacaccaugagccugggggcagaaaauucuguggccuacuccaacaauaguauugcuaucccaacaaacuucacuaucagcguuaccacagaaauucuucccgugucuaugacuaagaccuccgucgauuguacgauguauauaugcggcgacucaacagaguguaguaaucuguugcuccaauacggcagcuuuugcacccagcugaacagagccuuaacuggaaucgcaguggagcaggauaaaaauacacaggaaguuuucgcgcaagugaagcagauuuauaaaaccccgccuaucaaggacuuugggggauucaacuuuucgcagauucugccagaucccuccaaaccuucuaagaggagcuucaucgaggaccuacucuuuaauaagguaacucuggcugaugccgguuucauaaaacaauacggcgacugucuuggggauaucgcagcccgugacuugauuugcgcucagaaguucaacggacugaccguccugcccccacucuuaacagaugaaaugaucgcccaguauacgucagcacugcuugcuggcaccauuacgagugguuggacauuuggggccggcgcggccuugcagaucccuuucgcuaugcaaauggcauaccgguuuaauggaauaggcgugacccagaacgugcucuaugagaaucagaaacugauugccaaccaguucaacuccgcuaucgggaagauucaagacucucuaagcuccacagccucagcacugggaaaacuccaggacgucguuaaucagaacgcgcaggcccugaauacucuugugaagcaauugagcaguaacuuuggcgcuaucucuuccguacugaaugauauauuaagccgacucgacaagguggaagccgagguccagaucgauagacugauuaccgguaggcuucagucgcugcaaacguacgugacacagcaguugauccgcgcagcugagauucgggccucagcaaaccucgccgcuaccaaaaugucugaaugcguucuggggcagaguaagagaguggacuucuguggaaaaggcuaccaccuaauguccuuuccccaaagcgcgccacauggugucguguuccugcacguuacuuaugugccggcccaggagaagaauuuuaccacagcuccugcaaucugccacgauggcaaagcccauuuccccagggaaggggucuuuguaucuaacggaacucacugguucgugacccagcgcaauuuuuacgagccacagauaauuacaacggacaacaccuucguuagcggcaauugugauguggucaucgggaucgugaacaauacuguauaugacccccuccaaccugagcuggauuccuucaaggaggaacuugacaaauacuuuaagaaccauacaucaccagauguggacuugggagauauuaguggcaucaaugccagcgucguuaacauucagaaggaaauagaccgacugaaugagguggcuaaaaacuuaaacgaaucucucaucgaccugcaggagcuugguaaguaugagcaguacauuaaauggcccugguauaucuggcugggguucauugcaggacuaaucgccauagugauggucaccaucaugcucugcuguaugacuuccugcuguucaugccugaagggcuguugcaguugugguagcugcugcaaauuugaugaagacgauuccgagccuguguugaagggcguuaagcugcacuacacauga

SEQ ID NO: 11968 - RNA, 3810 nt, Artificial Sequence
  SARS-CoV-2/bat/Yunnan/RaTG13/2013__EPI_ISL_402131 spike protein CDS human (1-1269)
auguucguguuucugguccuccuuccccugguuagcucccagugcgugaacuugaccacaagaacucaauuaccuccagccuacaccaauucuucaacgaggggcguauauuacccggacaagguguuccggaguagcguccugcaccuaacacaggaucucuuucugcccuucuuuuccaacgugacuugguuccaugcuauccacguuucugggaccaauggaauuaaacgcuuugacaacccugugcuuccauucaaugauggugucuauuuugcaucgacagagaagucaaacauaauccgaggcuggauuuucgggaccacucuggacagcaaaacacagaguuugcucaucgugaauaacgccaccaauguaguuauuaaggugugugaauuucaguucugcaacgaucccuuucugggagucuacuaucauaaaaauaacaaguccuggauggagucugaguuccguguguacagcuccgcgaauaacuguacguucgaauaugugucacaaccuuuucugauggaccucgaaggcaagcaggguaauuucaaaaacuuaagagaguuugucuucaagaacaucgauggguacuuuaaaauauacaguaagcacacuccaaucaaucugguuagggaccuucccccuggauucagcgcuuuggagccacugguggaucuaccgauuggcaucaacauuacccgguuucagacacuccuggcccuucaucgcucuuaucugacucccggcgacuccucaagcggguggaccgcaggagccgcugcauacuauguagguuacuugcagccuagaacauuccuccugaaauauaaugaaaacggcaccaucacggaugccguggacugcgcuuuagauccacugagugagacuaaguguacacucaagucuuuuaccgucgaaaaagggauauaccaaacuuccaauuucagggugcagcccacagacagcauuguucgguuuccuaacaucaccaaucuuugcccauucggagagguguuuaacgccacgaccuucgcgucggucuaugcauggaaucgcaagcgaauuucuaacuguguggccgacuacuccguacuguacaauucaacaaguuucagcacuuuuaaaugcuauggcguuucccccaccaaguugaacgaucuauguuucacaaauguguacgcugacucuuuugucaucacuggugaugaggugagacagaucgccccggggcagaccggaaaaauugcagacuauaacuacaagcugccugaugacuucacaggcugcgucauagcuuggaauagcaaacacaucgaugccaaggaaggcgggaacuuuaacuaucucuacaggcuguuccggaaggcgaaucuuaaacccuuugagcgugacauuucaaccgaaaucuaucaagccggaaguaagccauguaacggucagacuggccugaauugcuacuacccuuuguaucgcuacggguucuaucccacggauggagugggccaccagccauacagaguugugguacucuccuuugagcuguuaaacgcacccgcuacagucugcgguccuaaaaagagcaccaaucuggugaaaaacaaguguguuaauuucaacuuuaaugggcuaacuggcaccggagugcucacagaaucuaacaagaaauuccugccauuucaacaguucggcagggacauagccgauaccacugacgcuguccgggacccgcagacacuugagauuuuggauaucacgcccugcucauucgggggagugaguguaaucaccccugguacuaaugccagcaaccagguggcaguucuguaucaagacgucaauuguacagaggugccaguggccauucaugcugaucagcucacccccacauggcgagucuacuccacuggcucuaacguuuuucagacccgcgcggggugccugaucggagcagaacacgugaauaacucguaugagugugacauuccuauaggcgccgguaucugcgcuagcuaccagacgcaaaccaacuccagaucaguggccagucagucuauuaucgcauacacaaugagccuuggggccgaaaauuccguagcuuauucaaacaauagcaucgccauuccaacuaacuucaccauaucugucacaacugagauccugcccguguccaugaccaagacgaguguugauuguacaauguacauuugcggcgacagcaccgaauguucuaauuugcuccugcaguauggauccuuuugcacucaguuaaacagggcacugacaggcaucgcgguggagcaagauaaaaauacccaggaggucuucgcucaggugaagcagauuuacaaaacuccgccuaucaaggacuuugggggauucaacuuuucacaaauacuaccagaucccaguaagccuagcaaacggucguucaucgaagaccuccuguuuaauaagguuacccuugccgaugcagguuucauuaaacaguauggcgacuguuugggggauaucgccgcucgcgaccugauuugcgcccagaaguuuaacggacucacagugcugcccccauuacugacggacgagaugaucgcacaauacaccuccgcucuuuuggccggcacuauaacaucugguuggaccuucggggcgggcgccgcucuccagauuccuuucgcaaugcagauggccuauagauuuaauggaaucggcguaacacagaacguccuguacgaaaaucaaaaacuaauugcuaaccaguucaauagcgccaucgggaagauacaggauucacugaguuccacugcaucugcgcucggaaagcugcaggacguggugaaccaaaacgcccaggcucuuaauaccuuggucaaacagcugagcuccaacuuuggcgccaucucaagcguuuuaaaugauauucucaguaggcuggacaagguggaggcagaaguacagaucgaucgucuuauuacgggucggcugcaaucuuugcagacauacgugacccagcaacucauccgagcugccgagauaagagcauccgccaaccuggcugcgacuaaaaugagcgagugcguccuagggcagucgaagaggguggacuucuguggaaaaggcuaucaucugaugucauuuccccagucugccccacacgguguuguguuccuccacgucaccuacgugccggcacaggaaaagaauuuuacaacugcuccugccauuugccaugauggcaaagcccacuucccccgcgaggggguuuuugugaguaacggaacccauugguucgucacacaacggaauuuuuaugaaccacagaucaucacgaccgacaacacuuucguauccggcagcugugaugugguuauugggaucgugaauaacacagucuacgacccccugcagccugagcuugauucuuuuaaggaggaauuggacaaguauuucaaaaaucacaccagcccagauguggaccugggagacauuuccggcauaaacgcuucaguagugaauauccagaaggagauugauagauuaaacgaagucgccaaaaaucucaacgagagucugaucgaccuucaagaacuggguaaguacgagcaguauauuaaauggcccugguacaucuggcuaggguucauagcaggacucaucgcgauuaucaugguuacuauuaugcugugcuguaugacaagcugcuguucuugcuugaagggcuguugcuccugugguucaugcugcaaguuugaugaggacgauagugaaccugugcugaaaggcgugaaguuacauuacaccuga

SEQ ID NO: 11969 - RNA, 3822 nt, Artificial Sequence
  SARS-CoV-2/Wuhan/HBCDC-HB-01/2019__EPI_ISL_402132 spike protein CDS human (1-1273)
auguucguguuucugguccuccuuccccugguuagcucccagugcgugaacuugaccacaagaacucaauuaccuccagccuacacuaauucuaucaccaggggcguauauuacccggacaagguguuccggucaaguguccugcacagcacacaggaucuauuucuccccuucuuuuccaacgugacuugguuccaugcuauucacguuucugggaccaauggaacaaaacgcuuugacaacccugugcugccauucaaugauggugucuauuuugcaucgaccgagaagucaaacauaauccgaggcuggauuuucgggacuacacuugacagcaaaacccagagucuguugaucgugaauaacgccacgaauguaguuauuaaggugugugaauuucaguucugcaacgaucccuuucucggagucuacuaucauaaaaauaacaaguccuggauggagucugaguuccguguguacagcuccgcgaauaacuguacuuucgaguaugugucacaaccuuuucugauggaccuggaaggcaagcaggguaauuucaaaaaccucagagaguuugucuucaagaacaucgauggguacuuuaaaauauacaguaagcacaccccaaucaauuuaguuagggaccugccccagggauucagcgcucuugagccuuugguggaucugccaauuggcaucaacauuacacgguuucagacucuacucgcccugcaucgcucuuaucuuaccccgggcgacuccucaagcggguggacagcaggagccgcugcauacuauguagguuaccugcaacccagaaccuucuugcucaaauauaaugaaaacggcacgaucacugaugccguggacugcgcucuggauccuuuaagugagacaaaguguacccugaagucuuuuacugucgaaaaagggauauaccagacauccaauuucagggugcagccaaccgagagcauuguucgguuucccaacaucacgaaucucugcccuuucggagagguguuuaacgccacccgcuucgcgucggucuaugcauggaaucgaaagagaauuucuaacuguguggccgacuacuccguacuuuacaauucagcuaguuucagcacauuuaaaugcuauggcguuuccccaacuaagcugaacgacuuguguuucaccaauguguacgccgauucuuuugucaucaggggugacgaagugcggcagaucgcacccgggcaaacaggaaaaauugcugauuauaacuacaagcuaccggacgauuucacuggcugcgucauagccuggaauagcaacaaccuggacucaaaagugggcgggaauuauaacuaccucuaucgucuguuucgcaagaguaaucuuaagccuuucgagagagauaucuccaccgaaauuuaccaggcgggaagcacacccuguaacgguguugagggcuuuaauugcuacuucccacugcagucuuauggguuucaaccuaccaacggagugggcuaccagcccuauaggguagucguguugucauucgaacuccugcacgccccagcaacuguuugcggucccaaaaagaguacgaauuuagugaaaaacaagugugucaauuuuaacuucaaugggcugacaggcaccggagugcuaacugagagcaacaaaaaguuucucccuuuccagcaguucggccgggacaucgcugauaccacagacgccguacgagauccacaaacccuggagauacuugacauuacuccgugcuccuuugggggagugucuguuaucacacccgguacgaauaccucgaaccaggucgcuguguuguaccaggacgugaauuguacugaagucccuguugccauccacgcagaucagcugacaccaaccuggcgcguguauagcacaggcuccaacguguuccaaacuagagccgggugccucauuggagcugagcauguaaacaauucauacgaaugugacauccccauuggcgcggguauaugcgcaaguuaucagacccagacgaacucuccuaggcgggcccgcagcgucgcuucccagucaaucauugccuacaccaugagccugggggcagaaaauucuguggccuacuccaacaauaguaucgcuaucccaacaaacuuuacuauuagcguuaccacagaaauacuucccgugucuaugacuaagaccuccgucgauuguacgauguauaucugcggcgacucaacagaguguaguaaucuguugcuccaauacggcagcuucugcacccagcugaacagagccuuaacuggaauugcaguggagcaggauaaaaauacacaggaaguuuuugcgcaagugaagcagaucuauaaaaccccgccuauuaaggacuucgggggauuuaacuucucgcagauccugccagaucccuccaaaccuucuaagaggagcuuuauagaggaccuacucuucaauaagguaacucuggcugaugccgguuuuaucaaacaauacggcgacugucuuggggauauugcagcccgugacuugaucugcgcucagaaguucaacggacugaccguccugcccccacucuuaacagaugaaaugauugcccaguauacgucagcacugcuugcuggcaccaucacgagugguuggacauucggggccggcgcggccuugcagauaccuuuugcuaugcaaauggcauaccgguucaauggaauuggcgugacccagaacgugcucuaugagaaucagaaacugaucgccaaccaguuuaacuccgcuauugggaagauccaagacucucuaagcuccacagccucagcacugggaaaacuccaggacgucguuaaucagaacgcgcaggcccugaauacucuugugaagcaauugagcaguaacuucggcgcuauaucuuccguacugaaugauaucuuaagccgacucgacaagguggaagccgagguccagauugauagacugaucaccgguaggcuucagucgcugcaaacguacgugacacagcaguugauucgcgcagcugagauccgggccucagcaaaccucgccgcuaccaaaaugucugaaugcguucuggggcagaguaagagaguggacuuuuguggaaaaggcuaccaccuaauguccuucccccaaagcgcgccacauggugucguguuucugcacguuacuuaugugccggcccaggagaagaauuucaccacagcuccugcaauaugccacgauggcaaagcccauuuucccagggaaggggucuucguaucuaacggaacucacugguuugugacccagcgcaauuucuacgagccacagauuaucacaacggacaacaccuuuguuagcggcaauugugauguggucaucgggauugugaacaauacuguauaugacccccuccaaccugagcuggauuccuucaaggaggaacuugacaaauacuucaagaaccauacaucaccagauguggacuugggagauaucaguggcauuaaugccagcgucguuaacauacagaaggaaaucgaccgacugaaugagguggcuaaaaacuuaaacgaaucucucauugaccugcaggagcuugguaaguaugagcaguacaucaaauggcccugguauauuuggcugggguuuaucgcaggacuaauagccaucgugauggucaccauuaugcucugcuguaugacuuccugcuguucaugccugaagggcuguugcaguugugguagcugcugcaaauucgaugaagacgauuccgagccuguguugaagggcguuaagcugcacuacacauga

SEQ ID NO: 11970 - RNA, 3822 nt, Artificial Sequence
  SARS-CoV-2/Guangdong/20SF028/2020__EPI_ISL_403936 spike protein CDS human (1-1273)
auguucguguuucugguccuccuuccccugguuagcucccagugcgugaacuugaccacaagaacucaauuaccuccagccuacacuaauucuuucaccaggggcguauauuacccggacaagguguuucggucaaguguccuguauagcacacaggaucuauuccuccccuuuuucuccaacgugacuugguuucacgcuauccauguuucugggaccaauggaacaaaacgcuucgacaacccugugcugccauuuaaugauggugucuacuucgcaucgaccgagaagucaaacauuauacgaggcuggaucuuugggacuacacuugacagcaaaacccagagucuguugauugugaauaacgccacgaauguaguuaucaaggugugugaguuccaguuuugcaacgaucccuuccucggagucuauuaccacaaaaauaacaaguccuggauggagucugaguuccguguguauagcuccgcgaauaacuguacuuuugaauacgugucacaaccuuuccugauggaccuggaaggcaagcaggguaauuuuaaaaaccucagagaguucgucuuuaagaacauugauggguacuucaaaaucuauaguaagcauaccccaauaaauuuaguuagggaccugccccagggauuuagcgcucuugagccuuugguggaucugccaaucggcauuaacaucacacgguuccagacucuacucgcccugcaccgcucuuaccuuaccccgggcgacuccucaagcggguggacagcaggagccgcugcauauuacguagguuaucugcaacccagaaccuuuuugcucaaauacaaugaaaacggcacgauuacugaugccguggacugcgcucuggauccuuuaagugagacaaaguguacccugaagucuuucacugucgaaaaagggaucuaucagacauccaauuuuagggugcagccaaccgagagcauaguucgguuccccaacauuacgaaucucugcccuuuuggagagguguucaacgccacccgcuucgcgucggucuacgcauggaaucgaaagagaaucucuaacuguguggccgacuacuccguacuuuauaauucagcuaguuuuagcacauucaaaugcuacggcguuuccccaacuaagcugaacgacuuguguuuuaccaauguguaugccgauucuuucgucauuaggggugacgaagugcggcagaucgcacccgggcaaacaggaaaaaucgcugauuacaacuauaagcuaccggacgauuuuacuggcugcgucauugccuggaauagcaacaaccuggacucaaaagugggcgggaauuacaacuaucucuaccgucuguuccgcaagaguaaucuuaagccuuuugagagagauauauccaccgaaaucuaccaggcgggaagcacacccuguaacgguguugagggcuucaauugcuauuuuccacugcagucuuacggguuccaaccuaccaacggagugggcuaucagcccuacaggguagucguguugucauuugaacuccugcaugccccagcaacuguuugcggucccaaaaagaguacgaauuuagugaaaaacaagugugucaauuucaacuuuaaugggcugacaggcaccggagugcuaacugagagcaacaaaaaguuccucccuuuccagcaguuuggccgggacauugcugauaccacagacgccguacgagauccacaaacccuggagauccuugacauaacuccgugcuccuucgggggagugucuguuauuacacccgguacgaauaccucgaaccaggucgcuguguuguaucaggacgugaauuguacugaagucccuguugccauccacgcagaucagcugacaccaaccuggcgcguguacagcacaggcuccaacguguuucaaacuagagccgggugccucaucggagcugagcacguaaacaauucauaugaaugugacauucccaucggcgcggguauuugcgcaaguuaccagacccagacgaacucuccuaggcgggcccgcagcgucgcuucccagucaauaaucgccuacaccaugagccugggggcagaaaauucuguggccuauuccaacaauaguauugcuaucccaacaaacuucacuaucagcguuaccacagaaauucuucccgugucuaugacuaagaccuccgucgauuguacgauguacauaugcggcgacucaacagaguguaguaaucuguugcuccaauauggcagcuuuugcacccagcugaacagagccuuaacuggaaucgcaguggagcaggauaaaaauacacaggaaguuuucgcgcaagugaagcagauuuacaaaaccccgccuaucaaggacuuugggggauucaacuuuucgcagauucugccagaucccuccaaaccuucuaagaggagcuucaucgaggaccuacucuuuaauaagguaacucuggcugaugccgguuucauaaaacaauauggcgacugucuuggggauaucgcagcccgugacuugauuugcgcucagaaguucaacggacugaccguccugcccccacucuuaacagaugaaaugaucgcccaguacacgucagcacugcuugcuggcaccauuacgagugguuggacauuuggggccggcgcggccuugcagaucccuuucgcuaugcaaauggcauaucgguuuaauggaauaggcgugacccagaacgugcucuacgagaaucagaaacugauugccaaccaguucaacuccgcuaucgggaagauucaagacucucuaagcuccacagccucagcacugggaaaacuccaggacgucguuaaucagaacgcgcaggcccugaauacucuugugaagcaauugagcaguaacuuuggcgcuaucucuuccguacugaaugauauauuaagccgacucgacaagguggaagccgagguccagaucgauagacugauuaccgguaggcuucagucgcugcaaacguacgugacacagcaguugauccgcgcagcugagauucgggccucagcaaaccucgccgcuaccaaaaugucugaaugcguucuggggcagaguaagagaguggacuucuguggaaaaggcuaucaucuaauguccuuuccccaaagcgcgccacacggugucguguuccugcauguuacuuacgugccggcccaggagaagaauuuuaccacagcuccugcaaucugccacgauggcaaagcccacuuccccagggaaggggucuuuguaucuaacggaacucauugguucgugacccagcgcaauuuuuaugagccacagauaauuacaacggacaacaccuucguuagcggcaauugugauguggucaucgggaucgugaacaauacuguauacgacccccuccaaccugagcuggauuccuucaaggaggaacuugacaaauauuuuaagaaccacacaucaccagauguggacuugggagauauuaguggcaucaaugccagcgucguuaacauucagaaggaaauagaccgacugaaugagguggcuaaaaacuuaaacgaaucucucaucgaccugcaggagcuugguaaguacgagcaguauauuaaauggcccugguacaucuggcugggguucauugcaggacuaaucgccauagugauggucaccaucaugcucugcuguaugacuuccugcuguucaugccugaagggcuguugcaguugugguagcugcugcaaauuugaugaagacgauuccgagccuguguugaagggcguuaagcugcauuacacauga

SEQ ID NO: 11971 - RNA, 3822 nt, Artificial Sequence
  SARS-CoV-2/Shenzhen/SZTH-001/2020__EPI_ISL_406592 spike protein CDS human (1-1273)
auguucguguuucugguccuccuuccccugguuagcucccagugcgugaacuugaccacaagaacucaauuaccuccagccuacacuaauucuuucaccaggggcguauauuacccggacaagguguuucggucaaguguccugcacagcacacaggaucuauuccuccccuuuuucuccaacgugacuugguuucaugcuauccacguuucugggaccaauggaacaaaacgcuucgacaacccugugcugccauuuaaugauggugucuauuucgcaucgaccgagaagucaaacauuauacgaggcuggaucuuugggacuacacuugacagcaaaacccagagucuguugauugugaauaacgccacgaauguaguuaucaaggugugugaguuccaguuuugcaacgaucccuuccucggagucuacuaucauaaaaauaacaaguccuggauggagucugaguuccguguguacagcuccgcgaauaacuguacuuuugaauaugugucacaaccuuuccugauggaccuggaaggcaagcaggguaauuuuaaaaaccucagagaguucgucuuuaagaacauugauggguacuucaaaaucuacaguaagcacaccccaauaaauuuaguuagggaccugccccagggauuuagcgcucuugagccuuugguggaucugccaaucggcauuaacaucacacgguuccagacucuacucgcccugcaucgcucuuaucuuaccccgggcgacuccucaagcggguggacagcaggagccgcugcauacuauguagguuaccugcaacccagaaccuuuuugcucaaauauaaugaaaacggcacgauuacugaugccguggacugcgcucuggauccuuuaagugagacaaaguguacccugaagucuuucacugucgaaaaagggaucuaccagacauccaauuuuagggugcagccaaccgagagcauaguucgguuccccaacauuacgaaucucugcccuuuuggagagguguucaacgccacccgcuucgcgucggucuaugcauggaaucgaaagagaaucucuaacuguguggccgacuacuccguacuuuacaauucagcuaguuuuagcacauucaaaugcuauggcguuuccccaacuaagcugaacgacuuguguuuuaccaauguguacgccgauucuuucgucauuaggggugacgaagugcggcagaucgcacccgggcaaacaggaaaaaucgcugauuauaacuacaagcuaccggacgauuuuacuggcugcgucauugccuggaauagcaacaaccuggacucaaaagugggcgggaauuauaacuaccucuaucgucuguuccgcaagaguaaucuuaagccuuuugagagagauauauccaccgaaaucuaccaggcgggaagcacacccuguaacgguguugagggcuucaauugcuacuuuccacugcagucuuauggguuccaaccuaccaacggagugggcuaccagcccuauaggguagucguguugucauuugaacuccugcacgccccagcaacuguuugcggucccaaaaagaguacgaauuuagugaaaaacaagugugucaauuucaacuuuaaugggcugacaggcaccggagugcuaacugagagcaacaaaaaguuccucccuuuccagcaguuuggccgggacauugcugauaccacagacgccguacgagauccacaaacccuggagauccuugacauaacuccgugcuccuucgggggagugucuguuauuacacccgguacgaauaccucgaaccaggucgcuguguuguaccaggacgugaauuguacugaagucccuguugccauccacgcagaucagcugacaccaaccuggcgcguguauagcacaggcuccaacguguuucaaacuagagccgggugccucaucggagcugagcauguaaacaauucauacgaaugugacauucccaucggcgcggguauuugcgcaaguuaucagacccagacgaacucuccuaggcgggcccgcagcgucgcuucccagucaauaaucgccuacaccaugagccugggggcagaaaauucuguggccuacuccaacaauaguauugcuaucccaacaaacuucacuaucagcguuaccacagaaauucuucccgugucuaugacuaagaccuccgucgauuguacgauguauauaugcggcgacucaacagaguguaguaaucuguugcuccaauacggcagcuuuugcacccagcugaacagagccuuaacuggaaucgcaguggagcaggauaaaaauacacaggaaguuuucgcgcaagugaagcagauuuauaaaaccccgccuaucaaggacuuugggggauucaacuuuucgcagauucugccagaucccuccaaaccuucuaagaggagcuucaucgaggaccuacucuuuaauaagguaacucuggcugaugccgguuucauaaaacaauacggcgacugucuuggggauaucgcagcccgugacuugauuugcgcucagaaguucaacggacugaccguccugcccccacucuuaacagaugaaaugaucgcccaguauacgucagcacugcuugcuggcaccauuacgagugguuggacauuuggggccggcgcggccuugcagaucccuuucgcuaugcaaauggcauaccgguuuaauggaauaggcgugacccagaacgugcucuaugagaaucagaaacugauugccaaccaguucaacuccgcuaucgggaagauucaagacucucuaagcuccacagccucagcacugggaaaacuccaggacgucguuaaucagaacgcgcaggcccugaauacucuugugaagcaauugagcaguaacuuuggcgcuaucucuuccguacugaaugauauauuaagccgacucgacaagguggaagccgagguccagaucgauagacugauuaccgguaggcuucagucgcugcaaacguacgugacacagcaguugauccgcgcagcugagauucgggccucagcaaaccucgccgcuaccaaaaugucugaaugcguucuggggcagaguaagagaguggacuucuguggaaaaggcuaccaccuaauguccuuuccccaaagcgcgccacauggugucguguuccugcacguuacuuaugugccggcccaggagaagaauuuuaccacagcuccugcaaucugccacgauggcaaagcccauuuccccagggaaggggucuuuguaucuaacggaacucacugguucgugacccagcgcaauuuuuacgagccacagauaauuacaacggacaacaccuucguuagcggcaauugugaugugcucaucgggaucgucaacaauacuguguaugacccccugcaaccugagcuugauuccuucaaggaagaguuggacaaauacuuuaagaaccauacaucaccagauguagaccugggagauauuaguggcaucaaugccagcguggucaacauucagaaggaaauagaccgauuaaaugagguugcuaaaaaccucaacgaaucucugaucgaccuucaggagcuggguaaguaugagcaguacauuaaauggcccugguauaucuggcuaggguucauugcaggacucaucgccauagugauggugaccaucaugcugugcuguaugacuuccugcuguucaugcuugaagggcuguugcaguugugguagcugcugcaaauuugaugaagacgauuccggcccuguccugaagggggugaaguuacacuacacauga

SEQ ID NO: 11972 - RNA, 3822 nt, Artificial Sequence
  SARS-CoV-2/Shenzhen/SZTH-004/2020__EPI_ISL_406595 spike protein CDS human (1-1273)
auguucguguuucugguccuccuuccccugguuagcucccagugcgugaacuugaccacaagaacucaauuaccuccagccuacacgaauagcuucaccaggggcguauauuacccggacaagguguuucggucaaguguccugcacagcacacaggaucuauuccuccccuuuuucuccaacgugacuugguuucaugcuauccacguuucugggaccaauggaacaaaacgcuucgacaacccugugcugccauuuaaugauggugucuauuucgcaucgaccgagaagucaaacauuauacgaggcuggaucuuugggacuacacuugacagcaaaacccagagucuguugauugugaauaacgccacgaauguaguuaucaaggugugugaguuccaguuuugcaacgaucccuuccucggagucuacuaucauaaaaauaacaaguccuggauggagucugaguuccguguguacagcuccgcgaauaacuguacuuuugaauaugugucacaaccuuuccugauggaccuggaaggcaagcaggguaauuuuaaaaaccucagagaguucgucuuuaagaacauugauggguacuucaaaaucuacaguaagcacaccccaauaaauuuaguuagggaccugccccagggauuuagcgcucuugagccuuugguggaucugccaaucggcauuaacaucacacgguuccagacucuacucgcccugcaucgcucuuaucuuaccccgggcgacuccucaagcggguggacagcaggagccgcugcauacuauguagguuaccugcaacccagaaccuuuuugcucaaauauaaugaaaacggcacgauuacugaugccguggacugcgcucuggauccuuuaagugagacaaaguguacccugaagucuuucacugucgaaaaagggaucuaccagacauccaauuuuagggugcagccaaccgagagcauaguucgguuccccaacauuacgaaucucugcccuuuuggagagguguucaacgccacccgcuucgcgucggucuaugcaugggaccgaaagagaaucucuaauuguguggccuacuacuccguacuuuauaacucagcuaguuuuagcacauucaaaugcuacggcguuuccccaacuaagcugaaugacuuguguuuuaccaacguguaugccgauucuuucgucauuaggggugacgaagugcggcagaucgcacccgggcaaacaggaaaaaucgcugauuacaauuauaagcuaccggacgauuuuacuggcugcgucauugccuggaacagcaauaaccuggacucaaaagugggcgggaacuacaauuaucucuaccgucuguuccgcaagaguaaccuuaagccuuuugagagagauauauccaccgaaaucuaccaggcgggaagcacacccuguaaugguguugagggcuucaacugcuauuuuccacugcagucuuacggguuccaaccuaccaauggagugggcuaucagcccuacaggguagucguguugucauuugaacuccugcacgccccagcaacuguuugcggucccaaaaagaguacgaacuuagugaaaaauaagugugucaacuucaauuuuaacgggcugacaggcaccggagugcuaacugagagcaauaaaaaguuccucccuuuccagcaguuuggccgggacauugcugauaccacagacgccguacgagauccacaaacccuggagauccuugacauaacuccgugcuccuucgggggagugucuguuauuacacccgguacgaacaccucgaaucaggucgcuguguuguaucaggacgugaacuguacugaagucccuguugccauccacgcagaucagcugacaccaaccuggcgcguguacagcacaggcuccaauguguuucaaacuagagccgggugccucaucggagcugagcauguaaacaacucauaugaaugugacauucccaucggcgcggguauuugcgcaaguuaccagacccagacuaauucuccuaggcgggcccgcagcgucgcuucccagucaauaaucgccuacaccaugagccugggggcagagaacucuguggccuauuccaauaacaguauugcuaucccaacaaauuucacuaucagcguuaccacagaaauucuucccgugucuaugacuaagaccuccgucgauuguacgauguacauaugcggcgacucaacagaguguaguaaccuguugcuccaauauggaucuuuuugcacccagcugaauagagccuuaacuggcaucgcaguggagcaggauaaaaacacacaggaaguuuucgcgcaagugaagcagauuuacaaaaccccgccuaucaaggacuuugggggauucaauuuuucgcagauucugccagaucccuccaaaccuucuaagaggagcuucaucgaggaccuacucuuuaacaagguaacucuggcugaugccgguuucauaaaacaauauggcgacugucuuggggauaucgcagcccgugacuugauuugcgcucagaaguucaauggacugaccguccugcccccacucuuaacagaugaaaugaucgcccaguacacgucagcacugcuugcuggcaccauuacgagugguuggacauuuggggccggcgcggccuugcagaucccuuucgcuaugcaaauggcauaucgguuuaacggaauaggcgugacccagaaugugcucuacgagaaccagaaacugauugccaaucaguucaacuccgcuaucgggaagauucaagacucucuaagcuccacagccucagcacugggaaaacuccaggacgucguuaaccagaaugcgcaggcccugaacacucuugugaagcaauugagcaguaauuuuggcgcuaucucuuccguacugaacgauauauuaagccgacucgacaagguggaagccgagguccagaucgauagacugauuaccgguaggcuucagucgcugcaaacguacgugacacagcaguugauccgcgcagcugagauucgggccucagcaaaucucgccgcuaccaaaaugucugaaugcguucuggggcagaguaagagaguggacuucuguggaaaaggcuaucaccuaauguccuuuccccaaagcgcgccacauggugucguguuccugcacguuacuuacgugccggcccaggagaagaacuuuaccacagcuccugcaaucugccacgauggcaaagcccauuuccccagggaaggggucuuuguaucuaauggaacucacugguucgugacccagcgcaacuuuuaugagccacagauaauuacaacggacaauaccuucguuagcggcaacugugauguggucaucgggaucgugaauaacacuguauacgacccccuccaaccugagcuggauuccuucaaggaagaacuugacaaauauuuuaagaaucauacaucaccagauguggacuugggagauauuaguggcaucaacgccagcgucguuaauauucagaaggaaauagaccgacugaacgagguggcuaaaaauuuaaacgaaucucucaucgaccugcaggagcuugguaaguacgagcaguauauuaaauggcccugguacaucuggcugggguucauugcaggacuaaucgccauagugauggucaccaucaugcucugcuguaugacuuccugcuguucaugccugaagggcuguugcaguugugguagcugcugcaaauuugaugaagacgauuccgagccuguguugaagggcguuaagcugcacuacacauga

SEQ ID NO: 11973 - RNA, 3822 nt, Artificial Sequence
  SARS-CoV-2/France/IDF0372/2020__EPI_ISL_406596 spike protein CDS human (1-1273)
auguucguguuucugguccuccuuccccugguuagcucccagugcgugaacuugaccacaagaacucaauuaccuccagccuacacuaauucuuucaccaggggcguauauuacccggacaagguguuucggucaaguguccugcacagcacacaggaucuauuccuccccuuuuucuccaacgugacuugguuucaugcuauccacguuucugggaccaauggaacaaaacgcuucgacaacccugugcugccauuuaaugauggugucuauuucgcaucgaccgagaagucaaacauuauacgaggcuggaucuuugggacuacacuugacagcaaaacccagagucuguugauugugaauaacgccacgaauguaguuaucaaggugugugaguuccaguuuugcaacgaucccuuccucggagucuacuaucauaaaaauaacaaguccuggauggagucugaguuccguguguacagcuccgcgaauaacuguacuuuugaauaugugucacaaccuuuccugauggaccuggaaggcaagcaggguaauuuuaaaaaccucagagaguucgucuuuaagaacauugauggguacuucaaaaucuacaguaagcacaccccaauaaauuuaguuagggaccugccccagggauuuagcgcucuugagccuuugguggaucugccaaucggcauuaacaucacacgguuccagacucuacucgcccugcaucgcucuuaucuuaccccgggcgacuccucaagcggguggacagcaggagccgcugcauacuauguagguuaccugcaacccagaaccuuuuugcucaaauauaaugaaaacggcacgauuacugaugccguggacugcgcucuggauccuuuaagugagacaaaguguacccugaagucuuucacugucgaaaaagggaucuaccagacauccaauuuuagggugcagccaaccgagagcauaguucgguuccccaacauuacgaaucucugcccuuuuggagagguguucaacgccacccgcuucgcgucggucuaugcauggaaucgaaagagaaucucuaacuguguggccgacuacuccuuucuuuacaauucagcuaguuucagcacauuuaaaugcuauggcguauccccaacuaagcugaacgacuuguguuucaccaauguuuacgccgauucuuuugugauuaggggugacgaaguccggcagaucgcacccgggcaaacaggaaaaaucgcugauuauaacuacaagcuaccggacgauuucacuggcugcgugauugccuggaauagcaacaaccuggacucaaaagucggcgggaauuauaacuaccucuaucgucuguuucgcaagaguaaucuuaagccuuucgagagagauauauccaccgaaaucuaccaggcgggaagcacacccuguaacgguguggagggcuuuaauugcuacuucccacugcagucuuauggguuucaaccuaccaacggaguuggcuaccagcccuauagggugguagucuugucauucgaacuccugcacgccccagcaacugugugcggucccaaaaagaguacgaauuuaguuaaaaacaagugugugaauuuuaacuucaaugggcugacaggcaccggaguccuaacugagagcaacaaaaaguuccucccuuuucagcaguucggccgggacauugcugauaccacagacgccgugcgagauccacaaacccuggagauccuugacauaacuccgugcuccuuugggggaguaucugugauuacacccgguacgaauaccucgaaccagguugcugucuuguaccaggacgugaauuguacugaagugccugucgccauccacgcagaucagcugacaccaaccuggcgcguuuauagcacaggcuccaacguguuccaaacuagagccgggugccucaucggagcugagcaugugaacaauucauacgaaugugacauucccaucggcgcggguauuugcgcaaguuaucagacccagacgaacucuccuaggcgggcccgcagcguagcuucccagucaauaaucgccuacaccaugagccugggggcagaaaauucugucgccuacuccaacaauaguauugcuaucccaacaaacuuuacuaucagcgugaccacagaaauucuucccguuucuaugacuaagaccuccguggauuguacgauguauauaugcggcgacucaacagaguguaguaaucuguugcuccaauacggcagcuucugcacccagcugaacagagccuuaacuggaaucgcagucgagcaggauaaaaauacacaggaaguguuugcgcaaguuaagcagauuuauaaaaccccgccuaucaaggacuucgggggauuuaacuucucgcagauucugccagaucccuccaaaccuucuaagaggagcuuuaucgaggaccuacucuucaauaaggugacucuggcugaugccgguuucauaaaacaauacggcgacugucuuggggauaucgcagcccgugacuugauuugcgcucagaaguuuaacggacugaccguacugcccccacucuuaacagaugaaaugaucgcccaguauacgucagcacugcuugcuggcaccauuacgagugguuggacauucggggccggcgcggccuugcagaucccuuuugcuaugcaaauggcauaccgguucaauggaauaggcgucacccagaacgugcucuaugagaaucagaaacugauugccaaccaguuuaacuccgcuaucgggaagauucaagacucucuaagcuccacagccucagcacugggaaaacuccaggacguggucaaucagaacgcgcaggcccugaauacucuuguuaagcaauugagcaguaacuucggcgcuaucucuuccgugcugaaugauauauuaagccgacucgacaagguagaagccgaggugcagaucgauagacugauuaccgguaggcuucagucgcugcaaacguacgucacacagcaguugauccgcgcagcugagauucgggccucagcaaaccucgccgcuaccaaaaugucugaaugcgugcuggggcagaguaagagaguugacuuuuguggaaaaggcuaccaccuaauguccuucccccaaagcgcgccacaugguguggucuuucugcacgugacuuauguuccggcccaggagaagaauuucaccacagcuccugcaaucugccacgauggcaaagcccauuuucccagggaagggguguucgucucuaacggaacucacugguuuguaacccagcgcaauuucuacgagccacagauaauuacaacggacaacaccuucgugagcggcaauugugauguugugaucgggaucgucaacaauacuguguaugacccccuccaaccugagcuggauuccuuuaaggaggaacuugacaaauacuucaagaaccauacaucaccagauguagacuugggagauauuaguggcaucaaugccagcguggucaacauucagaaggaaauagaccgacugaaugagguugcuaaaaacuuaaacgaaucucucaucgaccugcaggagcuugguaaguaugagcaguacauuaaauggcccugguauaucuggcugggguuuauugcaggacuaaucgccauagugauggugaccaucaugcucugcuguaugacuuccugcuguucaugccugaagggcuguugcaguugugguagcugcugcaaauucgaugaagacgauuccgagccugucuugaagggcgugaagcugcacuacacauga

SEQ ID NO: 11974 - RNA, 3822 nt, Artificial Sequence
  SARS-CoV-2/Australia/VIC01/2020__EPI_ISL_406844 spike protein CDS human (1-1273)
auguucguguuucugguccuccuuccccugguuagcucccagugcgugaacuugaccacaagaacucaauuaccuccagccuacaccaauucuuucacgaggggcguauauuacccggacaagguguuucggucaaguguccugcacagcacacaggaucuauuccuccccuuuuucuccaacgugacuugguuucaugcuauccacguuucugggaccaauggaacaaaacgcuucgacaacccugugcugccauuuaaugauggugucuauuucgcaucgaccgagaagucaaacauuauacgaggcuggaucuuugggacuacacuugacagcaaaacccagagucuguugauugugaauaacgccacgaauguaguuaucaaggugugugaguuccaguuuugcaacgaucccuuccucggagucuacuaucauaaaaauaacaaguccuggauggagucugaguuccguguguacagcuccgcgaauaacuguacuuuugaauaugugucacaaccuuuccugauggaccuggaaggcaagcaggguaauuuuaaaaaccucagagaguucgucuuuaagaacauugauggguacuucaaaaucuacaguaagcacaccccaauaaauuuaguuagggaccugccccagggauuuagcgcucuugagccuuugguggaucugccaaucggcauuaacaucacacgguuccagacucuacucgcccugcaucgcagauaucuuaccccgggcgacucuuccucaggguggacagcaggagccgcugcauacuauguagguuaccugcaacccaggaccuuuuugcucaaauauaaugaaaacggcacgauuacugaugccguggacugcgcucuggauccuuuaagcgagacaaaguguacccugaagaguuucacugucgaaaaagggaucuaccagacaucuaauuuucgggugcagccaaccgaguccauaguucgcuuccccaacauuacgaaucucugcccuuuuggagagguguucaacgccacccgauucgcgagcgucuaugcauggaauagaaagaggaucucgaacuguguggccgacuacucuguacuuuacaauuccgcuucauuuaguacauucaaaugcuauggcguuagcccaacuaagcugaacgacuuguguuuuaccaauguguacgccgauuccuucgucauucggggugacgaagugcgucagaucgcacccgggcaaacaggaaaaaucgcugauuauaacuacaagcuaccggacgauuuuacuggcugcgucauugccuggaacucuaauaaccuggacagcaaagugggcgggaauuauaacuaccucuaucgccuguucagaaagucaaaucuuaagccuuuugagagggauauaaguaccgaaaucuaccaggcgggauccacacccuguaacgguguugagggcuucaauugcuacuuuccacugcagagcuauggguuccaaccuaccaacggagugggcuaccagcccuaucggguagucguguugucuuuugaacuccugcacgccccagcaacuguuugcggucccaaaaagucaacgaauuuagugaaaaacaagugugucaauuucaacuuuaaugggcugacaggcaccggagugcuaacugagaguaacaaaaaguuccucccuuuccagcaguuuggccgagacauugcugauaccacagacgccguacgcgauccacaaacccuggagauccuugacauaacuccgugcagcuucgggggaguguccguuauuacacccgguacgaauaccucuaaccaggucgcuguguuguaccaggacgugaauuguacugaagucccuguugccauccacgcagaucagcugacaccaaccuggagaguguauucgacaggcagcaacguguuucaaacuagggccgggugccucaucggagcugagcauguaaacaauuccuacgaaugugacauucccaucggcgcggguauuugcgcaucauaucagacccagacgaacaguccucggcgcgccagaucugucgcuagccaguccauaaucgccuacaccaugucacugggggcagagaauagcguggccuacucuaacaauuccauugcuaucccaacaaacuucacuaucaguguuaccacagaaauucuucccgugagcaugacuaagaccucugucgauuguacgauguauauaugcggcgacuccacagaguguucaaaucuguugcuccaauacggaaguuuuugcacccagcugaacagggccuuaacuggcaucgcaguggagcaggauaaaaauacacaggaaguuuucgcgcaagugaagcagauuuauaaaaccccgccuaucaaggacuuugggggauucaacuuuagccagauucugccagaucccucgaaaccuuccaagcguucuuucaucgaggaccuacucuuuaauaagguaacucuggcugaugccgguuucauaaaacaauacggcgacugucuuggggauaucgcagcccgggacuugauuugcgcucagaaguucaacggacugaccguccucccuccacuguuaacagaugaaaugaucgcccaguauacgagcgcacugcuugcuggcaccauuacuucagguuggacauuuggggccggcgcggccuugcagaucccuuucgcuaugcaaauggcauaccgauuuaauggaauaggcgugacccagaacgugcucuaugagaaucagaaacugauugccaaccaguucaacagugcuaucgggaagauucaagacucccuaucuagcacagccuccgcacugggaaaacuccaggacgucguuaaucagaacgcgcaggcccugaauacucuugugaagcaauugucaagcaacuuuggcgcuaucaguucuguacugaaugauauauuauccagacucgacaagguggaagccgagguccagaucgauaggcugauuaccggucgccuucagagccugcaaacguacgugacacagcaguugauccgggcagcugagauuagagccucggcaaaccucgccgcuaccaaaaugucagaaugcguucuggggcagucuaagaggguggacuucuguggaaaaggcuaccaccuaaugaguuuuccccaauccgcgccacauggugucguguuccugcacguuacuuaugugccggcccaggagaagaauuuuaccacagcacccgcuaucugccacgauggcaaagcccauuucccccgcgaaggggucuuuguaagcaacggaacucacugguucgugacccagcgaaauuuuuacgagccacagauaauuacaacggacaacaccuucguuucuggcaauugugauguggucaucgggaucgugaacaauacuguauaugacccccuccaaccugagcuggauagcuucaaggaagaacuugacaaauacuuuaagaaccauacauccccagauguggacuugggagauauuucaggcaucaaugccagugucguuaacauucagaaggaaauagaccggcugaaugagguggcuaaaaacuuaaacgaaagccucaucgaccugcaggagcuugguaaguaugagcaguacauuaaauggcccugguauaucuggcugggguucauugcaggacuaaucgccauagugauggucaccaucaugcucugcuguaugacuucuugcuguuccugccugaagggcuguugcucaugugguaguugcugcaaauuugaugaagacgauagcgagccuguguugaagggcguuaagcugcacuacacauga

SEQ ID NO: 11975 - RNA, 3822 nt, Artificial Sequence
  SARS-CoV-2/Germany/BavPat1/2020__EPI_ISL_406862 spike protein CDS human (1-1273)
auguucguguuucugguccuccuuccccugguuagcucccagugcgugaacuugaccacaagaacucaauuaccuccagccuacacuaauucuuucaccaggggcguauauuacccggacaagguguuucggucaaguguccugcacagcacacaggaucuauuccuccccuuuuucuccaacgugacuugguuucaugcuauccacguuucugggaccaauggaacaaaacgcuucgacaacccugugcugccauuuaaugauggugucuauuucgcaucgaccgagaagucaaacauuauacgaggcuggaucuuugggacuacacuugacagcaaaacccagagucuguugauugugaauaacgccacgaauguaguuaucaaggugugugaguuccaguuuugcaacgaucccuuccucggagucuacuaucauaaaaauaacaaguccuggauggagucugaguuccguguguacagcuccgcgaauaacuguacuuuugaguaugugucacaaccuuuccugauggaccuggaaggcaagcaggguaauuuuaaaaaccucagagaguucgucuuuaagaacauugauggguacuucaaaaucuacaguaagcacaccccaauaaauuuaguuagggaccugccccagggauuuagcgcucuugagccuuugguggaucugccaaucggcauuaacaucacacgguuccagacucuacucgcccugcaucgcucuuaucuuaccccgggcgacuccucaagcggguggacagcaggagccgcugcauacuauguagguuaccugcaacccagaaccuuuuugcucaaauauaaugaaaacggcacgauuacugaugccguggacugcgcucuggauccuuuaagugagacaaaguguacccugaagucuuucacugucgaaaaagggaucuaccagacauccaauuuuagggugcagccaaccgagagcauaguucgguuccccaacauuacgaaucucugcccuuuuggagagguguucaacgccacccgcuucgcgucggucuaugcauggaaucgaaagagaaucucuaacuguguggccgacuacuccguacuuuacaauucagcuaguuuuagcacauucaaaugcuauggcguuuccccaacuaagcugaacgacuuguguuuuaccaauguguacgccgauucuuucgucauuaggggugacgaagugcggcagaucgcacccgggcaaacaggaaaaaucgcugauuauaacuacaagcuaccggacgauuuuacuggcugcgucauugccuggaauagcaacaaccuggacucaaaagugggcgggaauuauaacuaccucuaucgucuguuccgcaagaguaaucuuaagccuuuugagagagauauauccaccgaaaucuaccaggcgggaagcacacccuguaacgguguugagggcuucaauugcuacuuuccacugcagucuuauggguuccaaccuaccaacggagugggcuaccagcccuauaggguagucguguugucauuugaacuccugcacgccccagcaacuguuugcggucccaaaaagaguacgaauuuagugaaaaacaagugugucaauuucaacuuuaaugggcugacaggcaccggagugcuaacugagagcaacaaaaaguuccucccuuuccagcaguuuggccgggacauugcugauaccacagacgccguacgagauccacaaacccuggagauccuugacauaacuccgugcuccuucgggggagugucuguuauuacacccgguacgaauaccucgaaccaggucgcuguguuguaccagggcgugaauuguacugaagucccuguugccauccacgcagaccagcugacaccaaccuggcgcguguauagcacaggguccaacguguuucaaacuagagccggaugccucaucggcgcugagcauguaaacaauucauacgaaugugauauucccaucggugcggggauuugcgcaaguuaucagacccagacgaacucuccuaggcgggcccgcagcgucgcuucccagucaauaaucgccuacaccaugagccugggcgcagaaaauucuguggccuacuccaacaauaguauugcuaucccaacaaacuucacuaucagcguuaccacagaaauucuucccgugucuaugacuaagaccuccgucgacuguacgauguauauaugcggagauucaacagaguguaguaaucuguugcuccaauacggcagcuuuugcacccagcugaacagagccuuaacugggaucgcaguggagcaggacaaaaauacacaggaaguuuucgcgcaagugaagcagauuuauaaaaccccgccuaucaaggauuuuggagguuucaacuuuucgcagauucugccagaccccuccaaaccuucuaagaggagcuucaucgaggaucuacucuuuaauaagguaacucuggcugacgccggcuucauaaaacaauacggggauugucuuggagacaucgcagcccgugauuugauuugcgcucagaaguucaacggccugaccguccugcccccacucuuaacagacgaaaugaucgcccaguauacgucagcacugcuugcugguaccauuacgaguggguggacauuuggcgccggagcggccuugcagaucccuuucgcuaugcaaauggcauaccgguuuaauggcauaggggugacccagaacgugcucuaugagaaucagaaacugauugccaaccaguucaacuccgcuaucggaaagauucaagauucucuaagcuccacagccucagcacugggcaaacuccaggacgucguuaaucagaacgcgcaggcccugaauacucuugugaagcaauugagcaguaacuuuggugcuaucucuuccguacugaaugacauauuaagccgacucgauaagguggaagccgagguccagaucgacagacugauuaccgggaggcuucagucgcugcaaacguacgugacacagcaguugauccgcgcagcugagauucgggccucagcaaaccucgccgcuaccaaaaugucugaaugcguucugggacagaguaagagaguggauuucuguggcaaagguuaccaccuaauguccuuuccccaaagcgcgccacauggcgucguguuccugcacguuacuuaugugccggcccaggagaagaauuuuaccacagcuccugcaaucugccacgacgggaaagcccauuuccccagggaaggagucuuuguaucuaacggcacucacugguucgugacccagcgcaauuuuuacgagccacagauaauuacaacggauaacaccuucguuagcgggaauugugacguggucaucggaaucgugaacaauacuguauaugauccccuccaaccugagcuggacuccuucaaggaagaacuugauaaauacuuuaagaaccauacaucaccagacguggauuugggcgacauuagugguaucaaugccagcgucguuaacauucagaaggaaauagaucgacugaaugagguggcuaaaaacuuaaacgaaucucucaucgaccugcaggagcuugggaaguaugagcaguacauuaaauggcccugguauaucuggcugggauucauugcaggccuaaucgccauagugauggucaccaucaugcucugcuguaugacuuccugcuguucaugccugaaggguuguugcaguuguggcagcugcugcaaauuugacgaagaugacuccgagccuguguugaaggggguuaagcugcacuacacauga

SEQ ID NO: 11976 - RNA, 3822 nt, Artificial Sequence
  SARS-CoV-2/Wuhan/HBCDC-HB-02/2020__EPI_ISL_412978 spike protein CDS human (1-1273)
auguucguguuucugguccuccuuccccugguuagcucccagugcgugaacuugaccacaagaacucaauuaccuccagccuacacuaauucuuucaccaggggcguauauuacccggacaagguguuucggucaaguguccugcacagcacacaggaucuauuccuccccuuuuucuccaacgugacuugguuucaugcuauccacguuucugggaccaauggaacaaaacgcuucgacaacccugugcugccauuuaaugauggugucuauuucgcaucgaccgagaagucaaacauuauacgaggcuggaucuuugggacuacacuugacagcaaaacccagagucuguugauugugaauaacgccacgaauguaguuaucaaggugugugaguuccaguuuugcaacgaucccuuccucggagucuacuaucauaaaaauaacaaguccuggauggagucugaguuccguguguacagcuccgcgaauaacuguacuuuugaguaugugucacaaccuuuccugauggaccuggaaggcaagcaggguaauuuuaaaaaccucagagaguucgucuuuaagaacauugauggguacuucaaaaucuacaguaagcacaccccaauaaauuuaguuagggaccugccccagggauuuagcgcucuugagccuuugguggaucugccaaucggcauuaacaucacacgguuccagacucuacucgcccugcaucgcucuuaucuuaccccgggcgacuccucaagcggguggacagcaggagccgcugcauacuauguagguuaccugcaacccagaaccuuuuugcucaaauauaaugaaaacggcacgauuacugaugccguggacugcgcucuggauccuuuaagugagacaaaguguacccugaagucuuucacugucgaaaaagggaucuaccagacauccaauuuuagggugcagccaaccgagagcauaguucgguuccccaacauuacgaaucucugcccuuuuggagagguguucaacgccacccgcuucgcgucggucuaugcauggaaucgaaagagaaucucuaacuguguggccgacuacuccguacuuuacaauucagcuaguuuuagcacauucaaaugcuauggcguuuccccaacuaagcugaacgacuuguguuuuaccaauguguacgccgauucuuucgucauuaggggugacgaagugcggcagaucgcacccgggcaaacaggaaaaaucgcugauuauaacuacaagcuaccggacgauuuuacuggcugcgucauugccuggaauagcaacaaccuggacucaaaagugggcgggaauuauaacuaccucuaucgucuguuccgcaagaguaaucuuaagccuuuugagagagauauauccaccgaaaucuaccaggcgggaagcacacccuguaacgguguugagggcuucaauugcuacuuuccacugcagucuuauggguuccaaccuaccaacggagugggcuaccagcccuauaggguagucguguugucauuugaacuccugcacgccccagcaacuguuugcggucccaaaaagaguacgaauuuagugaaaaacaagugugucaauuucaacuuuaaugggcugacaggcaccggagugcuaacugagagcaacaaaaaguuccucccuuuccagcaguuuggccgggacauugcugauaccacagacgccguacgagauccacaaacccuggagauccuugacauaacuccgugcuccuucgggggagugucuguuauuacacccgguacgaauaccucgaaccaggucgcuguguuguaccaggacgugaauuguacugaagucccuguugccauccacgcagaucagcugacaccaaccuggcgcguguauagcacaggcuccaacguguuucaaacuagagccgggugccucaucggagcugagcauguaaacaauucauacgaaugugacauucccaucggcgcggguauuugcgcaaguuaucagacccagacgaacucuccuaggcgggcccgcagcgucgcuucccagucaauaaucgccuacaccaugagccugggggcagaaaauucuguggccuacuccaacaauaguauugcuaucccaacaaacuucacuaucagcguuaccacagaaauucuucccgugucuaugacuaagaccuccgucgauuguacgauguauauaugcggcgacucaacagaguguaguaauuuucuguugcaauacggcagcuucugcacccagcucaacagagcccugacuggaaucgcaguggagcaggauaaaaauacacaggaaguuuuugcgcaagugaagcagauuuauaaaaccccgccuaucaaggacuucgggggauuuaacuucucgcagauuuuaccagaucccuccaaaccuucuaagaggagcuuuaucgaggaccugcuauucaauaagguaacucucgcugaugccgguuucauaaaacaauacggcgacugucugggggauaucgcagcccgugaccuuauuugcgcucagaaguuuaacggauugaccguccugcccccacuccugacagaugaaaugaucgcccaguauacgucagcauuacuggcuggcaccauuacgagugguuggacauucggggccggcgcggcccuucagaucccuuuugcuaugcaaauggcauaccgguucaauggaauaggcgugacccagaacguguuguaugagaaucagaaacucauugccaaccaguuuaacuccgcuaucgggaagauucaagacucucugagcuccacagccucagcacuaggaaaacugcaggacgucguuaaucagaacgcgcaggcccucaauacucuggugaagcaacuuagcaguaacuucggcgcuaucucuuccguauugaaugauauacugagccgauuagacaagguggaagccgagguccagaucgauagacucauuaccgguaggcugcagucgcuucaaacguacgugacacagcagcugauccgcgcagcugagauucgggccucagcaaacuuggccgcuaccaaaaugucugaaugcguucucgggcagaguaagagaguggacuuuuguggaaaaggcuaccaccugauguccuucccccaaagcgcgccacauggugucguguuucuacacguuacuuaugugccggcccaggagaagaauuucaccacagcuccugcaaucugccacgauggcaaagcccauuuucccagggaaggggucuucguaucuaacggaacucacugguuugugacccagcgcaauuucuacgagccacagauaauuacaacggacaacaccuucguuagcggcaauugugauguggucaucgggaucgugaacaauacuguauaugacccccugcaaccugagcucgauuccuuuaaggaagaacuggacaaauacuucaagaaccauacaucaccagauguggaccuuggagauauuaguggcaucaaugccagcgucguuaacauucagaaggaaauagaccgauugaaugagguggcuaaaaaccugaacgaaucuuuaaucgaccuccaggagcuggguaaguaugagcaguacauuaaauggcccugguauaucuggcuuggguuuauugcaggacugaucgccauagugauggucaccaucaugcuaugcuguaugacuuccugcuguucaugccucaagggcuguugcaguugugguagcugcugcaaauucgaugaagacgauuccgagccugugcugaagggcguuaaguugcacuacacauga

SEQ ID NO: 11977 - RNA, 3822 nt, Artificial Sequence
  SARS-CoV-2/Australia/QLD02/2020__EPI_ISL_407896 spike protein CDS human (1-1273)
auguucguguuucugguccuccuuccccugguuagcucccagugcgugaacuugaccacaagaacucaauuaccuccagccuacacuaauucuuucaccaggggcguauauuacccggacaagguguuucggucaaguguccugcacagcacacaggaucuauuccuccccuuuuucuccaacgugacuugguuucaugcuauccacguuucugggaccaauggaacaaaacgcuucgacaacccugugcugccauuuaaugauggugucuauuucgcaucgaccgagaagucaaacauuauacgaggcuggaucuuugggacuacacuugacagcaaaacccagagucuguugauugugaauaacgccacgaauguaguuaucaaggugugugaguuccaguuuugcaacgaucccuuccucggagucuacuaucauaaaaauaacaaguccuggauggagucugaguuccguguguacagcuccgcgaauaacuguacuuuugaauaugugucacaaccuuuccugauggaccuggaaggcaagcaggguaauuuuaaaaaccucagagaguucgucuuuaagaacauugauggguacuucaaaaucuacaguaagcacaccccaauaaauuuaguuagggaccugccccagggauuuagcgcucuugagccuuugguggaucugccaaucggcauuaacaucacacgguuccagacucuacucgcccugcaucgcucuuaucuuaccccgggcgacuccucaagcggguggacagcaggagccgcugcauacuauguagguuaccugcaacccagaaccuuuuugcucaaauauaaugaaaacggcacgauuacugaugccguggacugcgcucuggauccuuuaagugagacaaaguguacccugaagucuuucacugucgaaaaagggaucuaccagacauccaauuuuagggugcagccaaccgagagcauaguucgguuccccaacauuacgaaucucugcccuuuuggagagguguucaacgccacccgcuucgcgucggucuaugcauggaaucgaaagagaaucucuaacuguguggccgacuacuccguacuuuacaauucagcuaguuuuagcacauucaaaugcuauggcguuuccccaacuaagcugaacgacuuguguuuuaccaauguguacgccgauucuuucgucauuaggggugacgaagugcggcagaucgcacccgggcaaacaggaaaaaucgcugauuauaacuacaagcuaccggacgauuuuacuggcugcgucauugccuggaauagcaacaaccuggacucaaaagugggcgggaauuauaacuaccucuaucgucuguuccgcaagaguaaucuuaagccuuuugagagagauauauccaccgaaaucuaccaggcgggaagcacacccuguaacgguguugagggcuucaauugcuacuuuccacugcagucuuauggguuccaaccuaccaacggagugggcuaccagcccuauaggguagucguguugucauuugaacuccugcacgccccagcaacuguuugcggucccaaaaagaguacgaauuuagugaaaaacaagugugucaauuucaacuuuaaugggcugacaggcaccggagugcuaacugagagcaacaaaaaguuccucccuuuccagcaguuuggccgggacauugcugauaccacagacgccguacgagauccacaaacccuggagauccuugacauaacuccgugcuccuucgggggagugucuguuauuacacccgguacgaauaccucgaaccaggucgcuguguuguaccaggacgugaauuguacugaagucccuguugccauccacgcagaucagcugacaccaaccuggcgcguguauagcacaggcuccaacguguuucaaacuagagccgggugccucaucggagcugagcauguaaacaauucauacgaaugugacauucccaucggcgcggguauuugcgcaaguuaucagacccagacgaacucuccuaggcgggcccgcagcgucgcuucccagucaauaaucgccuacaccaugagccugggggcagaaaauucuguggccuacuccaacaauaguauugcuaucccaacaaacuucacuaucagcguuaccacagaaauucuucccgugucuaugacuaagaccuccgucgauuguacgauguauauaugcggcgacucaacagaguguaguaaucuguugcuccaauacggcagcuuuugcacccagcugaacagagccuuaacuggaaucgcaguggagcaggauaaaaauacacaggaaguuuucgcgcaagugaagcagauuuauaaaaccccgccuaucaaggacuuugggggauucaacuuuucgcagauucugccagaucccuccaaaccuucuaagaggagcuucaucgaggaccuacucuuuaauaagguaacucuggcugaugccgguuucauaaaacaauacggcgacugucuuggggauaucgcagcccgugacuugauuugcgcucagaaguucaacggacugaccguccugcccccacucuuaacagaugaaaugaucgcccaguauacgucagcacugcuugcuggcaccauuacgagugguuggacauuuggggccggcgcggccuugcagaucccuuucgcuaugcaaauggcauaccgguuuaauggaauaggcgugacccagaacgugcucuaugagaaucagaaacugauugccaaccaguucaacuccgcuaucgggaagauucaagacucucuaagcuccacagccucagcacugggaaaacuccaggacgucguuaaucagaacgcgcaggcccugaauacucuugugaagcaauugagcaguaacuuuggcgcuaucucuuccguacugaaugauauauuaagccgacucgacaagguggaagccgagguccagaucgauagacugauuaccgguaggcuucagucgcugcaaacguacgugacacagcaguugauccgcgcagcugagauucgggccucagcaaaccucgccgcuaccaaaaugucugaaugcguucuggggcagaguaagagaguggacuucuguggaaaaggcuaccaccuaauguccuuuccccaaagcgcgccacauggugucguguuccugcacguuacuuaugugccggcccaggagaagaauuuuaccacagcuccugcaaucugccacgauggcaaagcccauuuccccagggaaggggucuuuguaucuaacggaacucacugguucgugacccagcgcaauuuuuacgagccacagauaauuacaacggacaacaccuucguuagcggcaauugugauguggucaucgggaucgugaacaauacuguauaugacccccuccaacuggagcuugauuccuucaaggaagaguuggacaaauacuuuaagaaccauacaucaccugauguggaccugggagauauuaguggcaucaaugccagcgucguuaacauucagaaggaaauagaccgauuaaaugagguggcuaaaaaccucaacgaaucucugaucgaccuucaggagcuggguaaguaugagcaguacauuaaauggccaugguauaucuggcuaggguucauugcaggacucaucgccauagugauggucaccaucaugcugugcuguaugacuuccugcuguucaugcuugaagggcuguugcaguugugguagcugcugcaaauuugaugaagacgauuccgagcccgugcugaagggcguuaaguuacacuacacauga

SEQ ID NO: 11978 - RNA, 3822 nt, Artificial Sequence
  SARS-CoV-2/India/1-31/2020__EPI_ISL_413523 spike protein CDS human (1-1273)
auguucguguuucugguccuccuuccccugguuagcucccagugcgugaacuugaccacaagaacucaauuaccuccagccuacacuaauucuuucaccaggggcguauauuacccggacaagguguuucggucaaguguccugcacagcacacaggaucuauuccuccccuuuuucuccaacgugacuugguuucaugcuauccacguuucugggaccaauggaacaaaacgcuucgacaacccugugcugccauuuaaugauggugucuauuucgcaucgaccgagaagucaaacauuauacgaggcuggaucuuugggacuacacuugacagcaaaacccagagucuguugauugugaauaacgccacgaauguaguuaucaaggugugugaguuccaguuuugcaacgaucccuuccucggagucuacuaucauaaaaauaacaaguccuggauggagucugaguuccguguguacagcuccgcgaauaacuguacuuuugaauaugugucacaaccuuuccugauggaccuggaaggcaagcaggguaauuuuaaaaaccucagagaguucgucuuuaagaacauugauggguacuucaaaaucuacaguaagcacaccccaauaaauuuaguuagggaccugccccagggauuuagcgcucuugagccuuugguggaucugccaaucggcauuaacaucacacgguuccagacucuacucgcccugcaucgcucuuaucuuaccccgggcgacuccucaagcggguggacagcaggagccgcugcauacuauguagguuaccugcaacccagaaccuuuuugcucaaauauaaugaaaacggcacgauuacugaugccguggacugcgcucuggauccuuuaagugagacaaaguguacccugaagucuuucacugucgaaaaagggaucuaccagacauccaauuuuagggugcagccaaccgagagcauaguucgguuccccaacauuacgaaucucugcccuuuuggagagguguucaacgccacccgcuucgcgucggucuaugcauggaaucgaaagagaaucucuaacuguguggccgacuacuccguacuuuacaauucagcuaguuuuagcacauucaaaugcuauggcguuuccccaacuaagcugaacgacuuguguuuuaccaauguguacgccgauucuuucgucauuaggggugacgaagugcggcagaucgcacccgggcaaacaggaaaaaucgcugauuauaacuacaagcuaccggacgauuuuacuggcugcgucauugccuggaauagcaacaaccuggacucaaaagugggcgggaauuauaacuaccucuaucgucuguuccgcaagaguaaucuuaagccuuuugagagagauauauccaccgaaaucuaccaggcgggaagcacacccuguaacgguguugagggcuucaauugcuacuuuccacugcagucuuauggguuccaaccuaccaacggagugggcuaccagcccuauaggguagucguguugucauuugaacuccugcacgccccagcaacuguuugcggucccaaaaagaguacgaauuuagugaaaaacaagugugucaauuucaacuuuaaugggcugacaggcaccggagugcuaacugagagcaacaaaaaguuccucccuuuccagcaguuuggccgggacauugcugauaccacagacgccguacgagauccacaaacccuggagauccuugacauaacuccgugcuccuucgggggagugucuguuauuacacccgguacgaauaccucgaaccaggucgcuguguuguaccaggacgugaauuguacugaagucccuguugccauccacgcagaucagcugacaccaaccuggcgcguguauagcacaggcuccaacguguuucaaacuagagccgggugccucaucggagcugagcauguaaacaauucauacgaaugugacauucccaucggcgcggguauuugcgcaaguuaucagacccagacgaacucuccuaggcgggcccgcagcgucgcuucccagucaauaaucgccuacaccaugagccugggggcagaaaauucuguggccuacuccaacaauaguauugcuaucccaacaaacuucacuaucagcguuaccacagaaauucuucccgugucuaugacuaagaccuccgucgauuguacgauguauauaugcggcgacucaacagaguguaguaaucuguugcuccaauacggcagcuuuugcacccagcugaacagagccuuaacuggaaucgcaguggagcaggauaaaaauacacaggaaguuuucgcgcaagugaagcagauuuauaaaaccccgccuaucaaggacuuugggggauucaacuuuucgcagauucugccagaucccuccaaaccuucuaagaggagcuucaucgaggaccuacucuuuaauaagguaacucuggcugaugccgguuucauaaaacaauacggcgacugucuuggggauaucgcagcccgugacuugauuugcgcucagaaguucaacggacugaccguccugcccccacucuuaacagaugaaaugaucgcccaguauacgucagcacugcuugcuggcaccauuacgagugguuggacauuuggggccggcgcggccuugcagaucccuuucgcuaugcaaauggcauaccgguuuaauggaauaggcgugacccagaacgugcucuaugagaaucagaaacugauugccaaccaguucaacuccgucaucgggaagauucaagacucucuaagcuccacagcuucagcccugggaaaacuccaggacguugugaaucagaacgcacaggcgcugaauacucuuguaaagcaauugagcaguaacuuuggcgccaucucuuccgugcugaaugauauauuaagccgacucgacaaggucgaagcugaggugcagaucgauagacugauuaccgguaggcuucagucgcugcaaacguacguuacacagcaguugauccgcgccgcagagauucgggcuucagccaaccucgcagccaccaaaaugucugaaugcgugcuggggcagaguaagagagucgacuucuguggaaaaggcuaccaccuaauguccuuuccccaaagcgcuccacauggugugguuuuccugcacgugacuuaugucccggcgcaggagaagaauuuuaccacagccccugcaaucugccacgauggcaaagcucauuuccccagggaagggguauuugugucuaacggaacucacugguucguuacccagcgcaauuuuuacgagccacagauaauuacaacggacaacaccuucgugagcggcaauugugaugucgugaucgggaucguaaacaauacuguguaugacccccuccaaccugagcuggauuccuucaaggaggaacuugacaaauacuuuaagaaccauacaucaccagaugucgacuugggagauauuaguggcaucaaugccagcguugugaacauucagaaggaaauagaccgacugaaugagguggccaaaaacuuaaacgaaucucucaucgaccugcaggagcuugguaaguaugagcaguacauuaaauggcccugguauaucuggcugggguucauugcuggacuaaucgcaauagucauggugaccaucaugcucugcuguaugacuuccugcuguucaugccugaagggcuguugcaguugugguagcugcugcaaauuugaugaagacgauuccgagccuguuuugaagggcguaaagcugcacuacacauga

SEQ ID NO: 11979 - RNA, 3822 nt, Artificial Sequence
  SARS-CoV-2/Guangdong/GD2020087-P0008/2020__EPI_ISL_413863 spike protein CDS human (1-1273)
auguucguguuucugguccuccuuccccugguuagcucccagugcgugaacuugaccacaagaacucaauuaccuccagccuacacuaauucuuucaccaggggcguauauuacccggacaagguguuucggucaaguguccugcacagcacacaggaucuauuccuccccuuuuucuccaacgugacuugguuucaugcuauccacguuucugggaccaauggaacaaaacgcuucgacaacccugugcugccauuuaaugauggugucuauuucgcaucgaccgagaagucaaacauuauacgaggcuggaucuuugggacuacacuugacagcaaaacccagagucuguugauugugaauaacgccacgaauguaguuaucaaggugugugaguuccaguuuugcaacgaucccuuccucggagucuacuaucauaaaaauaacaaguccuggauggaaucugaguuccguguguacagcuccgcgaauaacuguacuuuugaauaugugucacaaccuuuccugauggaccuggaaggcaagcaggguaauuuuaaaaaccucagagaguucgucuuuaagaacauugauggguacuucaaaaucuacaguaagcacaccccaauaaauuuaguuagggaccugccccagggauuuagcgcucuugagccuuugguggaucugccaaucggcauuaacaucacacgguuccagacucuacucgcccugcaucgcucuuaucuuaccccgggcgacuccucaagcggguggacagcaggagccgcugcauacuauguagguuaccugcaacccagaaccuuuuugcucaaauauaaugaaaacggcacgauuacugaugccguggacugcgcucuggauccuuuaagugagacaaaguguacccugaagucuuucacugucgaaaaagggaucuaccagacauccaauuuuagggugcagccaaccgagagcauaguucgguuccccaacauuacgaaucucugcccuuuuggagagguguucaacgccacccgcuucgcgucggucuaugcauggaaucgaaagagaaucucuaacuguguggccgacuacuccguacuuuacaauucagcuaguuuuagcacauucaaaugcuauggcguuuccccaacuaagcugaacgacuuguguuuuaccaauguguacgccgauucuuucgucauuaggggugacgaagugcgggagaucgcacccgggcagacaggaaaaaucgcugauuauaacuacaagcuaccggacgauuuuacuggcugcgucauugccuggaauagcaacaaccuggacucaaaagugggcgggaauuauaacuaccucuaucgucuguuccgcaagaguaaucuuaagccuuuugaaagagauauauccaccgagaucuaccaagcgggaagcacacccuguaacgguguugaaggcuucaauugcuacuuuccacugcagucuuauggguuccagccuaccaacggagugggcuaccaacccuauaggguagucguguugucauuugagcuccugcacgccccagcaacuguuugcggucccaaaaagaguacgaauuuagugaaaaacaagugugucaauuucaacuuuaaugggcugacaggcaccggagugcuaacugagagcaacaaaaaguuccucccuuuccagcaguuuggccgggacauugcugauaccacagacgccguacgagauccacagacccuggaaauccuugacauaacuccgugcuccuucgggggagugucuguuauuacacccgguacgaauaccucgaaccaagucgcuguguuguaccaggacgugaauuguacugaggucccuguugccauccacgcagaucagcugacaccaaccuggcgcguguauagcacaggcuccaacguguuucagacuagagccgggugccucaucggagcugaacauguaaacaauucauacgagugugacauucccaucggcgcggguauuugcgcaaguuaucaaacccagacgaacucuccuaggcgggcccgcagcgucgcuucccagucaauaaucgccuacaccaugagccugggggcagaaaauucuguggccuacuccaacaauaguauugcuaucccaacaaacuucacuaucagcguuaccacagagauucuucccgugucuaugacuaagaccuccgucgauuguacgauguauauaugcggcgacucaacagaguguaguaaucuguugcuccaguacggcagcuuuugcacccaacugaacagagccuuaacuggaaucgcaguggaacaggauaaaaauacacaggagguuuucgcacaggugaagcaaauuuauaaaaccccgccuaucaaggacuuugggggauucaacuuuucgcagauucugccagaucccuccaaaccuucuaagaggagcuucaucgaagaccuacucuuuaauaagguaacucuggcugaugccgguuucauaaaacaguacggcgacugucuuggggauaucgcagcccgugacuugauuugcgcucaaaaguucaacggacugaccguccugcccccacucuuaacagaugagaugaucgcccaguauacgucagcacugcuugcuggcaccauuacgagugguuggacauuuggggccggcgcggccuugcagaucccuuucgcuaugcagauggcauaccgguuuaauggaauaggcgugacccaaaacgugcucuaugaaaaucagaaacugauugccaaccaguucaacuccgcuaucgggaagauucaggacucucuaagcuccacagccucagcacugggaaaacuccaagacgucguuaaucagaacgcgcaggcccugaauacucuugugaagcaguugagcaguaacuuuggcgcuaucucuuccguacugaaugauauauuaagccgacucgacaagguggaggccgagguccaaaucgauagacugauuaccgguaggcuucagucgcugcagacguacgugacacaacaguugauccgcgcagcugaaauucgggccucagcaaaccucgccgcuaccaaaaugucugagugcguucuggggcagaguaagagaguggacuucuguggaaaaggcuaccaccuaauguccuuuccccagagcgcgccacauggugucguguuccugcacguuacuuaugugccggcccaagaaaagaauuuuaccacagcgccugcuaucugccacgauggcaaagcccauuuccccagggagggggucuuuguaucuaacggaacucacugguucgugacccagcgcaauuuuuacgagccacagauaauuacaacggacaacaccuucguuagcggcaauugugauguggucaucgggaucgugaacaauacuguauaugacccccuccagccugaacuggauuccuucaaggaggaacuugacaaauacuuuaagaaccauacaucaccagauguggacuugggagauauuaguggcaucaaugccagcgucguuaacauucaaaaggagauagaccgacugaaugaaguggcuaaaaacuuaaacgagucucucaucgaccugcaggagcuugguaaguaugaacaguacauuaaauggcccugguauaucuggcugggguucauugcaggacuaaucgccauagugauggucaccaucaugcucugcuguaugacuuccugcuguucaugccugaagggcuguugcaguugugguagcugcugcaaauuugaugaggacgauuccgaaccuguguugaagggcguuaagcugcacuacacauga

SEQ ID NO: 11980 - RNA, 3822 nt, Artificial Sequence
  SARS-CoV-2/Sweden/01/2020__EPI_ISL_411951 spike protein CDS human (1-1273)
auguucguguuucugguccuccuuccccugguuagcucccagugcgugaacuugaccacaagaacucaauuaccuccagccuacacuaauucuuucaccaggggcguauauuacccggacaagguguuucggucaaguguccugcacagcacacaggaucuauuccuccccuuuuucuccaacgugacuugguuucaugcuauccacguuucugggaccaauggaacaaaacgcuucgacaacccugugcugccauuuaaugauggugucuauuucgcaucgaccgagaagucaaacauuauacgaggcuggaucuuugggacuacacuugacagcaaaacccagagucuguugauugugaauaacgccacgaauguaguuaucaaggugugugaguuccaguuuugcaacgaucccuuccucggagucuacuaucauaaaaauaacaaguccuggauggagucugaguuccguguguacagcuccgcgaauaacuguacuuuugaauaugugucacaaccuuuccugauggaccuggaaggcaagcaggguaauuuuaaaaaccucagagaguucgucuuuaagaacauugauggguacuucaaaaucuacaguaagcacaccccaauaaauuuaguuagggaccugccccagggauuuagcgcucuugagccuuugguggaucugccaaucggcauuaacaucacacgguuccagacucuacucgcccugcaucgcucuuaucuuaccccgggcgacuccucaagcggguggacagcaggagccgcugcauacuauguagguuaccugcaacccagaaccuuuuugcucaaauauaaugaaaacggcacgauuacugaugccguggacugcgcucuggauccuuuaagugagacaaaguguacccugaagucuuucacugucgaaaaagggaucuaccagacauccaauuuuagggugcagccaaccgagagcauaguucgguuccccaacauuacgaaucucugcccuuuuggagagguguucaacgccacccgcuucgcgucggucuaugcauggaaucgaaagagaaucucuaacuguguggccgacuacuccguacuuuacaauucagcuaguuuuagcacauucaaaugcuauggcguuuccccaacuaagcugaacgacuuguguuuuaccaauguguacgccgauucuuucgucauuaggggugacgaagugcggcagaucgcacccgggcaaacaggaaaaaucgcugauuauaacuacaagcuaccggacgauuuuacuggcugcgucauugccuggaauagcaacaaccuggacucaaaagugggcgggaauuauaacuaccucuaucgucuguuccgcaagaguaaucuuaagccuuuugagagagauauauccaccgaaaucuaccaggcgggaagcacacccuguaacgguguugagggcuucaauugcuacuuuccacugcagucuuauggguuccaaccuaccaacggagugggcuaccagcccuauaggguagucguguugucauuugaacuccugcacgccccagcaacuguuugcggucccaaaaagaguacgaauuuagugaaaaacaagugugucaauuucaacuuuaaugggcugacaggcaccggagugcuaacugagagcaacaaaaaguuccucccuuuccagcaguuuggccgggacauugcugauaccacagacgccguacgagauccacaaacccuggagauccuugacauaacuccgugcuccuucgggggagugucuguuauuacacccgguacgaauaccucgaaccaggucgcuguguuguaccaggacgugaauuguacugaagucccuguugccauccacgcagaucagcugacaccaaccuggcgcguguauagcacaggcuccaacguguuucaaacuagagccgggugccucaucggagcugagcauguaaacaauucauacgaaugugacauucccaucggcgcggguauuugcgcaaguuaucagacccagacgaacucuccuaggcgggcccgcagcgucgcuucccagucaauaaucgccuacaccaugagccugggggcagaaaauucuguggccuacuccaacaauaguauugcuaucccaacaaacuucacuaucagcguuaccacagaaauucuucccgugucuaugacuaagaccuccgucgauuguacgauguauauaugcggcgacucaacagaguguaguaaucuguugcuccaauacggcagcuuuugcacccagcugaacagagccuuaacuggaaucgcaguggagcaggauaaaaauacacaggaaguuuucgcgcaagugaagcagauuuauaaaaccccgccuaucaaggacugugggggauuuaacuucucgcagauucugccagaucccuccaaaccuucuaagaggagcuuuaucgaggaccuacucuucaauaagguaacucuggcugaugccgguuuuauaaaacaauacggcgacugccuuggggauaucgcagcccgugacuugauuugcgcucagaaguucaacggacugaccguccugcccccacucuuaacagaugaaaugaucgcccaguauacgucagcacugcuugcuggcaccauuacgagugguuggacauucggggccggcgcggccuugcagaucccuuuugcuaugcaaauggcauaccgguucaauggaauaggcgugacccagaacgugcucuaugagaaucagaaacugauugccaaccaguuuaacuccgcuaucgggaagauucaagacucucuaagcuccacagccucagcacugggaaaacuccaggacgucguuaaucagaacgcgcaggcccugaauacucuugugaagcaauugagcaguaacuucggcgcuaucucuuccguacugaaugauauauuaagccgacucgacaagguggaagccgagguccagaucgauagacugauuaccgguaggcuucagucgcugcaaacguacgugacacagcaguugauccgcgcagcugagauucgggccucagcaaaccucgccgcuaccaaaaugucugaauguguucuggggcagaguaagagaguggacuuuugcggaaaaggcuaccaccuaauguccuucccccaaagcgcgccacauggugucguguuucugcacguuacuuaugugccggcccaggagaagaauuucaccacagcuccugcaaucugucacgauggcaaagcccauuuucccagggaaggggucuucguaucuaacggaacucacugguuugugacccagcgcaauuucuacgagccacagauaauuacaacggacaacaccuuuguuagcggcaauugcgauguggucaucgggaucgugaacaauacuguauaugacccccuccaaccugagcuggauuccuucaaggaggaacuugacaaauacuucaagaaccauacaucaccagauguggacuugggagauauuaguggcaucaaugccagcgucguuaacauucagaaggaaauagaccgacugaaugagguggcuaaaaacuuaaacgaaucucucaucgaccugcaggagcuugguaaguaugagcaguacauuaaauggcccugguauaucuggcugggguuuauugcaggacuaaucgccauagugauggucaccaucaugcucuguugcaugacuuccuguugcucaugucugaagggcugcuguaguugcgguagcugcuguaaauucgaugaagacgauuccgagccuguguugaagggcguuaagcugcacuacacauga

SEQ ID NO: 11981 - RNA, 3822 nt, Artificial Sequence
  SARS-CoV-2/Tianmen/HBCDC-HB-07/2020__EPI_ISL_412983 spike protein CDS human (1-1273)
auguucguguuucugguccuccuuccccugguuagcucccagugcgugaacuugaccacaagaacucaauuaccuccagccuacacuaauucuuucaccaggggcguauauuacccggacaagguguuucggucaaguguccugcacagcacacaggaucuauuccuccccuuuuucuccaacgugacuugguuucaugcuauccacguuucugggaccaauggaacaaaacgcuucgacaacccugugcugccauuuaaugauggugucuauuucgcaucgaccgagaagucaaacauuauacgaggcuggaucuuugggacuacacuugacagcaaaacccagagucuguugauugugaauaacgccacgaauguaguuaucaaggugugugaguuccaguuuugcaacgaucccuuccucggagucuacuaucauaaaaauaacaaguccuggauggagucugaguuccguguguacagcuccgcgaauaacuguacuuuugaauaugugucacaaccuuuccugauggaccuggaaggcaagcaggguaauuuuaaaaaccucagagaguucgucuuuaagaacauugauggguacuucaaaaucuacaguaagcacaccccaauaaauuuaguuagggaccugccccagggauuuagcgcucuugagccuuugguggaucugccaaucggcauuaacaucacacgguuccagacucuacucgcccugcaucgcucuuaucuuaccccgggcgacuccucaagcggguggacagcaggagccgcugcauacuauguagguuaccugcaacccagaaccuuuuugcucaaauauaaugaaaacggcacgauuacugaugccguggacugcgcucuggauccuuuaagugagacaaaguguacccugaagucuuucacugucgaaaaagggaucuaccagacauccaauuuuagggugcagccaaccgagagcauaguucgguuccccaacauuacgaaucucugcccuuuuggagagguguucaacgccacccgcuucgcgucggucuaugcauggaaucgaaagagaaucucuaacuguguggccgacuacuccguacuuuacaauucagcuaguuuuagcacauucaaaugcuauggcguuuccccaacuaagcugaacgacuuguguuuuaccaauguguacgccgauucuuucgucauuaggggugacgaagugcggcagaucgcacccgggcaaacaggaaaaaucgcugauuauaacuacaagcuaccggacgauuuuacuggcugcgucauugccuggaauagcaacaaccuggacucaaaagugggcgggaauuauaacuaccucuaucgucuguuccgcaagaguaaucuuaagccuuuugagagagauauauccaccgaaaucuaccaggcgggaagcacacccuguaacgguguugagggcuucaauugcuacuuuccacugcagucuuauggguuccaaccuaccaacggagugggcuaccagcccuauaggguagucguguugucauuugaacuccugcacgccccagcaacuguuugcggucccaaaaagaguacgaauuuagugaaaaacaagugugucaauuucaacuuuaaugggcugacaggcaccggagugcuaacugagagcaacaaaaaguuccucccuuuccagcaguuuggccgggacauugcugauaccacagacgccguacgagauccacaaacccuggagauccuugacauaacuccgugcuccuucgggggagugucuguuauuacacccgguacgaauaccucgaaccaggucgcuguguuguaccaggaccugaauuguacugaagugccugucgccauccacgcagaucagcucacaccaaccuggcgcguuuauagcacaggcuccaacguguuucaaacuagagccgggugccugaucggagcugagcaugugaacaauucauacgaaugugacauucccaucggcgcggguauuugcgcaaguuaucagacccagacgaacucuccuaggcgggcccgcagcguagcuucccagucaauaaucgccuacaccaugagccuuggggcagaaaauucugucgccuacuccaacaauaguauugcuaucccaacaaacuucacuaucagcgugaccacagaaauucugcccguuucuaugacuaagaccuccguggauuguacgauguauauaugcggcgacucaacagaguguaguaauuugcuccugcaauacggcagcuuuugcacccaguuaaacagagcccugacuggaaucgcagucgagcaggauaaaaauacacaggaaguguucgcgcaaguuaagcagauuuauaaaaccccgccuaucaaggacuuugggggauucaacuuuucgcagauucuaccagaucccuccaaaccuucuaagaggagcuucaucgaggaccuccuguuuaauaaggugacucuugcugaugccgguuucauaaaacaauacggcgacuguuugggggauaucgcagcccgugaccugauuugcgcucagaaguucaacggacucaccguacugcccccauuacugacagaugaaaugaucgcccaguauacgucagcacuuuuggcuggcaccauuacgagugguuggacauuuggggccggcgcggcccuccagaucccuuucgcuaugcaaauggcauaccgguuuaauggaauaggcgucacccagaacgugcuguaugagaaucagaaacuaauugccaaccaguucaacuccgcuaucgggaagauucaagacucucugagcuccacagccucagcacucggaaaacugcaggacguggucaaucagaacgcgcaggcccuuaauacuuugguuaagcaacugagcaguaacuuuggcgcuaucucuuccguguuaaaugauauacucagccgacuggacaagguagaagccgaggugcagaucgauagacuuauuaccgguaggcugcagucguugcaaacguacgucacacagcagcucauccgcgcagcugagauucgggccucagcaaaccuggccgcuaccaaaaugucugaaugcgugcuagggcagaguaagagaguugacuucuguggaaaaggcuaccaccugauguccuuuccccaaagcgcgccacaugguguggucuuccuccacgugacuuauguuccggcccaggagaagaauuuuaccacagcuccugcaaucugccacgauggcaaagcccauuuccccagggaagggguguuugucucuaacggaacucacugguucguaacccagcgcaauuuuuacgagccacagauaauuacaacggacaacaccuucgugagcggcaauugugauguugugaucgggaucgucaacaauacuguguaugacccccugcaaccugagcuugauuccuucaaggaagaguuggacaaauacuuuaagaaccauacaucaccagauguagaccugggagauauuaguggcaucaaugccagcguggucaacauucagaaggaaauagaccgauuaaaugagguugcuaaaaaccucaacgaaucucugaucgaccuucaggagcuggguaaguaugagcaguacauuaaauggcccugguauaucuggcuaggguucauugcaggacucaucgccauagugauggugaccaucaugcugugcuguaugacuuccugcuguucaugcuugaagggcuguugcaguugugguagcugcugcaaauuugaugaagacgauuccgagccuguccugaagggcgugaaguuacacuacacauga

SEQ ID NO: 11982 - RNA, 3822 nt, Artificial Sequence
  SARS-CoV-2/Hong Kong/case42_VM20002493/2020__EPI_ISL_414527 spike protein CDS human (1-1273)
auguucguguuucugguccuccuuccccugguuagcucccagugcgugaacuugaccacaagaacucaauuaccuccagccuacacgaauagcuucaccaggggcguauauuacccggacaagguguuucggucaaguguccugcacagcacacaggaucuauuccuccccuuuuucuccaacgugacuugguuucaugcuauccacguuucugggaccaauggaacaaaacgcuucgacaacccugugcugccauuuaaugauggugucuauuucgcaucgaccgagaagucaaacauuauacgaggcuggaucuuugggacuacacuugacagcaaaacccagagucuguugauugugaauaacgccacgaauguaguuaucaaggugugugaguuccaguuuugcaacgaucccuuccucggagucuacuaucauaaaaauaacaaguccuggauggagucugaguuccguguguacagcuccgcgaauaacuguacuuuugaauaugugucacaaccuuuccugauggaccuggaaggcaagcaggguaauuuuaaaaaccucagagaguucgucuuuaagaacauugauggguacuucaaaaucuacaguaagcacaccccaauaaauuuaguuagggaccugccccagggauuuagcgcucuugagccuuugguggaucugccaaucggcauuaacaucacacgguuccagacucuacucgcccugcaucgcucuuaucuuaccccgggcgacuccucaagcggguggacagcaggagccgcugcauacuauguagguuaccugcaacccagaaccuuuuugcucaaauauaaugaaaacggcacgauuacugaugccguggacugcgcucuggauccuuuaagugagacaaaguguacccugaagucuuucacugucgaaaaagggaucuaccagacauccaauuuuagggugcagccaaccgagagcauaguucgguuccccaacauuacgaaucucugcccuuuuggagagguguucaacgccacccgcuucgcgucggucuaugcauggaaucgaaagagaaucucuaacuguguggccgacuacuccguacuuuacaauucagcuaguuuuagcacauucaaaugcuauggcguuuccccaacuaagcugaacgacuuguguuuuaccaauguguacgccgauucuuucgucauuaggggugacgaagugcggcagaucgcacccgggcaaacaggaaaaaucgcugauuauaacuacaagcuaccggacgauuuuacuggcugcgucauugccuggaauagcaacaaccuggacucaaaagugggcgggaauuauaacuaccucuaucgucuguuccgcaagaguaaucuuaagccuuuugagagagauauauccaccgaaaucuaccaggcgggaagcacacccuguaacgguguugagggcuucaauugcuacuuuccacugcagucuuauggguuccaaccuaccaacggagugggcuaccagcccuauaggguagucguguugucauuugaacuccugcacgccccagcaacuguuugcggucccaaaaagaguacgaauuuagugaaaaacaagugugucaauuucaacuuuaaugggcugacaggcaccggagugcuaacugagagcaacaaaaaguuccucccuuuccagcaguuuggccgggacauugcugauaccacagacgccguacgagauccacaaacccuggagauccuugacauaacuccgugcuccuucgggggagugucuguuauuacacccgguacgaauaccucgaaccaggucgcuguguuguaccaggacgugaauuguacugaagucccuguugccauccacgcagaucagcugacaccaaccuggcgcguguauagcacaggcuccaacguguuucaaacuagagccgggugccucaucggagcugagcauguaaacaauucauacgaaugugacauucccaucggcgcggguauuugcgcaaguuaucagacccagacgaacucuccuaggcgggcccgcagcgucgcuucccagucaauaaucgccuacaccaugagccugggggcagaaaauucuguggccuacuccaacaauaguauugcuaucccaacaaacuucgccaucagcguuacuaccgaaauucuucccgugucuaugacaaagacuuccgucgauuguaccauguauauaugcggcgacucaacggaguguaguaaucuguugcuccaauacggaucuuuuugcacacagcugaacagagcauuaaccggcaucgcgguggagcaggauaaaaauacucaggaaguuuucgcucaagugaagcagauuuauaaaacaccgccuaucaaggacuuugggggauucaacuuuucgcagauucugccagaucccuccaaaccuucuaagaggagcuucaucgaggaccuacucuuuaauaagguaacccuggccgaugcagguuucauaaaacaauacggcgacugucuuggggauaucgccgcucgugacuugauuugcgcccagaaguucaacggacugacuguccugcccccacucuuaaccgaugaaaugaucgcacaguauacaucagcucugcuugccggcacgauuaccagugguuggacuuuuggggcgggcgccgcuuugcagaucccuuucgcaaugcaaauggccuaccgguuuaauggaauaggcgugacacagaacgugcucuaugagaaucagaaacugauugcuaaccaguucaacuccgccaucgggaagauucaagacucucuaagcuccaccgcaucagcgcugggaaaacuccaggacgucguuaaucagaacgcccaggcucugaauacacuugugaagcaauugagcaguaacuuuggcgccaucucuuccguacugaaugauauauuaagccgacucgacaagguggaagcagagguccagaucgauagacugauuacugguaggcuucagucgcugcaaaccuacgugacgcagcaguugauccgcgcugccgagauucgggcaucagccaaccucgcugcgacaaaaaugucugaaugcguucuggggcagaguaagagaguggacuucuguggaaaaggcuaccaccuaauguccuuuccccaaagcgccccacauggugucguguuccugcacguuaccuaugugccggcacaggagaagaauuuuacuaccgcuccugccaucugccacgauggcaaagcccauuuccccagggaaggggucuuuguaucuaacggaacacacugguucgugacucagcgcaauuuuuacgagccacagauaauuaccacagacaacacguucguuagcggcaauugugauguggucaucgggaucgugaacaauaccguauaugacccccuccaaccugagcuggauuccuucaaggaggaacuugacaaauacuuuaagaaccauacuucaccagauguggacuugggagauauuaguggcaucaaugcuagcgucguuaacauucagaaggaaauagaccgacugaaugagguggccaaaaacuuaaacgaaucucucaucgaccugcaggagcuugguaaguaugagcaguacauuaaauggcccugguauaucuggcugggguucauugcaggacuaaucgcgauagugauggucacaaucaugcucugcuguaugaccuccugcuguucaugccugaagggcuguugcaguugugguagcugcugcaaauuugaugaagacgauuccgagccuguguugaagggcguuaagcugcacuacacuuga

SEQ ID NO: 11983 - RNA, 3822 nt, Artificial Sequence
  SARS-CoV-2/USA/CruiseA-23/2020__EPI_ISL_414482 spike protein CDS human (1-1273)
auguucguguuucugguccuccuuccccugguuagcucccagugcgugaacuugaccacaagaacucaauuaccuccagccuacacuaauucuuucaccaggggcguauauuacccggacaagguguuucggucaaguguccugcacagcacacaggaucuauuccuccccuuuuucuccaacgugacuugguuucaugcuauccacguuucugggaccaauggaacaaaacgcuucgacaacccugugcugccauuuaaugauggugucuauuucgcaucgaccgagaagucaaacauuauacgaggcuggaucuuugggacuacacuugacagcaaaacccagagucuguugauugugaauaacgccacgaauguaguuaucaaggugugugaguuccaguuuugcaacgaucccuuccucggagucuacuaucauaaaaauaacaaguccuggauggagucugaguuccguguguacagcuccgcgaauaacuguacuuuugaguaugugucacaaccuuuccugauggaccuggaagucaagcagggcaauuuuaaaaaccucagagaguucguuuuuaagaacauugaugguuacuucaaaaucuacaguaagcacaccccaauaaauuuagugagggaccugccccagggguuuagcgcucuugagccuuugguagaucugccaaucggaauuaacaucacacgguuccagacucuacucgcccugcaucgcucuuaucuuaccccgggcgacuccucaagcggcuggacagcaggggccgcugcauacuaugugggauaccugcaacccagaaccuuuuugcucaaauauaaugaaaacgguacgauuacugaugccgucgacugcgcucuggauccuuuaagugagacaaaguguacccugaagucuuucacuguggaaaaaggcaucuaccagacauccaauuuuaggguucagccaaccgagagcauagugcgguuccccaacauuacgaaucucugcccuuuuggggaggucuucaacgccacccgcuucgcgucgguguaugcauggaaucgaaagagaaucucuaacuguguagccgacuacuccguucuuuacaauucagcuaguuuuagcacauucaaaugcuauggaguguccccaacuaagcugaacgacuuguguuuuaccaaugucuacgccgauucuuucgugauuaggggcgacgaaguccggcagaucgcacccggucaaacagggaaaaucgcugauuauaacuacaagcuaccggacgauuuuacuggaugcgugauugccuggaauagcaacaaccuggacucaaaaguuggcggcaauuauaacuaccucuaucgucuguuccgcaagaguaaucuuaagccuuuugagagagauauauccaccgaaaucuaccaggcggggagcacacccuguaacggaguggaggguuucaauugcuacuuuccacugcagucuuauggcuuccaaccuaccaacgggguaggauaccagcccuauagggucgugguuuugucauuugaacuccugcacgccccagcaacugugugcggccccaaaaagaguacgaauuuagucaaaaacaagugugugaauuucaacuuuaauggucugacagggaccggcguacuaacugagagcaacaaaaaguuccucccuuuccagcaguuuggacgggacauugcugauaccacagacgccgugcgagauccacaaacccuggagauccuugacauaacuccgugcuccuucggcgggguuucugucauuacacccggaacgaauaccucgaaccagguggcuguguuguaccaggacgucaauuguacugaaguuccuguggccauccacgcagaucagcugacaccaaccuggcgcguguauagcacagguuccaacguauuucaaacuagagccggcugccucaucggggcugagcaugucaacaauucauacgaaugugacauucccaucggagcgggcauuugcgcaaguuaucagacccagacgaacucuccuaggcgggcccgcagcguggcuucccagucaauaaucgccuacaccaugagccugggugcagaaaauucuguugccuacuccaacaauaguauugcuaucccaacaaacuucacuaucagcgugaccacagaaauucuucccgucucuaugacuaagaccuccguggauuguacgauguauauaugcggggacucaacagaguguaguaaucuguugcuccaauacggcagcuuuugcacccagcugaacagagccuuaacuggaaucgcaguugagcaggauaaaaauacacaggaaguguucgcgcaaguaaagcagauuuauaaaaccccgccuaucaaggacuuuggcggguucaacuuuucgcagauucugccagaucccuccaaaccuucuaagaggagcuucaucgaggaccuacucuuuaauaaggucacucuggcugaugccggauucauaaaacaauacggugacugucuuggcgauaucgcagcccgugacuugauuugcgcucagaaguucaacgggcugaccgugcugcccccacucuuaacagaugaaaugaucgcccaguauacgucagcacugcuugcuggaaccauuacgaguggcuggacauuuggugccggggcggccuugcagaucccuuucgcuaugcaaauggcauaccgguuuaauggcauaggagugacccagaacguccucuaugagaaucagaaacugauugccaaccaguucaacuccgcuaucggcaagauucaagacucucuaagcuccacagccucagcacuggggaaacuccaggacguugugaaucagaacgcgcaggcccugaauacucuuguaaagcaauugagcaguaacuuuggagcuaucucuuccgugcugaaugauauauuaagccgacucgacaaggucgaagccgaggugcagaucgauagacugauuaccggcaggcuucagucgcugcaaacguacguuacacagcaguugauccgcgcagcugagauucgggccucagcaaaccucgccgcuaccaaaaugucugaaugcgugcugggucagaguaagagagucgacuucugugggaaaggauaccaccuaauguccuuuccccaaagcgcgccacauggcgugguuuuccugcacgugacuuaugucccggcccaggagaagaauuuuaccacagcuccugcaaucugccacgaugguaaagcccauuuccccagggaaggcguauuugugucuaacgggacucacugguucguuacccagcgcaauuuuuacgagccacagauaauuacaacggacaacaccuucgugagcggaaauugugaugucgugaucggcaucguaaacaauacuguguaugacccccuccaaccugagcuggauuccuucaaggaagaacuugacaaauacuuuaagaaccauacaucaccagaugucgacuugggggauauuaguggaaucaaugccagcguugugaacauucagaaggaaauagaccgacugaaugagguggcuaaaaacuuaaacgaaucucucaucgaccugcaggagcuuggcaaguaugagcaguacauuaaauggcccugguauaucuggcuggguuucauugcagggcuaaucgccauagucauggugaccaucaugcucugcuguaugacuuccugcuguucaugccugaagggauguugcaguuguggcagcugcugcaaauuugaugaagacgauuccgagccuguuuugaaggguguaaagcugcacuacacauga

SEQ ID NO: 11984 - RNA, 3822 nt, Artificial Sequence
  SARS-CoV-2/Hong Kong/case85_VM20002868/2020__EPI_ISL_414519 spike protein CDS human (1-1273)
auguucguguuucugguccucguuccccuugugagcucccagugcguaaaccugaccacaagaacucaauugccuccagccuacacuaauucuuucaccaggggcguguauuacccggacaaggucuuucggucaaguguguuacacagcacacaggaucuguuccuacccuuuuucuccaacguuacuugguuucaugcuauccacgugucugggaccaauggaacaaaacgcuucgacaacccuguccucccauuuaaugaugguguguauuucgcaucgaccgagaagucaaacauuauacgaggcuggaucuuugggacuacacuggacagcaaaacccagagucuucugauuguaaauaacgccacgaauguugugaucaaggucugugaguuccaguuuugcaacgaucccuucuugggaguguacuaucauaaaaauaacaaguccuggauggagucugaguuccguguguacagcuccgcgaauaacuguacuuuugaauaugucucacaaccuuuccucauggaccuggaaggcaagcaggguaauuuuaaaaaccugagagaguucguuuuuaagaacauugauggguacuucaaaaucuacaguaagcacaccccaauaaaucucgugagggacuuaccccagggauuuagcgcucuggagccucuuguagauuugccaaucggcauuaacaucacacgguuccagacucugcuagcccuccaucgcucuuaucugaccccgggcgacuccucaagcggguggacagcaggagccgcugcauacuauguggguuaccuucaacccagaaccuuucuguugaaauauaaugaaaacggcacgauuacugaugccgucgacugcgcucucgauccucugagugagacaaaguguaccuuaaagucuuucacuguggaaaaagggaucuaccagacauccaauuuuaggguucagccaaccgagagcauagugcgguuccccaacauuacgaaucugugcccuuuuggagaggucuucaacgccacccgcuucgcgucgguguaugcauggaaucgaaagagaaucucuaacuguguagccgacuacuccguucucuacaauucagcuaguuuuagcacauucaaaugcuauggcguguccccaacuaaacuuaacgaccuguguuuuaccaaugucuacgccgauucuuucgugauuaggggugacgaaguccggcagaucgcacccgggcaaacaggaaagaucgcugauuauaacuacaaguugccggacgauuuuacuggcugcgugauugccuggaauagcaacaaccuagacucaaaaguuggcgggaauuauaacuaccuguaucgucucuuccgcaagaguaaucugaagccuuuugagagagauauauccaccgaaaucuaccaggcgggaagcacacccuguaacgguguggagggcuucaauugcuacuuuccacuucagucuuauggguuccaaccuaccaacggaguaggcuaccagcccuauagggucgugguucugucauuugaauugcuccacgccccagcaacugugugcggucccaaaaagaguacgaaucuggucaaaaacaagugugugaauuucaacuuuaauggguuaacaggcaccggaguacugacugagagcaacaaaaaguuccuaccuuuccagcaguuuggccgggacauugcugauaccacagacgccgugcgagauccacaaacccucgagauccuggacauaacuccgugcuccuucgggggaguuucugucauuacacccgguacgaauaccucgaaccagguggcugugcuuuaccaggacgucaauuguacugaaguuccuguggccauccacgcagaucaguugacaccaaccuggcgcguguauagcacaggcuccaacguauuucaaacuagagccgggugccugaucggagcugagcaugucaacaauucauacgaaugugacauucccaucggcgcggguauuugcgcaaguuaucagacccagacgaacucuccuaggcgggcccgcagcguggcuucccagucaauaaucgccuacaccaugagccucggggcagaaaauucuguugccuacuccaacaauaguauugcuaucccaacaaacuucacuaucagcgugaccacagaaauucugcccgucucuaugacuaagaccuccguggauuguacgauguauauaugcggcgacucaacagaguguaguaaucuucuguugcaauacggcagcuuuugcacccagcucaacagagcccugacuggaaucgcaguugagcaggauaaaaauacacaggaaguguucgcgcaaguaaagcagauuuauaaaaccccgccuaucaaggacuuugggggauucaacuuuucgcagauuuuaccagaucccuccaaaccuucuaagaggagcuucaucgaggaccugcuauuuaauaaggucacucucgcugaugccgguuucauaaaacaauacggcgacugucugggggauaucgcagcccgugaccuuauuugcgcucagaaguucaacggauugaccgugcugcccccacuccugacagaugaaaugaucgcccaguauacgucagcauuacuggcuggcaccauuacgagugguuggacauuuggggccggcgcggcccuucagaucccuuucgcuaugcaaauggcauaccgguuuaauggaauaggcgugacccagaacgucuuguaugagaaucagaaacucauugccaaccaguucaacuccgcuaucgggaagauucaagacucucugagcuccacagccucagcacuaggaaaacugcaggacguugugaaucagaacgcgcaggcccucaauacucugguaaagcaacuuagcaguaacuuuggcgcuaucucuuccguguugaaugauauacugagccgauuagacaaggucgaagccgaggugcagaucgauagacucauuaccgguaggcugcagucgcuucaaacguacguuacacagcagcugauccgcgcagcugagauucgggccucagcaaacuuggccgcuaccaaaaugucugaaugcgugcucgggcagaguaagagagucgacuucuguggaaaaggcuaccaccugauguccuuuccccaaagcgcgccacauggugugguuuuccuacacgugacuuaugucccggcccaggagaagaauuuuaccacagcuccugcaaucugccacgauggcaaagcccauuuccccagggaagggguauuugugucuaacggaacucacugguucguuacccagcgcaauuuuuacgagccacagauaauuacaacggacaacaccuucgugagcggcaauugugaugucgugaucgggaucguaaacaauacuguguaugacccccugcaaccugagcucgauuccuucaaggaggaacuggacaaauacuuuaagaaccauacaucaccagaugucgaccuuggagauauuaguggcaucaaugccagcguugugaacauucagaaggaaauagaccgauugaaugagguggcuaaaaaccugaacgaaucuuuaaucgaccuccaggagcuggguaaguaugagcaguacauuaaauggcccugguauaucuggcuuggguucauugcaggacugaucgccauagucauggugaccaucaugcuaugcuguaugacuuccugcuguucaugccucaagggcuguugcaguugugguagcugcugcaaauuugaugaagacgauuccgagccuguucugaagggcguaaaguugcacuacacauga

SEQ ID NO: 11985 - RNA, 3822 nt, Artificial Sequence
  SARS-CoV-2/England/200990660/2020__EPI_ISL_414523 spike protein CDS human (1-1273)
auguucguguuucugguccuccuuccccugguuagcucccagugcgugaacuugaccacaagaacucaauuaccuccagccuacacuaauucuuucaccaggggcguauauuacccggacaagguguuucggucaaguguccugcacagcacacaggaucuauuccuccccuuuuucuccaacgugacuugguuucaugcuauccacguuucugggaccaauggaacaaaacgcuucgacaacccugugcugccauuuaaugauggugucuauuucgcaucgaccgagaagucaaacauuauacgaggcuggaucuuugggacuacacuugacagcaaaacccagagucuguugauugugaauaacgccacgaauguaguuaucaaggugugugaguuccaguuuugcaacgaucccuuccucggagucuacuaucauaaaaauaacaaguccuggauggagucugaguuccguguguacagcuccgcgaauaacuguacuuuugaguaugugucacaaccuuuccugauggaccuggaaggcaagcaggguaauuuuaaaaaccucagagaguucgucuuuaagaacauugauggguacuucaaaaucuacaguaagcacaccccaauaaauuuaguuagggaccugccccagggauuuagcgcucuugagccuuugguggaucugccaaucggcauuaacaucacacgguuccagacucuacucgcccugcaucgcucuuaucuuaccccgggcgacuccucaagcggguggacagcaggagccgcugcauacuauguagguuaccugcaacccagaaccuuuuugcucaaauauaaugaaaacggcacgauuacugaugccguggacugcgcucuggauccuuuaagugagacaaaguguacccugaagucuuucacugucgaaaaagggaucuaccagacauccaauuuuagggugcagccaaccgagagcauaguucgguuccccaacauuacgaaucucugcccuuuuggagagguguucaacgccacccgcuucgcgucggucuaugcauggaaucgaaagagaaucucuaacuguguggccgacuacuccguacuuuacaauucagcuaguuuuagcacauucaaaugcuauggcguuuccccaacuaagcugaacgacuuguguuuuaccaauguguacgccgauucuuucgucauuaggggugacgaagugcggcagaucgcacccgggcaaacaggaaaaaucgcugauuauaacuacaagcuaccggacgauuuuacuggcugcgucauugccuggaauagcaacaaccuggacucaaaagugggcgggaauuauaacuaccucuaucgucuguuccgcaagaguaaucuuaagccuuuugagagagauauauccaccgaaaucuaccaggcgggaagcacacccuguaacgguguugagggcuucaauugcuacuuuccacugcagucuuauggguuccaaccuaccaacggagugggcuaccagcccuauaggguagucguguugucauuugaacuccugcacgccccagcaacuguuugcggucccaaaaagaguacgaauuuagugaaaaacaagugugucaauuucaacuuuaaugggcugacaggcaccggagugcuaacugagagcaacaaaaaguuccucccuuuccagcaguuuggccgggacauugcugauaccacagacgccguacgagauccacaaacccuggagauccuugacauaacuccgugcuccuucgggggagugucuguuauuacacccgguacgaauaccucgaaccaggucgcuguguuguaccagggcgugaauuguacugaagucccuguugccauccacgcagaccagcugacaccaaccuggcgcguguauagcacaggguccaacguguuucaaacuagagccggaugccucaucggcgcugagcauguaaacaauucauacgaaugugauauucccaucggugcggggauuugcgcaaguuaucagacccagacgaacucuccuaggcgggcccgcagcgucgcuucccagucaauaaucgccuacaccaugagccugggcgcagaaaauucuguggccuacuccaacaauaguauugcuaucccaacaaacuucacuaucagcguuaccacagaaauucuucccgugucuaugacuaagaccuccgucgacuguacgauguauauaugcggagauucaacagaguguaguaaucuguugcuccaauacggcagcuuuugcacccagcugaacagagccuuaacugggaucgcaguggagcaggacaaaaauacacaggaaguuuucgcgcaagugaagcagauuuauaaaaccccgccuaucaaggauuuuggagguuucaacuuuucgcagauucugccagaccccuccaaaccuucuaagaggagcuucaucgaggaucuacucuuuaauaagguaacucuggcugacgccggcuucauaaaacaauacggggauugucuuggagacaucgcagcccgugauuugauuugcgcucagaaguucaacggccugaccguccugcccccacucuuaacagacgaaaugaucgcccaguauacgucagcacugcuugcugguaccauuacgaguggguggacauuuggcgccggagcggccuugcagaucccuuucgcuaugcaaauggcauaccgguuuaauggcauaggggugacccagaacgugcucuaugagaaucagaaacugauugccaaccaguucaacuccgcuaucggaaagauucaagauucucuaagcuccacagccucagcacugggcaaacuccaggacgucguuaaucagaacgcgcaggcccugaauacucuugugaagcaauugagcaguaacuuuggugcuaucucuuccguacugaaugacauauuaagccgacucgauaagguggaagccgagguccagaucgacagacugauuaccgggaggcuucagucgcugcaaacguacgugacacagcaguugauccgcgcagcugagauucgggccucagcaaaccucgccgcuaccaaaaugucugaaugcguucugggacagaguaagagaguggauuucuguggcaaagguuaccaccuaauguccuuuccccaaagcgcgccacauggcgucguguuccugcacguuacuuaugugccggcccaggagaagaauuuuaccacagcuccugcaaucugccacgacgggaaagcccauuuccccagggaaggagucuuuguaucuaacggcacucacugguucgugacccagcgcaauuuuuacgagccacagauaauuacaacggauaacaccuucguuagcgggaauugugacguggucaucggaaucgugaacaauacuguauaugauccccuccaaccugagcuggacuccuucaaggaagaacuugauaaauacuuuaagaaccauacaucaccagacguggauuugggcgacauuagugguaucaaugccagcgucguuaacauucagaaggaaauagaucgacugaaugagguggcuaaaaacuuaaacgaaucucucaucgaccugcaggagcuugggaaguaugagcaguacauuaaauggcccugguauaucuggcugggauucauugcaggccuaaucgccauagugauggucaccaucaugcucugcuguaugacuuccugcuguucaugccugaaggguuguugcaguuguggcagcugcugcaaauuugacgaagaugacuccgaguuggugcugaaggggguuaaguuacacuacacauga

SEQ ID NO: 11986 - RNA, 3822 nt, Artificial Sequence
  SARS-CoV-2/Australia/NSW09/2020__EPI_ISL_413595 spike protein CDS human (1-1273)
auguucguguuucugguccuccuuccccugguuagcucccagugcgugaacuugaccacaagaacucaauuaccuccagccuacacuaauucuuucaccaggggcguauauuacccggacaagguguuucggucaaguguccugcacagcacacaggaucuauuccuccccuuuuucuccaacgugacuugguuucaugcuauccacguuucugggaccaauggaacaaaacgcuucgacaacccugugcugccauuuaaugauggugucuauuucgcaucgaccgagaagucaaacauuauacgaggcuggaucuuugggacuacacuugacagcaaaacccagagucuguugauugugaauaacgccacgaauguaguuaucaaggugugugaguuccaguuuugcaacgaucccuuccucggagucuacuaucauaaaaauaacaaguccuggauggagucugaguuccguguguacagcuccgcgaauaacuguacuuuugaauaugugucacaaccuuuccugauggaccuggaaggcaagcaggguaauuuuaaaaaccucagagaguucgucuuuaagaacauugauggguacuucaaaaucuacaguaagcacaccccaauaaauuuaguuagggaccugccccagggauuuagcgcucuugagccuuugguggaucugccaaucggcauuaacaucacacgguuccagacucuacucgcccugcaucgcucuuaucuuaccccgggcgacuccucaagcggguggacagcaggagccgcugcauacuauguagguuaccugcaacccagaaccuuuuugcucaaauauaaugaaaacggcacgauuacugaugccguggacugcgcucuggauccuuuaagugagacaaaguguacccugaagucuuucacugucgaaaaagggaucuaccagacauccaauuuuagggugcagccaaccgagagcauaguucgguuccccaacauuacgaaucucugcccuuuuggagagguguucaacgccacccgcuucgcgucggucuaugcauggaaucgaaagagaaucucuaacuguguggccgacuacuccguacuuuacaauucagcuaguuuuagcacauucaaaugcuauggcguuuccccaacuaagcugaacgacuuguguuuuaccaauguguacgccgauucuuucgucauuaggggugacgaagugcggcagaucgcacccgggcaaacaggaaaaaucgcugauuauaacuacaagcuaccggacgauuuuacuggcugcgucauugccuggaauagcaacaaccuggacucaaaagugggcgggaauuauaacuaccucuaucgucuguuccgcaagaguaaucuuaagccuuuugagagagauauauccaccgaaaucuaccaggcgggaagcacacccuguaacgguguugagggcuucaauugcuacuuuccacugcagucuuauggguuccaaccuaccaacggagugggcuaccagcccuauaggguagucguguugucauuugaacuccugcacgccccagcaacuguuugcggucccaaaaagaguacgaauuuagugaaaaacaagugugucaauuucaacuuuaaugggcugacaggcaccggagugcuaacugagagcaacaaaaaguuccucccuuuccagcaguuuggccgggacauugcugauaccacagacgccguacgagauccacaaacccuggagauccuugacauaacuccgugcuccuucgggggagugucuguuauuacacccgguacgaauaccucgaaccaggucgcuguguuguaccaggacgugaauuguacugaagucccuguugccauccacgcagaucagcugacaccaaccuggcgcguguauagcacaggcuccaacguguuucaaacuagagccgggugccucaucggagcugagcauguaaacaauucauacgaaugugacauucccaucggcgcggguauuugcgcaaguuaucagacccagacgaacucuccuaggcgggcccgcagcgucgcuucccagucaauaaucgccuacaccaugagccugggggcagaaaauucuguggccuacuccaacaauaguauugcuaucccaacaaacuucacuaucagcguuaccacagaaauucuucccgugucuaugacuaagaccuccgucgauuguacgauguauauaugcggcgacucaacagaguguaguaaucuguugcuccaauacggcagcuuuugcacccagcugaacagagccuuaacuggaaucgcaguggagcaggauaaaaauacacaggaaguuuucgcgcaagugaagcagauuuauaaaaccccgccuaucaaggacuuugggggauucaacuuuucgcagauucugccagaucccuccaaaccuucuaagaggagcuucaucgaggaccuacucuuuaauaagguaacucuggcugaugccgguuucauaaaacaauacggcgacugucuuggggauaucgcagcccgugacuugauuugcgcucagaaguucaacggacugaccguccuacccccacuguuaacagaugaaaugaucgcccaguauacgucagcacugcuugcuggcaccauuacgagugguuggacauuuggggccggcgcggccuugcagaucccuuucgcuaugcaaauggcauaccgguuuaauggaauaggcgugacccagaacgugcucuaugagaaucagaaacugauugccaaccaguucaacuccgcuaucgggaagauucaagacucucucagcuuuacagccuccgcacugggaaaacuccaggacgucguuaaucagaacgcgcaggcccugaauacucuugugaagcaauugucaagcaacuucggcgcuaucaguucuguacugaaugauauauuaucccgacucgacaagguggaagccgagguccagaucgauagacugauuaccgguaggcuucagagccugcaaacguacgugacacagcaguugauccgcgcagcugagauucgggccucggcaaaccucgccgcuaccaaaaugucagaaugcguucuggggcagucuaagagaguggacuuuuguggaaaaggcuaccaccuaaugaguuucccccaauccgcgccacauggugucguguuucugcacguuacuuaugugccggcccaggagaagaauuucaccacagcuccugcaaucugccacgauggcaaagcccauuuucccagggaaggggucuucguaagcaacggaacucacugguuugugacccagcgcaauuucuacgagccacagauaauuacaacggacaacaccuucguuucuggcaauugugauguggucaucgggaucgugaacaauacuguauaugacccccuccaaccugagcuggauagcuuuaaggaggaacuugacaaauacuucaagaaccauacauccccagauguggacuugggagauauuucaggcaucaaugccagugucguuaacauucagaaggaaauagaccgacugaaugagguggcuaaaaacuuaaacgaaagccucaucgaccugcaggagcuugguaaguaugagcaguacauuaaauggcccugguauaucuggcugggguuuauugcaggacuaaucgccauagugauggucaccaucaugcucugcuguaugacuucuugcuguuccugccugaagggcuguugcucaugugguaguugcugcaaauucgaugaagacgauagcgagccuguguugaagggcguuaagcugcacuacacauga

SEQ ID NO: 11987 - RNA, 3822 nt, Artificial Sequence
  SARS-CoV-2/Australia/NSW10/2020__EPI_ISL_413596 spike protein CDS human (1-1273)
auguucguguuucugguccuccuuccccugguuagcucccagugcgugaacuugaccacaagaacucaauuaccuccagccuacacuaauucuuucaccaggggcguauauuacccggacaagguguuucggucaaguguccugcacagcacacaggaucuauuccuccccuuuuucuccaacgugacuugguuucaugcuauccacguuucugggaccaauggaacaaaacgcuucgacaacccugugcugccauuuaaugauggugucuauuucgcaucgaccgagaagucaaacauuauacgaggcuggaucuuugggacuacacuugacagcaaaacccagagucuguugauugugaauaacgccacgaauguaguuaucaaggugugugaguuccaguuuugcaacgaucccuuccucggagucuacuaucauaaaaauaacaaguccuggauggagucugaguuccguguguacagcuccgcgaauaacuguacuuuugaauaugugucacaaccuuuccugauggaccuggaaggcaagcaggguaauuuuaaaaaccucagagaguucgucuuuaagaacauugauggguacuucaaaaucuacaguaagcacaccccaauaaauuuaguuagggaccugccccagggauuuagcgcucuugagccuuugguggaucugccaaucggcauuaacaucacacgguuccagacucuacucgcccugcaucgcucuuaucuuaccccgggcgacuccucaagcggguggacagcaggagccgcugcauacuauguagguuaccugcaacccagaaccuuuuugcucaaauauaaugaaaacggcacgauuacugaugccguggacugcgcucuggauccuuuaagugagacaaaguguacccugaagucuuucacugucgaaaaagggaucuaccagacauccaauuuuagggugcagccaaccgagagcauaguucgguuccccaacauuacgaaucucugcccuuuuggagagguguucaacgccacccgcuucgcgucggucuaugcauggaaucgaaagagaaucucuaacuguguggccgacuacuccguacuuuacaauucagcuaguuuuagcacauucaaaugcuauggcguuuccccaacuaagcugaacgacuuguguuuuaccaauguguacgccgauucuuucgucauuaggggugacgaagugcggcagaucgcacccgggcaaacaggaaaaaucgcugauuauaacuacaagcuaccggacgauuuuacuggcugcgucauugccuggaauagcaacaaccuggacucaaaagugggcgggaauuauaacuaccucuaucgucuguuccgcaagaguaaucuuaagccuuuugagagagauauauccaccgaaaucuaccaggcgggaagcacacccuguaacgguguugagggcuucaauugcuacuuuccacugcagucuuauggguuccaaccuaccaacggagugggcuaccagcccuauaggguagucguguugucauuugaacuccugcacgccccagcaacuguuugcggucccaaaaagaguacgaauuuagugaaaaacaagugugucaauuucaacuuuaaugggcugacaggcaccggagugcuaacugagagcaacaaaaaguuccucccuuuccagcaguuuggccgggacauugcugauaccacagacgccguacgagauccacaaacccuggagauccuugacauaacuccgugcuccuucgggggagugucuguuauuacacccgguacgaauaccucgaaccaggucgcuguguuguaccaggacgugaauuguacugaagucccuguugccauccacgcagaucagcugacaccaaccuggcgcguguauagcacaggcuccaacguguuucaaacuagagccgggugccucaucggagcugagcauguaaacaauucauacgaaugugacauucccaucggcgcggguauuugcgcaaguuaucagacccagacgaacucuccuaggcgggcccgcagcgucgcuucccagucaauaaucgccuacaccaugagccugggggcagaaaauucuguggccuacuccaacaauaguauugcuaucccaacaaacuucacuaucagcguuaccacagaaauucuucccgugucuaugacuaagaccuccgucgauuguacgauguauauaugcggcgacucaacagaguguaguaaucuguugcuccaauacggcagcuuuugcacccagcugaacagagccuuaacuggaaucgcaguggagcaggauaaaaauacacaggaaguuuucgcgcaagugaagcagauuuauaaaaccccgccuaucaaggacuuugggggauucaacuuuucgcagauucugccagaucccuccaaaccuucuaagaggagcuucaucgaggaccuacucuuuaauaagguaacucuggcugaugccgguuucauaaaacaauacggcgacugucuuggggauaucgcagcccgugacuugauuugcgcucagaaguucaacggacugaccguccugcccccacucuuaacagaugaaaugaucgcccaguauacgucagcacugcuugcuggcaccauuacgagugguuggacauuuggggccggcgcggccuugcagaucccuuucgcuaugcaaauggcauaccgguuuaauggaauaggcgugacccagaacgugcucuaugagaaucagaaacugauugccaaccaguucaacuccgcuaucgggaagauucaagacucucuaagcuccacagccucagcacugggaaaacuccaggacgucguuaaucagaacgcgcaggcccugaauacucuugugaagcaauugagcaguaacuuuggcgcuaucucuuccguacugaaugauauauuaagccgacucgacaagguggaagccgagguccagaucgauagacugauuaccgguaggcuucagucgcugcaaacguacgugacacagcaguugauccgcgcagcugagauucgggccucagcaaaccucgccgcuaccaaaaugucugaaugcguucuggggcagaguaagagaguggacuucuguggaaaaggcuaccaccuaauguccuuuccccaaagcgcgccacauggugucguguuccugcacguuacuuaugugccggcccaggagaagaauuuuaccacagcuccugcaaucugccacgauggcaaagcccauuuccccagggaaggggucuuuguaucuaacggaacucacugguucgugacccagcgcaauuuuuacgagccacagauaauuacaacggacaacaccuucguuagcggcaauugugauguggucaucgggaucgugaacaauacuguauaugacccccuccaaccugagcuggauuccuucaaggaggaacuugacaaauacuuuaagaaccauacaucaccagauguggacuugggagauauuaguggcaucaaugccagcgucguuaacauucagaaggaaauagaccgacugaaugagguggcuaaaaacuuaaacgaaucucucaucgaccugcaggagcuugguaaguaugagcaguacauuaaauggcccugguauaucuggcugggguucauugcaggacuaaucgccauagugauggucaccaucaugcucugcuguaugacuuccugcuguucaugccugaagggcuguugcaguugugguagcugcuuuaaauucgaugaagacgauuccgagccuguguugaagggcguuaagcugcacuacacauga

SEQ ID NO: 11988 - RNA, 3822 nt, Artificial Sequence
  SARS-CoV-2/Switzerland/1000477797/2020__EPI_ISL_413023 spike protein CDS human (1-1273)
auguucguguuucugguccuccuuccccugguuagcucccagugcgugaacuugaccacaagaacucaauuaccuccagccuacacuaauucuuucaccaggggcguauauuacccggacaagguguuucggucaaguguccugcacagcacacaggaucuauuccuccccuuuuucuccaacgugacuugguuucaugcuauccacguuucugggaccaauggaacaaaacgcuucgacaacccugugcugccauuuaaugauggugucuauuucgcaucgaccgagaagucaaacauuauacgaggcuggaucuuugggacuacacuugacagcaaaacccagagucuguugauugugaauaacgccacgaauguaguuaucaaggugugugaguuccaguuuugcaacgaucccuuccucggagucuacuaucauaaaaauaacaaguccuggauggagucugaguuccguguguacagcuccgcgaauaacuguacuuuugaauaugugucacaaccuuuccugauggaccuggaaggcaagcaggguaauuuuaaaaaccucagagaguucgucuuuaagaacauugauggguacuucaauaucuacaguaaacacaccccaauaaacuuaguuagggaccugccccagggauuuagcgcucuugagccuuugguggaucugccaaucggcauuaauaucacacgguuccagacucuacucgcccugcaucgcucuuaucuuaccccgggcgacuccucaagcggguggacagcaggagccgcugcauacuauguagguuaccugcaacccagaaccuuuuugcucaaguauaacgaaaauggcacgauuacugaugccguggacugcgcucuggauccuuuaagugagacaaaauguacccugaagucuuucacugucgaaaaggggaucuaccagacauccaacuuuagggugcagccaaccgagagcauaguucgguuccccaauauuacgaaccucugcccuuuuggagagguguucaaugccacccgcuucgcgucggucuaugcauggaaccgaaaaagaaucucuaauuguguggccgacuacuccguacuuuacaacucagcuaguuuuagcacauucaagugcuauggcguuuccccaacuaaacugaaugacuuguguuuuaccaacguguacgccgauucuuucgucauuaggggugacgaagugcggcagaucgcacccgggcaaacaggaaagaucgcugauuauaauuacaaacuaccggacgauuuuacuggcugcgucauugccuggaacagcaacaaucuggacucaaaggugggcgggaacuauaauuaccucuaucgucuguuccgcaaaaguaaccuuaagccuuuugagagagauauauccaccgaaaucuaccaggcgggaagcacacccuguaaugguguugagggcuucaacugcuacuuuccacugcagucuuauggguuccaaccuaccaauggagugggcuaccagcccuauaggguagucguguugucauuugaacuccugcacgccccagcaacuguuugcggucccaagaaaaguacgaacuuagugaagaauaaaugugucaacuucaauuuuaacgggcugacaggcaccggagugcuaacugagagcaauaagaaauuccucccuuuccagcaguuuggccgggacauugcugauaccacagacgccguacgagauccacaaacccuggagauccuugacauaacuccgugcuccuucgggggagugucuguuauuacacccgguacgaacaccucgaaucaggucgcuguguuguaccagggcgugaacuguacugaagucccuguugccauccacgcagaccagcugacaccaaccuggcgcguguauagcacaggguccaacguguuucaaacuagagccggaugccucaucggcgcugagcauguaaauaacucauacgaaugugauauucccaucggugcggggauuugcgcaaguuaucagacccagaccaauucuccuaggcgggcccgcagcgucgcuucccagucaauaaucgccuacacgaugagccugggcgcagagaacucuguggccuacuccaauaacaguauugcuaucccaacaaauuucacuaucagcguuaccacagaaauucuucccgugucuaugacuaagaccuccgucgacuguacgauguauauaugcggagauucaacagaguguaguaaccuguugcuccaauacggcagcuuuugcacccagcugaauagagccuuaacugggaucgcaguggagcaggacaagaacacacaggaaguuuucgcgcaagugaaacagauuuauaagaccccgccuaucaaagauuuuggagguuucaauuuuucgcagauucugccagaccccuccaagccuucuaaaaggagcuucaucgaggaucuacucuuuaacaagguaacucuggcugacgccggcuucauaaagcaauacggggauugucuuggagacaucgcagcccgugauuugauuugcgcucagaaauucaauggccugaccguccugcccccacucuuaacagacgaaaugaucgcccaguauacgucagcacugcuugcugguaccauuacgaguggguggacauuuggcgccggagcggccuugcagaucccuuucgcuaugcaaauggcauaccgguuuaacggcauaggggugacccagaaugugcucuaugagaaccagaagcugauugccaaccaguucaauuccgcuaucggaaaaauucaagauucucuaagcuccacagccucagcacugggcaagcuccaggacgucguuaaccagaaugcgcaggcccugaacacucuugugaaacaauugagcaguaauuuuggugcuaucucuuccguacugaacgacauauuaagccgacucgauaagguggaagccgagguccagaucgacagacugauuaccgggaggcuucagucgcugcaaacguacgugacacagcaguugauccgcgcagcugagauucgggccucagcaaaucucgccgcuaccaagaugucugaaugcguucugggacagaguaaaagaguggauuucuguggcaaggguuaccaccuaauguccuuuccccaaagcgcgccacauggcgucguguuccugcacguuacuuaugugccggcccaggagaaaaacuuuaccacagcuccugcaaucugccacgacgggaaggcccauuuccccagggaaggagucuuuguaucuaauggcacucacugguucgugacccagcgcaacuuuuacgagccacagauaauuacaacggauaauaccuucguuagcgggaacugugacguggucaucggaaucgugaauaacacuguauaugauccccuccaaccugagcuggacuccuucaaagaagaacuugauaaguacuuuaaaaaucauacaucaccagacguggauuugggcgacauuagugguaucaacgccagcgucguuaauauucagaaggaaauagaucgacugaacgagguggcuaagaacuuaaaugaaucucucaucgaccugcaggagcuugggaaauaugagcaguacauuaaguggcccugguauaucuggcugggauucauugcaggccuaaucgccauagugauggucaccaucaugcucugcuguaugacuuccugcuguucaugccugaaagguuguugcaguuguggcagcugcugcaaguuugacgaagaugacuccgagccuguguugaaagggguuaagcugcacuacacauga

SEQ ID NO: 11989 - RNA, 3822 nt, Artificial Sequence
  SARS-CoV-2/Belgium/BA-02291/2020__EPI_ISL_415159 spike protein CDS human (1-1273)
auguucguguuucugguccuccuuccccugguuagcucccagugcgugaacuugaccacaagaacucaauuaccuccagccuacacuaauucuuucaccaggggcguauauuacccggacaagguguuucggucaaguguccugcacagcacacaggaucuauuccuccccuuuuucuccaacgugacuugguuucaugcuauccacguuucugggaccaauggaacaaaacgcuucgacaacccugugcugccauuuaaugauggugucuauuucgcaucgaccgagaagucaaacauuauacgaggcuggaucuuugggacuacacuugacagcaaaacccagagucuguugauugugaauaacgccacgaauguaguuaucaaggugugugaguuccaguuuugcaacgaucccuuccucggagucuacuaucauaaaaauaacaaguccuggauggagucugaguuccguguguacagcuccgcgaauaacuguacuuuugaguaugugucacaaccuuuccugauggaccuggaaggcaagcaggguaauuuuaaaaaccucagagaguucgucuuuaagaacauugauggguacuucaaaaucuacaguaagcacaccccaauaaauuuaguuagggaccugccccagggauuuagcgcucuugagccuuugguggaucugccaaucggcauuaacaucacacgguuccagacucuacucgcccugcaucgcucuuaucuuaccccgggcgacuccucaagcggguggacagcaggagccgcugcauacuauguagguuaccugcaacccagaaccuuuuugcucaaauauaaugaaaacggcacgauuacugaugccguggacugcgcucuggauccuuuaagugagacaaaguguacccugaagucuuucacugucgaaaaagggaucuaccagacauccaauuuuagggugcagccaaccgagagcauaguucgguuccccaacauuacgaaucucugcccuuuuggagagguguucaacgccacccgcuucgcgucggucuaugcauggaaucgaaagagaaucucuaacuguguggccgacuacuccguacuuuacaauucagcuaguuuuagcacauucaaaugcuauggcguuuccccaacuaagcugaacgacuuguguuuuaccaauguguacgccgauucuuucgucauuaggggugacgaagugcggcagaucgcacccgggcaaacaggaaaaaucgcugauuauaacuacaagcuaccggacgauuuuacuggcugcgucauugccuggaauagcaacaaccuggacucaaaagugggcgggaauuauaacuaccucuaucgucuguuccgcagaaguaaucuuaagccuuuugagagggauauauccaccgaaaucuaccaggcgggaagcacacccuguaacgguguugagggcuucaauugcuacuuuccacugcagucuuauggguuccaaccuaccaacggagugggcuaccagcccuaucggguagucguguugucauuugaacuccugccagcccccgcaacuguuugcgguccuaagaaaaguacgaauuuagugaagaacaaaugugucaauuucaacuuuaaugggcugacaggcaccggagugcuaacugagagcaacaagaaauuccucccauuccagcaguuuggccgagacauugcugauaccacagacgccguacgcgauccgcaaacccuggagauccuugacauaacucccugcuccuucgggggagugucuguuauuacaccugguacgaauaccucgaaccaggucgcuguguuguaccagggcgugaauuguacugaagucccaguugccauccacgcagaccagcugacacccaccuggagaguguauagcacaggguccaacguguuucaaacuagggccggaugccucaucggcgcugagcacguaaacaauucauacgaaugugauauuccuaucggugcggggauuugcgcaaguuaucagacccagacgaacucuccacggcgcgccagaagcgucgcuucccagucaauaaucgccuacaccaugagccugggcgcagaaaauucuguggccuacuccaacaauaguauugcuauccccacaaacuucacuaucagcguuaccacagaaauucuuccggugucuaugacuaagaccuccgucgacuguacgauguauauaugcggagauucaacagaguguaguaaucuguugcuccaauacggcagcuuuugcacccagcugaacagggccuuaacugggaucgcaguggagcaggacaagaauacacaggaaguuuucgcgcaagugaaacagauuuauaagaccccuccaaucaaagauuuuggagguuucaacuuuucgcagauucugcccgacccuuccaagcccucuaaacguagcuucaucgaggaucuacucuuuaauaagguaacucuggcugacgccggcuucauaaagcaauacggggauugucuuggagacaucgcagcccgggauuugauuugcgcucagaaauucaacggccugaccguccucccaccucuguuaacagacgaaaugaucgcccaguauacgucagcacugcuugcugguaccauuacgaguggguggacauuuggcgccggagcggccuugcagauccccuucgcuaugcaaauggcauaccgauuuaauggcauaggggugacccagaacgugcucuaugagaaucagaagcugauugccaaccaguucaacuccgcuaucggaaaaauucaagauucucuaagcuccgccgcaccagcgcugggcaagcuccaggacgucguuaaucagaacgcccaggcucugaauacacuugugaaacaauugucaagcaacuuuggugccaucaguucuguacugaaugacauauuauccagacucgauaagguggaagcagagguccagaucgacaggcugauuacugggcgccuucagagccugcaaaccuacgugacgcagcaguugauccgggcugccgagauuagagcaucggccaaccucgcugcgacaaagaugucagaaugcguucugggacagucuaaaaggguggauuucuguggcaaggguuaccaucuaaugaguuuuccgcaauccgccccucacggcgucguguuccugcauguuaccuaugugcccgcacaggagaaaaauuuuacuaccgcuccagccaucugccacgacgggaaggcccacuucccccgcgaaggagucuuuguaagcaacggcacacauugguucgugacucagcgaaauuuuuacgagccucagauaauuaccacagauaacacguucguuucugggaauugugacguggucaucggaaucgugaacaauaccguauaugauccacuccaacccgagcuggacagcuucaaagaagaacuugauaaguacuuuaaaaaccacacuuccccugacguggauuugggcgacauuucagguaucaaugcuagugucguuaacauucagaaggaaauagaucggcugaaugagguggcaaagaacuuaaacgaaagccucaucgaccugcaggagcuugggaaauaugagcaguacauuaaguggccgugguauaucuggcugggauucauugccggccuaaucgcgauagugauggucacaaucaugcucugcuguaugaccucuugcuguuccugccugaaagguuguugcucauguggcaguugcugcaaguuugacgaagaugacagcgagccaguguugaaagggguuaagcugcauuacacuuga

SEQ ID NO: 11990 - RNA, 3822 nt, Artificial Sequence
  SARS-CoV-2/USA/WA8-UW5/2020__EPI_ISL_413486 spike protein CDS human (1-1273)
auguucguguuucugguccuccuuccccugguuagcucccagugcgugaacuugaccacaagaacucaauuaccuccagccuacacuaauucuuucaccaggggcguauauuacccggacaagguguuucggucaaguguccugcacagcacacaggaucuauuccuccccuuuuucuccaacgugacuugguuucaugcuauccacguuucugggaccaauggaacaaaacgcuucgacaacccugugcugccauuuaaugauggugucuauuucgcaucgaccgagaagucaaacauuauacgaggcuggaucuuugggacuacacuugacagcaaaacccagagucuguugauugugaauaacgccacgaauguaguuaucaaggugugugaguuccaguuuugcaacgaucccuuccucggagucuacuaucauaaaaauaacaaguccuggauggagucugaguuccguguguacagcuccgcgaauaacuguacuuuugaauaugugucacaaccuuuccugauggaccuggaaggcaagcaggguaauuuuaaaaaccucagagaguucgucuuuaagaacauugauggguacuucaaaaucuacaguaagcacaccccaauaaauuuaguuagggaccugccccagggauuuagcgcucuugagccuuugguggaucugccaaucggcauuaacaucacacgguuccagacucuacucgcccugcaucgcucuuaucuuaccccgggcgacuccucaagcggguggacagcaggagccgcugcauacuauguagguuaccugcaacccagaaccuuuuugcucaaauauaaugaaaacggcacgauuacugaugccguggacugcgcucuggauccuuuaagugagacaaaguguacccugaagucuuucacugucgaaaaagggaucuaccagacauccaauuuuagggugcagccaaccgagagcauaguucgguuccccaacauuacgaaucucugcccuuuuggagagguguucaacgccacccgcuucgcgucggucuaugcauggaaucgaaagagaaucucuaacuguguggccgacuacuccguacuuuacaauucagcuaguuuuagcacauucaaaugcuauggcguuuccccaacuaagcugaacgacuuguguuuuaccaauguguacgccgauucuuucgucauuaggggugacgaagugcggcagaucgcacccgggcaaacaggaaaaaucgcugauuauaacuacaagcuaccggacgauuuuacuggcugcgucauugccuggaauagcaacaaccuggacucaaaagugggcgggaauuauaacuaccucuaucgucuguuccgcaagaguaaucuuaagccuuuugagagagauauauccaccgaaaucuaccaggcgggaagcacacccuguaacgguguugagggcuucaauugcuacuuuccacugcagucuuauggguuccaaccuaccaacggagugggcuaccagcccuauaggguagucguguugucauuugaacuccugcacgccccagcaacuguuugcggucccaaaaagaguacgaauuuagugaaaaacaagugugucaauuucaacuuuaaugggcugacaggcaccggagugcuaacugagagcaacaaaaaguuccucccuuuccagcaguuuggccgggacauugcugauaccacagacgccguacgagauccacaaacccuggagauccuugacauaacuccgugcuccuucgggggagugucuguuauuacacccgguacgaauaccucgaaccaggucgcuguguuguaccaggacgugaauuguacugaagucccuguugccauccacgcagaucagcugacaccaaccuggcgcguguauagcacaggcuccaacguguuucaaacuagagccgggugccucaucggagcugaguacguaaacaauucauaugaaugugacauucccaucggcgcggguauuugcgcaaguuaccagacccagacgaacucuccuaggcgggcccgcagcgucgcuucccagucaauaaucgccuacaccaugagccugggggcagaaaauucuguggccuauuccaacaauaguauugcuaucccaacaaacuucacuaucagcguuaccacagaaauucuucccgugucuaugacuaagaccuccgucgauuguacgauguacauaugcggcgacucaacagaguguaguaaucuguugcuccaauauggcagcuuuugcacccagcugaacagagccuuaacuggaaucgcaguggagcaggauaaaaauacacaggaaguuuucgcgcaagugaagcagauuuacaaaaccccgccuaucaaggacuuugggggauucaacuuuucgcagauucugccagaucccuccaaaccuucuaagaggagcuucaucgaggaccuacucuuuaauaagguaacucuggcugaugccgguuucauaaaacaauauggcgacugucuuggggauaucgcagcccgugacuugauuugcgcucagaaguucaacggacugaccguccugcccccacucuuaacagaugaaaugaucgcccaguacacgucagcacugcuugcuggcaccauuacgagugguuggacauuuggggccggcgcggccuugcagaucccuuucgcuaugcaaauggcauaucgguuuaauggaauaggcgugacccagaacgugcucuacgagaaucagaaacugauugccaaccaguucaacuccgcuaucgggaagauucaagacucucuaagcuccacagccucagcacugggaaaacuccaggacgucguuaaucagaacgcgcaggcccugaauacucuugugaagcaauugagcaguaacuuuggcgcuaucucuuccguacugaaugauauauuaagccgacucgacaagguggaagccgagguccagaucgauagacugauuaccgguaggcuucagucgcugcaaacguacgugacacagcaguugauccgcgcagcugagauucgggccucagcaaaccucgccgcuaccaaaaugucugaaugcguucuggggcagaguaagagaguggacuucuguggaaaaggcuaucaucuaauguccuuuccccaaagcgcgccacacggugucguguuccugcauguuacuuacgugccggcccaggagaagaauuuuaccacagcuccugcaaucugccacgauggcaaagcccacuuccccagggaaggggucuuuguaucuaacggaacucauugguucgugacccagcgcaauuuuuaugagccacagauaauuacaacggacaacaccuucguuagcggcaauugugauguggucaucgggaucgugaacaauacuguauacgacccccuccaaccugagcuggauuccuucaaggaggaacuugacaaauauuuuaagaaccacacaucaccagauguggacuugggagauauuaguggcaucaaugccagcgucguuaacauucagaaggaaauagaccgacugaaugagguggcuaaaaacuuaaacgaaucucucaucgaccugcaggagcuugguaaguacgagcaguauauuaaauggcccugguacaucuggcugggguucauugcaggacuaaucgccauagugauggucaccaucaugcucugcuguaugacuuccugcuguucaugccugaagggcuguugcaguugugguagcugcugcaaauuugaugaagacgauuccgagccuguguugaagggcguuaagcugcauuacacauga

SEQ ID NO: 11991 - RNA, 3822 nt, Artificial Sequence
  SARS-CoV-2/England/20102000506/2020__EPI_ISL_415147 spike protein CDS human (1-1273)
auguucguguuucugguccuccuuccccugguuagcucccagugcgugaacuugaccacaagaacucaauuaccuccagccuacacuaauucuuucaccaggggcguauauuacccggacaagguguuucggucaaguguccugcacagcacacaggaucuauuccuccccuuuuucuccaacgugacuugguuucaugcuauccacguuucugggaccaauggaacaaaacgcuucgacaacccugugcugccauuuaaugauggugucuauuucgcaucgaccgagaagucaaacauuauacgaggcuggaucuuugggacuacacuugacagcaaaacccagagucuguugauugugaauaacgccacgaauguaguuaucaaggugugugaguuccaguuuugcaacgaucccuuccucggagucuacuaucauaaaaauaacaaguccuggauggagucugaguuccguguguacagcuccgcgaauaacuguacuuuugaguaugugucacaaccuuuccugauggaccuggaaggcaagcaggguaauuuuaaaaaccucagagaguucgucuuuaagaacauugauggguacuucaaaaucuacaguaagcacaccccaauaaauuuaguuagggaccugccccagggauuuagcgcucuugagccuuugguggaucugccaaucggcauuaacaucacacgguuccagacucuacucgcccugcaucgcucuuaucuuaccccgggcgacuccucaagcggguggacagcaggagccgcugcauacuauguagguuaccugcaacccagaaccuuuuugcucaaauauaaugaaaacggcacgauuacugaugccguggacugcgcucuggauccuuuaagugagacaaaguguacccugaagucuuucacugucgaaaaagggaucuaccagacauccaauuuuagggugcagccaaccgagagcauaguucgguuccccaacauuacgaaucucugcccuuuuggagagguguucaacgccacccgcuucgcgucggucuaugcauggaaucgaaagagaaucucuaacuguguggccgacuacuccguacuuuacaauucagcuaguuuuagcacauucaaaugcuauggcguuuccccaacuaagcugaacgacuuguguuuuaccaauguguacgccgauucuuucgucauuaggggugacgaagugcggcagaucgcacccgggcaaacaggaaaaaucgcugauuauaacuacaagcuaccggacgauuuuacuggcugcgucauugccuggaauagcaacaaccuggacucaaaagugggcgggaauuauaacuaccucuaucgucuguuccgcaagaguaaucuuaagccuuuugagagagauauauccaccgaaaucuaccaggcgggaagcacacccuguaacgguguugagggcuucaauugcuacuuuccacugcagucuuauggguuccaaccuaccaacggagugggcuaccagcccuauaggguagucguguugucauuugaacuccugcacgccccagcaacuguuugcggucccaaaaagaguacgaauuuagugaaaaacaagugugucaauuucaacuuuaaugggcugacaggcaccggagugcuaacugagagcaacaaaaaguuccucccuuuccagcaguuuggccgggacauugcugauaccacagacgccguacgagauccacaaacccuggagauccuugacauaacuccgugcuccuucgggggagugucuguuauuacacccgguacgaauaccucgaaccaggucgcuguguuguaccagggcgugaauuguacugaagucccuguugccauccacgcagaccagcugacaccaaccuggcgcguguauagcacaggguccaacguguuucaaacuagagccggaugccucaucggcgcugagcauguaaacaauucauacgaaugugauauucccaucggugcggggauuugcgcaaguuaucagacccagacgaacucuccuaggcgggcccgcagcgucgcuucccagucaauaaucgccuacaccaugagccugggcgcagaaaauucuguggccuacuccaacaauaguauugcuaucccaacaaacuucacuaucagcguuaccacagaaauucuucccgugucuaugacuaagaccuccgucgacuguacgauguauauaugcggagauucaacagaguguaguaaucuguugcuccaauacggcagcuuuugcacccagcugaacagagccuuaacugggaucgcaguggagcaggacaaaaauacacaggaaguuuucgcgcaagugaagcagauuuauaaaaccccgccuaucaaggauuuuggagguuucaacuuuucgcagauucugccagaccccuccaaaccuucuaagaggagcuucaucgaggaucuacucuuuaauaagguaacucuggcugacgccggcuucauaaaacaauacggguauugucuuggagauaucgcagcccgugacuugauuugcgcucagaaguucaacggccugaccguccugcccccacucuuaacagaugaaaugaucgcccaguacacgucagcacugcuugcugguaccauuacgaguggguggacauuuggcgccggagcggccuugcagaucccuuucgcuaugcaaauggcauaucgguuuaauggcauaggggugacccagaacgugcucuacgagaaucagaaacugauugccaaccaguucaacuccgcuaucggaaagauucaagacucucuaagcuccacagccucagcacugggcaaacuccaggaugucguuaaucagaacgcgcaggcccugaauacucuugugaagcaauugagcaguaacuuuggugcuaucucuuccguacugaaugacauauuaagccgacucgacaagguggaagccgagguccagaucgauagacugauuaccgggaggcuucagucgcugcaaacguacgugacacagcaguugauccgcgcagcugagauucgggccucagcaaaccucgccgcuaccaaaaugucugaaugcguucugggacagaguaagagaguggacuucuguggcaaagguuaucaccuaauguccuuuccccaaagcgcgccacauggcgucguguuccugcacguuacuuacgugccggcccaggagaagaauuuuaccacagcuccugcaaucugccacgaugggaaagcccauuuccccagggaaggagucuuuguaucuaacggcacucacugguucgugacccagcgcaauuuuuaugagccacagauaauuacaacggacaacaccuucguuagcgggaauugugauguggucaucggaaucgugaacaauacuguauacgacccccuccaaccugagcuggauuccuucaaggaagaacuugacaaauauuuuaagaaccauacaucaccagauguggacuugggcgauauuagugguaucaaugccagcgucguuaacauucagaaggaaauagaccgacugaaugagguggcuaaaaacuuaaacgaaucucucaucgaucugcaggagcuugggaaguacgagcaguauauuaaauggcccugguacaucuggcugggauucauugcaggccuaaucgccauagugauggucaccaucaugcucugcuguaugacuuccugcuguucaugccugaaggguuguugcaguuguggcagcugcugcaaauuugacgaagacgauuccgagccuguguugaaggggguuaagcugcacuacacauga

SEQ ID NO: 11992 - RNA, 3822 nt, Artificial Sequence
  SARS-CoV-2/Belgium/VAG-03013/2020__EPI_ISL_415155 spike protein CDS human (1-1273)
auguucguguuucugguccuccuuccccugguuagcucccagugcgugaacuugaccacaagaacucaauuaccuccagccuacacuaauucuuucaccaggggcguauauuacccggacaagguguuucggucaaguguccugcacagcacacaggaucuauuccuccccuuuuucuccaacgugacuugguuucaugcuauccacguuucugggaccaauggaacaaaacgcuucgacaacccugugcugccauuuaaugauggugucuauuucgcaucgaccgagaagucaaacauuauacgaggcuggaucuuugggacuacacuugacagcaaaacccagagucuguugauugugaauaacgccacgaauguaguuaucaaggugugugaguuccaguuuugcaacgaucccuuccucggagucuacuaucauaaaaauaacaaguccuggauggagucugaguuccguguguacagcuccgcgaauaacuguacuuuugaguaugugucacaaccuuuccugauggaccuggaaggcaagcaggguaauuuuaaaaaccucagagaguucgucuuuaagaacauugauggguacuucaaaaucuacaguaagcacaccccaauaaauuuaguuagggaccugccccagggauuuagcgcucuugagccuuugguggaucugccaaucggcauuaacaucacacgguuccagacucuacucgcccugcaucgcucuuaucuuaccccgggcgacuccucaagcggguggacagcaggagccgcugcauacuauguagguuaccugcaacccagaaccuuuuugcucaaauauaaugaaaacggcacgauuacugaugccguggacugcgcucuggauccuuuaagugagacaaaguguacccugaagucuuucacugucgaaaaagggaucuaccagacauccaauuuuagggugcagccaaccgagagcauaguucgguuccccaacauuacgaaucucugcccuuuuggagagguguucaacgccacccgcuucgcgucggucuaugcauggaaucgaaagagaaucucuaacuguguggccgacuacuccguacuuuacaauucagcuaguuuuagcacauucaaaugcuauggcguuuccccaacuaagcugaacgacuuguguuuuaccaauguguacgccgauucuuucgucauuaggggugacgaagugcggcagaucgcacccgggcaaacaggaaaaaucgcugauuauaacuacaagcuaccggacgauuuuacuggcugcgucauugccuggaauagcaacaaccuggacucaaaagugggcgggaauuauaacuaccucuaucgucuguuccgcaagaguaaucuuaagccuuuugagagagauauauccaccgaaaucuaccaggcgggaagcacacccuguaacgguguugagggcuucaauugcuacuuuccacugcagucuuauggguuccaaccuaccaacggagugggcuaccagcccuauaggguagucguguugucauuugaacuccugcacgccccagcaacuguuugcggucccaaaaagaguacgaauuuagugaaaaacaagugugucaauuucaacuuuaaugggcugacaggcaccggagugcuaacugagagcaacaaaaaguuccucccuuuccagcaguuuggccgggacauugcugauaccacagacgccguacgagauccacaaacccuggagauccuugacauaacuccgugcuccuucgggggagugucuguuauuacacccgguacgaauaccucgaaccaggucgcuguguuguaccagggcgugaauuguacugaagucccuguugccauccacgcagaccagcugacaccaaccuggcgcguguauagcacaggguccaacguguuucaaacuagagccggaugccucaucggcgcugagcauguaaacaauucauacgaaugugauauucccaucggugcggggauuugcgcaaguuaucagacccagacgaacucuccuaggcgggcccgcagcgucgcuucccagucaauaaucgccuacaccaugagccugggcgcagaaaauucuguggccuacuccaacaauaguauugcuaucccaacaaacuucacuaucagcguuaccacagaaauucuucccgugucuaugacuaagaccuccgucgacuguacgauguauauaugcggagauucaacagaguguaguaaucuguugcuccaauacggcagcuuuugcacccagcugaacagagccuuaacugggaucgcaguggagcaggacaaaaauacacaggaaguuuucgcgcaagugaagcagauuuauaaaaccccgccuaucaaggauuuuggagguuucaacuuuucgcagauucugccagaccccuccaaaccuucuaagaggagcuucaucgaggaucuacucuuuaauaagguaacucuggcugacgccggcuucauaaaacaauacggggauugucuuggagacaucgcagcccgugauuugauuugcgcucagaaguucaacggccugaccguccugcccccacucuuaacagacgaaaugaucgcccaguauacgucagcacugcuugcugguaccauuacgaguggguggacauuuggcgccggagcggccuugcagaucccuuucgcuaugcaaauggcauaccgguuuaauggcauaggggugacccagaacgugcucuaugagaaucagaaacugauugccaaccaguucaacuccgcuaucggaaagauucaagauucucuaagcuccacagccacugcacugggcaaacuccaggacgucguuaaucagaacgcgcaggcccugaauacccuugugaagcaauugucaagcaacuuuggugcuaucaguucuguacugaaugacauauuaucccgacucgauaagguggaagccgagguccagaucgacagacugauuacggggaggcuucagagccugcaaacauacgugacccagcaguugauccgcgcagcugagauucgggccucggcaaaccucgccgcuacuaaaaugucagaaugcguucugggacagucuaagagaguggauuucuguggcaaagguuaccaccuaaugaguuuuccccaauccgcgccacauggcgucguguuccugcacguuaccuaugugccggcccaggagaagaauuuuacaacugcuccugcaaucugccacgacgggaaagcccauuuccccagggaaggagucuuuguaagcaacggcacccacugguucgugacacagcgcaauuuuuacgagccacagauaauuacgaccgauaacacuuucguuucugggaauugugacguggucaucggaaucgugaacaauacaguauaugauccccuccaaccugagcuggacagcuucaaggaagaacuugauaaauacuuuaagaaccauaccuccccagacguggauuugggcgacauuucagguaucaaugccagugucguuaacauucagaaggaaauagaucgacugaaugagguggcuaaaaacuuaaacgaaagccucaucgaccugcaggagcuugggaaguaugagcaguacauuaaauggcccugguauaucuggcugggauucauugcaggccuaaucgccauagugauggucacuaucaugcucugcuguaugacaucuugcuguuccugccugaaggguuguugcucauguggcaguugcugcaaauuugacgaagaugacagcgagccuguguugaaggggguuaagcugcacuacaccuga

SEQ ID NO: 11993 - RNA, 3822 nt, Artificial Sequence
  SARS-CoV-2/Belgium/BC-03016/2020__EPI_ISL_415157 spike protein CDS human (1-1273)
auguucguguuucugguccuccuuccccugguuagcucccagugcgugaacuugaccacaagaacucaauuaccuccagccuacacuaauucuuucaccaggggcguauauuacccggacaagguguuucggucaaguguccugcacagcacacaggaucuauuccuccccuuuuucuccaacgugacuugguuucaugcuauccacguuucugggaccaauggaacaaaacgcuucgacaacccugugcugccauuuaaugauggugucuauuucgcaucgaccgagaagucaaacauuauacgaggcuggaucuuugggacuacacuugacagcaaaacccagagucuguugauugugaauaacgccacgaauguaguuaucaaggugugugaguuccaguuuugcaacgaucccuuccucggagucuacuaucauaaaaauaacaaguccuggauggagucugaguuccguguguacagcuccgcgaauaacuguacuuuugaguaugugucacaaccuuuccugauggaccuggaaggcaagcaggguaauuuuaaaaaccucagagaguucgucuuuaagaacauugauggguacuucaaaaucuacaguaagcacaccccaauaaauuuaguuagggaccugccccagggauuuagcgcucuugagccuuugguggaucugccaaucggcauuaacaucacacgguuccagacucuacucgcccugcaucgcucuuaucuuaccccgggcgacuccucaagcggguggacagcaggagccgcugcauacuauguagguuaccugcaacccagaaccuuuuugcucaaauauaaugaaaacggcacgauuacugaugccguggacugcgcucuggauccuuuaagugagacaaaguguacccugaagucuuucacugucgaaaaagggaucuaccagacauccaauuuuagggugcagccaaccgagagcauaguucgguuccccaacauuacgaaucucugcccuuuuggagagguguucaacgccacccgcuucgcgucggucuaugcauggaaucgaaagagaaucucuaacuguguggccgacuacuccguacuuuacaauucagcuaguuuuagcacauucaaaugcuauggcguuuccccaacuaagcugaacgacuuguguuuuaccaauguguacgccgauucuuucgucauuaggggugacgaagugcggcagaucgcacccgggcaaacaggaaaaaucgcugauuauaacuacaagcuaccggacgauuuuacuggcugcgucauugccuggaauagcaacaaccuggacucaaaagugggcgggaauuauaacuaccucuaucgucuguuccgcaagaguaaucuuaagccuuuugagagagauauauccaccgaaaucuaccaggcgggaagcacacccuguaacgguguugagggcuucaauugcuacuuuccacugcagucuuauggguuccaaccuaccaacggagugggcuaccagcccuauaggguagucguguugucauuugaacuccugcacgccccagcaacuguuugcggucccaaaaagaguacgaauuuagugaaaaacaagugugucaauuucaacuuuaaugggcugacaggcaccggagugcuaacugagagcaacaaaaaguuccucccuuuccagcaguuuggccgggacauugcugauaccacagacgccguacgagauccacaaacccuggagauccuugacauaacuccgugcuccuucgggggagugucuguuauuacacccgguacgaauaccucgaaccaggucgcuguguuguaccagggcgugaauuguacugaagucccuguugccauccacgcagaccagcugacaccaaccuggcgcguguauagcacaggguccaacguguuucaaacuagagccggaugccucaucggcgcugagcauguaaacaauucauacgaaugugauauucccaucggugcggggauuugcgcaaguuaucagacccagacgaacucuccuaggcgggcccgcagcgucgcuucccagucaauaaucgccuacaccaugagccugggcgcagaaaauucuguggccuacuccaacaauaguauugcuaucccaacaaacuucacuaucagcguuaccacagaaauucuucccgugucuaugacuaagaccuccgucgacuguacgauguauauaugcggagauucaacagaguguaguaaucuguugcuccaauacggcagcuuuugcacccagcugaacagagccuuaacugggaucgcaguggagcaggacaaaaauacacaggaaguuuucgcgcaagugaagcagauuuauaaaaccccgccuaucaaggauuuuggagguuucaacuuuucgcagauucugccagaccccuccaaaccuucuaagaggagcuucaucgaggaucuacucuuuaauaagguaacucuggcugacgccggcuucauaaaacaauacggggauugucuuggagacaucgcagcccgugauuugauuugcgcucagaaguucaacggccugaccguccugcccccacucuuaacagacgaaaugaucgcccaguauacgucagcacugcuugcugguaccauuacgaguggguggacauuuggcgccggagcggccuugcagaucccuuucgcuaugcaaauggcauaccgguuuaauggcauaggggugacccagaacgugcucuaugagaaucagaaacugauugccaaccaguucaacuccgcuaucggaaagauucaagauucucuaagcuccacagcccccgcacugggcaaacuccaggacgucguuaaucagaacgcgcaggcccugaauacucuugugaagcaauugucaagcaacuuuggugcuaucaguucuguacugaaugacauauuaucccgacucgauaagguggaagccgagguccagaucgacagacugauuaccgggaggcuucagagccugcaaacguacgugacacagcaguugauccgcgcagcugagauucgggccucggcaaaccucgccgcuaccaaaaugucagaaugcguucugggacagucuaagagaguggauuucuguggcaaagguuaccaccuaaugaguuuuccacaauccgcgccgcauggcgucguguuccugcacguuacuuaugugccugcccaggagaagaauuuuaccacagcacccgcuaucugccacgacgggaaagcccauuucccaagggaaggagucuuuguaagcaacggcacucacugguucgugacccagcgcaauuuuuacgagccccagauaauuacaacggauaacaccuucguuucugggaauugugacguggucaucggaaucgugaacaauacuguauaugauccucuccaaccagagcuggacagcuucaaggaagaacuugauaaauacuuuaagaaccauacaucccccgacguggauuugggcgacauuucagguaucaaugccagugucguuaacauucagaaggaaauagaucgacugaaugagguggcuaaaaacuuaaacgaaagccucaucgaccugcaggagcuugggaaguaugagcaguacauuaaauggccuugguauaucuggcugggauucauugcaggccuaaucgccauagugauggucaccaucaugcucugcuguaugacuucuugcuguuccugccugaaggguuguugcucauguggcaguugcugcaaauuugacgaagaugacagcgagccgguguugaaggggguuaagcugcacuacacauga

SEQ ID NO: 11994 - RNA, 3822 nt, Artificial Sequence
  SARS-CoV-2/Germany/BavPat3/2020__EPI_ISL_414521 spike protein CDS human (1-1273)
auguucguguuucugguccuccuuccccugguuagcucccagugcgugaacuugaccacaagaacucaauuaccuccagccuacacuaauucuuucaccaggggcguauauuacccggacaagguguuucggucaaguguccugcacagcacacaggaucuauuccuccccuuuuucuccaacgugacuugguuucaugcuauccacguuucugggaccaauggaacaaaacgcuucgacaacccugugcugccauuuaaugauggugucuauuucgcaucgaccgagaagucaaacauuauacgaggcuggaucuuugggacuacacuugacagcaaaacccagagucuguugauugugaauaacgccacgaauguaguuaucaaggugugugaguuccaguuuugcaacgaucccuuccucggagucuacuaucauaaaaauaacaaguccuggauggagucugaguuccguguguacagcuccgcgaauaacuguacuuuugaauaugugucacaaccuuuccugauggaccuggaaggcaagcaggguaauuuuaaaaaccucagagaguucgucuuuaagaacauugauggguacuucaaaaucuacaguaagcacaccccaauaaauuuaguuagggaccugccccagggauuuagcgcucuugagccuuugguggaucugccaaucggcauuaacaucacacgguuccagacucuacucgcccugcaucgcucuuaucuuaccccgggcgacuccucaagcggguggacagcaggagccgcugcauacuauguagguuaccugcaacccagaaccuuuuugcucaaauauaaugaaaacggcacgauuacugaugccguggacugcgcucuggauccuuuaagugagacaaaguguacccugaagucuuucacugucgaaaaagggaucuaccagacauccaauuuuagggugcagccaaccgagagcauaguucgguuccccaacauuacgaaucucugcccuuuuggagagguguucaacgccacccgcuucgcgucggucuaugcauggaaucgaaagagaaucucuaacuguguggccgacuacuccguacuuuacaauucagcuaguuuuagcacauucaaaugcuauggcguuuccccaacuaagcugaacgacuuguguuuuaccaauguguacgccgauucuuucgucauuaggggugacgaagugcggcagaucgcacccgggcaaacaggaaaaaucgcugauuauaacuacaagcuaccggacgauuuuacuggcugcgucauugccuggaauagcaacaaccuggacucaaaagugggcgggaauuauaacuaccucuaucgucuguuccgcaagaguaaucuuaagccuuuugagagagauauauccaccgaaaucuaccaggcgggaagcacacccuguaacgguguugagggcuucaauugcuacuuuccacugcagucuuauggguuccaaccuaccaacggagugggcuaccagcccuauaggguagucguguugucauuugaacuccugcacgccccagcaacuguuugcggucccaaaaagaguacgaauuuagugaaaaacaagugugucaauuucaacuuuaaugggcugacaggcaccggagugcuaacugagagcaacaaaaaguuccucccuuuccagcaguuuggccgggacauugcugauaccacagacgccguacgagauccacaaacccuggagauccuugacauaacuccgugcuccuucgggggagugucuguuauuacacccgguacgaauaccucgaaccaggucgcuguguuguaccaggacgugaauuguacugaagucccuguugccauccacgcagaucagcugacaccaaccuggcgcguguauagcacaggcuccaacguguuucaaacuagagccgggugccucaucggagcugagcauguaaacaauucauacgaaugugacauucccaucggcgcggguauuugcgcaaguuaucagacccagacgaacucuccuaggcgggcccgcagcgucgcuucccagucaauaaucgccuacaccaugagccugggggcagaaaauucuguggccuacuccaacaauaguauugcuaucccaacaaacuucacuaucagcguuaccacagaaauucuucccgugucuaugacuaagaccuccgucgauuguacgauguauauaugcggcgacucaacagaguguaguaaucuguugcuccaauacggcagcuuuugcacccagcugaacagagccuuaacuggaaucgcaguggagcaggauaaaaauacacagcaaguuuucgcacaggugaagcagauuuauaaaaccccgccuaucaaggacuuugggggauucaacuuuucgcaaauucugccagaucccuccaaaccuucuaagaggagcuucaucgaagaccuacucuuuaauaagguaacucuggcugaugccgguuucauaaaacaguacggcgacugucuuggggauaucgcagcccgugacuugauuugcgcucagaaguucaacggacugaccguccugcccccacucuuaacagaugagaugaucgcccaguauacgucagcacugcuugcuggcaccauuacgagugguuggacauuuggggccggcgcggccuugcaaaucccuuucgcuaugcagauggcauaccgguuuaauggaauaggcgugacccagaacgugcucuaugaaaaucagaaacugauugccaaccaauucaacuccgcuaucgggaagauucaggacucucuaagcuccacagccucagcacugggaaaacuccaggacgucguuaaucagaacgcgcaagcccugaauacucuugugaagcaguugagcaguaacuuuggcgcuaucucuuccguacugaaugauauauuaagccgacucgacaagguggaggccgaaguccagaucgauagacugauuaccgguaggcuucaaucgcugcagacguacgugacacagcaguugauccgcgcagcugagauucgggccucagcaaaccucgccgcuaccaaaaugucugagugcguucuggggcaaaguaagagaguggacuucuguggaaaaggcuaccaccuaauguccuuuccccagagcgcgccacauggugucguguuccugcacguuacuuaugugccggcccaggaaaagaauuuuaccacagcgccugcuaucugccacgauggcaaagcccauuuccccagggagggggucuuuguaucuaacggaacucacugguucgugacccagcgcaauuuuuacgaaccacaaauaauuacaacggacaacaccuucguuagcggcaauugugauguggucaucgggaucgugaacaauacuguauaugacccccuccagccugagcuggauuccuucaaggaggaacuugacaaauacuuuaagaaccauacaucaccagauguggacuugggagauauuaguggcaucaaugccagcgucguuaacauucagaaggagauagaccgacugaaugaaguggcuaaaaacuuaaacgagucucucaucgaccugcaggaacuugguaaguaugagcaauacauuaaauggcccugguauaucuggcugggguucauugcaggacuaaucgccauagugauggucaccaucaugcucugcuguaugacuuccugcuguucaugccugaagggcuguugcaguugugguagcugcugcaaauuugaugaggacgauuccgaaccuguguugaagggcguuaagcugcacuacacauga

SEQ ID NO: 11995 - RNA, 3822 nt, Artificial Sequence
  SARS-CoV-2/France/HF1805/2020__EPI_ISL_414628 spike protein CDS human (1-1273)
auguucguguuucugguccuccuuccccugguuagcucccagugcgugaacuugaccacaagaacucaauuaccuccagccuacacuaauucuuucaccaggggcguauauuacccggacaagguguuucggucaaguguccugcacagcacacaggaucuauuccuccccuuuuucuccaacgugacuugguuucaugcuauccacguuucugggaccaauggaacaaaacgcuucgacaacccugugcugccauuuaaugauggugucuauuucgcaucgaccgagaagucaaacauuauacgaggcuggaucuuugggacuacacuugacagcaaaacccagagucuguugauugugaauaacgccacgaauguaguuaucaaggugugugaguuccaguuuugcaacgaucccuuccucggagucuacuaucauaaaaauaacaaguccuggauggagucugaguuccguguguacagcuccgcgaauaacuguacuuuugaguaugugucacaaccuuuccugauggaccuggaaggcaagcaggguaauuuuaaaaaccucagagaguucgucuuuaagaacauugauggguacuucaaaaucuacaguaagcacaccccaauaaauuuaguuagggaccugccccagggauuuagcgcucuugagccuuugguggaucugccaaucggcauuaacaucacacgguuccagacucuacucgcccugcaucgcucuuaucuuaccccgggcgacuccucaagcggguggacagcaggagccgcugcauacuauguagguuaccugcaacccagaaccuuuuugcucaaauauaaugaaaacggcacgauuacugaugccguggacugcgcucuggauccuuuaagugagacaaaguguacccugaagucuuucacugucgaaaaagggaucuaccagacauccaauuuuagggugcagccaaccgagagcauaguucgguuccccaacauuacgaaucucugcccuuuuggagagguguucaacgccacccgcuucgcgucggucuaugcauggaaucgaaagagaaucucuaacuguguggccgacuacuccguacuuuacaauucagcuaguuuuagcacauucaaaugcuauggcguuuccccaacuaagcugaacgacuuguguuuuaccaauguguacgccgauucuuucgucauuaggggugacgaagugcggcagaucgcacccgggcaaacaggaaaaaucgcugauuauaacuacaagcuaccggacgauuuuacuggcugcgucauugccuggaauagcaacaaccuggacucaaaagugggcgggaauuauaacuaccucuaucgucuguuccgcaagaguaaucuuaagccuuuugagagagauauauccaccgaaaucuaccaggcgggaagcacacccuguaacgguguugagggcuucaauugcuacuuuccacugcagucuuauggguuccaaccuaccaacggagugggcuaccagcccuauaggguagucguguugucauuugaacuccugcacgccccagcaacuguuugcggucccaaaaagaguacgaauuuagugaaaaacaagugugucaauuucaacuuuaaugggcugacaggcaccggagugcuaacugagagcaacaaaaaguuccucccuuuccagcaguuuggccgggacauugcugauaccacagacgccguacgagauccacaaacccuggagauccuugacauaacuccgugcuccuucgggggagugucuguuauuacacccgguacgaauaccucgaaccaggucgcuguguuguaccagggcgugaauuguacugaagucccuguugccauccacgcagaccagcugacaccaaccuggcgcguguauagcacaggguccaacguguuucaaacuagagccggaugccucaucggcgcugagcauguaaacaauucauacgaaugugauauucccaucggugcggggauuugcgcaaguuaucagacccagacgaacucuccuaggcgggcccgcagcgucgcuucccagucaauaaucgccuacaccaugagccugggcgcagaaaauucuguggccuacuccaacaauaguauugcuaucccaacaaacuucacuaucagcguuaccacagaaauucuucccgugucuaugacuaagaccuccgucgacuguacgauguauauaugcggagauucaacagaguguaguaaucuguugcuccaauacggcagcuuuugcacccagcugaacagagccuuaacugggaucgcaguggagcaggacaaaaauacacaggaaguuuucgcgcaagugaagcagauuuauaaaaccccgccuaucaaggauuuuggagguuucaacuuuucgcagauucugccagaccccuccaaaccuucuaagaggagcuucaucgaggaucuacucuuuaauaagguaacucuggcugacgccggcuucauaaaacaauacggggauugucuuggagacaucgcagcccgugauuugauuugcgcucagaaguucaacggccugaccguccugcccccacucuuaacagacgaaaugaucgcccaguauacgucagcacugcuugcugguaccauuacgaguggguggacauuuggcgccggagcggccuugcagaucccuuucgcuaugcaaauggcauaccgguuuaauggcauaggggugacccagaacgugcucuaugagaaucagaaacugauugccaaccaguucaacuccgcuaucggaaagauucaagauucucuaagcuccacagccucagcacugggcaaacuccaggacgucguuaaucagaacgcgcaggcccugaauacucuugugaagcaauugagcaguaacuuuggugcuaucucuuccguacugaaugacauauuaagccgacucgauaagguggaagccgagguccagaucgacagacugauuaccgggaggcuucagucgcugcaaacguacgugacacagcaguugauccgcgcagcugagauucgggccucagcaaaccucgccgcuaccaaaaugucugaaugcguucugggacagaguaagagaguggauuucuguggcaaagguuaccaccuaauguccuuuccccaaagcgcgccacauggcgucguguuccugcacguuacuuaugugccggcccaggagaagaauuuuaccacagcuccugcaaucugccacgacgggaaagcccauuuccccagggaaggagucuuuguaucuaacggcacucacugguucgugacccagcgcaauuuuuacgagccacagauaauuacaacggauaacaccuucguuagcgggaauugugacguggucaucggagugguaaacaauacuguguaugauccccuccaaccugagcuggacuccuucaaggaagaacuugauaaauacuuuaagaaccauacaucaccagacgucgauuugggcgacaucagugguauuaaugccagcguugugaacauccagaaggaaauugaucgacugaaugagguggcuaaaaacuuaaacgaaucucucauagaccugcaggagcuugggaaguaugagcaguacaucaaauggcccugguauauuuggcugggauucaucgcaggccuaauugccaucgucauggugaccauaaugcucugcuguaugacuuccugcuguucaugccugaaggguuguugcaguuguggcagcugcugcaaauuugacgaagaugacuccgagccuguuuugaaggggguaaagcugcacuacacauga

SEQ ID NO: 11996 - RNA, 3822 nt, Artificial Sequence
  SARS-CoV-2/Netherlands/ZuidHolland_9/2020__EPI_ISL_414445 spike protein CDS human (1-1273)
auguucguguuucugguccuccuuccccugguuagcucccagugcgugaacuugaccacaagaacucaauuaccuccagccuacacuaauucuuucaccaggggcguauauuacccggacaagguguuucggucaaguguccugcacagcacacaggaucuauuccuccccuuuuucuccaacgugacuugguuucaugcuauccacguuucugggaccaauggaacaaaacgcuucgacaacccugugcugccauuuaaugauggugucuauuucgcaucgaccgagaagucaaacauuauacgaggcuggaucuuugggacuacacuugacagcaaaacccagagucuguugauugugaauaacgccacgaauguaguuaucaaggugugugaguuccaguuuugcaacgaucccuuccucggagucuacuaucauaaaaauaacaaguccuggauggagucugaguuccguguguacagcuccgcgaauaacuguacuuuugaguaugugucacaaccuuuccugauggaccuggaaggcaagcaggguaauuuuaaaaaccucagagaguucgucuuuaagaacauugauggguacuucaaaaucuacaguaagcacaccccaauaaauuuaguuagggaccugccccagggauuuagcgcucuugagccuuugguggaucugccaaucggcauuaacaucacacgguuccagacucuacucgcccugcaucgcucuuaucuuaccccgggcgacuccucaagcggguggacagcaggagccgcugcauacuauguagguuaccugcaacccagaaccuuuuugcucaaauauaaugaaaacggcacgauuacugaugccguggacugcgcucuggauccuuuaagugagacaaaguguacccugaagucuuucacugucgaaaaagggaucuaccagacauccaauuuuagggugcagccaaccgagagcauaguucgguuccccaacauuacgaaucucugcccuuuuggagagguguucaacgccacccgcuucgcgucggucuaugcauggaaucgaaagagaaucucuaacuguguggccgacuacuccguacuuuacaauucagcuaguuuuagcacauucaaaugcuauggcguuuccccaacuaagcugaacgacuuguguuuuaccaauguguacgccgauucuuucgucauuaggggugacgaagugcggcagaucgcacccgggcaaacaggaaaaaucgcugauuauaacuacaagcuaccggacgauuuuacuggcugcgucauugccuggaauagcaacaaccuggacucaaaagugggcgggaauuauaacuaccucuaucgucuguuccgcaagaguaaucuuaagccuuuugagagagauauauccaccgaaaucuaccaggcgggaagcacacccuguaacgguguugagggcuucaauugcuacuuuccacugcagucuuauggguuccaaccuaccaacggagugggcuaccagcccuauaggguagucguguugucauuugaacuccugcacgccccagcaacuguuugcggucccaaaaagaguacgaauuuagugaaaaacaagugugucaauuucaacuuuaaugggcugacaggcaccggagugcuaacugagagcaacaaaaaguuccucccuuuccagcaguuuggccgggacauugcugauaccacagacgccguacgagauccacaaacccuggagauccuugacauaacuccgugcuccuucgggggagugucuguuauuacacccgguacgaauaccucgaaccaggucgcuguguuguaccagggcgugaauuguacugaagucccuguugccauccacgcagaccagcugacaccaaccuggcgcguguauagcacaggguccaacguguuucaaacuagagccggaugccucaucggcgcugagcauguaaacaauucauacgaaugugauauucccaucggugcggggauuugcgcaaguuaucagacccagacgaacucuccuaggcgggcccgcagcgucgcuucccagucaauaaucgccuacaccaugagccugggcgcagaaaauucuguggccuacuccaacaauaguauugcuaucccaacaaacuucacuaucagcguuaccacagaaauucuucccgugucuaugacuaagaccuccgucgacuguacgauguauauaugcggagauucaacagaguguaguaaucuguugcuccaauacggcagcuuuugcacccagcugaacagagccuuaacugggaucgcaguggagcaggacaaaaauacacaggaaguuuucgcgcaagugaagcagauuuauaaaaccccgccuaucaaggauuuuggagguuucaacuuuucgcagauucugccagaccccuccaaaccuucuaagaggagcuucaucgaggaucuacucuuuaauaagguaacucuggcugacgccggcuucauaaaacaauacggggauugucuuggagacaucgcagcccgugauuugauuugcguccagaaguucaacggccugaccgugcugcccccacucuuaacagacgaaaugaucgcucaguauacgucagcccugcuugcagguaccauuacgaguggguggacauuuggcgcuggagccgcguugcagaucccuuucgccaugcaaauggcuuaccgguuuaauggcauaggggugacccagaacguccucuaugagaaucagaaacugauugcaaaccaguucaacuccgccaucggaaagauucaagauucucuaagcuccacagcuucagcccugggcaaacuccaggacguugugaaucagaacgcacaggcgcugaauacucuuguaaagcaauugagcaguaacuuuggugccaucucuuccgugcugaaugacauauuaagccgacucgauaaggucgaagcugaggugcagaucgacagacugauuaccgggaggcuucagucgcugcaaacguacguuacacagcaguugauccgcgccgcagagauucgggcuucagccaaccucgcagccaccaaaaugucugaaugcgugcugggacagaguaagagagucgauuucuguggcaaagguuaccaccuaauguccuuuccccaaagcgcuccacauggcgugguuuuccugcacgugacuuaugucccggcgcaggagaagaauuuuaccacagccccugcaaucugccacgacgggaaagcucauuuccccagggaaggaguauuugugucuaacggcacucacugguucguuacccagcgcaauuuuuacgagccacagauaauuacaacggauaacaccuucgugagcgggaauugugacgucgugaucggaaucguaaacaauacuguguaugauccccuccaaccugagcuggacuccuucaaggaagaacuugauaaauacuuuaagaaccauacaucaccagacgucgauuugggcgacauuagugguaucaaugccagcguugugaacauucagaaggaaauagaucgacugaaugagguggccaaaaacuuaaacgaaucucucaucgaccugcaggagcuugggaaguaugagcaguacauuaaauggcccugguauaucuggcugggauucauugcuggccuaaucgcaauagucauggugaccaucaugcucugcuguaugacuuccugcuguucaugccugaaggguuguugcaguuguggcagcugcugcaaauuugacgaagaugacuccgagccuguuuugaaggggguaaagcugcacuacacauga

SEQ ID NO: 11997 - RNA, 3822 nt, Artificial Sequence
  SARS-CoV-2/Finland/FIN03032020A/2020__EPI_ISL_413602 spike protein CDS human (1-1273)
auguucguguuucugguccuccuuccccugguuagcucccagugcgugaacuugaccacaagaacucaauuaccuccagccuacaccaauucuuucacgaggggcguauauuacccggacaagguguuucggucaaguguccugcacagcacacaggaucuauuccuccccuuuuucuccaacgugacuugguuucaugcuauccacguuucugggaccaauggaacaaaacgcuucgacaacccugugcugccauuuaaugauggugucuauuucgcaucgaccgagaagucaaacauuauacgaggcuggaucuuugggacuacacuugacagcaaaacccagagucuguugauugugaauaacgccacgaauguaguuaucaaggugugugaguuccaguuuugcaacgaucccuuccucggagucuacuaucauaaaaauaacaaguccuggauggagucugaguuccguguguacagcuccgcgaauaacuguacuuuugaguaugugucacaaccuuuccugauggaccuggaaggcaagcaggguaauuuuaaaaaccucagagaguucgucuuuaagaacauugauggguacuucaaaaucuacaguaagcacaccccaauaaauuuaguuagggaccugccccagggauuuagcgcucuugagccuuugguggaucugccaaucggcauuaacaucacacgguuccagacucuacucgcccugcaucgcucuuaucuuaccccgggcgacuccucaagcggguggacagcaggagccgcugcauacuauguagguuaccugcaacccagaaccuuuuugcucaaauauaaugaaaacggcacgauuacugaugccguggacugcgcucuggauccuuuaagugagacaaaguguacccugaagucuuucacugucgaaaaagggaucuaccagacauccaauuuuagggugcagccaaccgagagcauaguucgguuccccaacauuacgaaucucugcccuuuuggagagguguucaacgccacccgcuucgcgucggucuaugcauggaaucgaaagagaaucucuaacuguguggccgacuacuccguacuuuacaauucagcuaguuuuagcacauucaaaugcuauggcguuuccccaacuaagcugaacgacuuguguuuuaccaauguguacgccgauucuuucgucauuaggggugacgaagugcggcagaucgcacccgggcaaacaggaaaaaucgcugauuauaacuacaagcuaccggacgauuuuacuggcugcgucauuagcuggaacucaaauaaccuggacaguaaagugggcgggaauuauaacuaccucuaucgucuguuccgcaaguccaaucuuaagccuuuugagagagauauaagcaccgaaaucuaccaggccggaucuacacccuguaacgguguugagggcuucaauugcuacuuuccacugcagucauauggguuccaaccuaccaacggagugggcuaccagcccuauaggguagucguguugaguuuugaacuccugcacgcgccagccacuguuugcggucccaaaaagagcacgaauuuagugaaaaacaagugugucaauuucaacuuuaaugggcugacaggcaccggagugcuaacugaguccaacaaaaaguuccucccuuuccagcaguuuggccgggacauugcagauaccacagacgcuguacgagauccacaaacccuggagauccuugacauaacuccgugcucuuucgggggagugucgguuauuacacccgguacgaauaccagcaaccaggucgccguguuguaccagggcgugaauuguacugaagucccuguugcuauccacgccgaccagcugacaccaaccuggcgcguguauuccacagggucaaacguguuucaaacuagagcaggaugccucaucggcgccgagcauguaaacaauaguuacgaaugugauauucccaucggugcugggauuugcgcgucuuaucagacccagacgaacagcccuaggcgggcacgcuccgucgccucacagagcauaaucgcuuacaccaugucucugggcgccgaaaauuccguggcauacaguaacaauagcauugccaucccaacaaacuucacuaucucuguuaccacagaaauucuucccguguccaugacuaagaccucagucgacuguacgauguauauaugcggagauaguacagaguguagcaaucuguugcuccaauacggcucguuuugcacccagcugaacagagcuuuaacugggaucgccguggagcaggacaaaaauacacaggaaguuuucgcacaagugaagcagauuuauaaaaccccgccuaucaaggauuuuggagguuucaacuuuucccagauucugccagaccccucuaaaccuagcaagaggucauucaucgaggaucuacucuuuaauaagguaacucuggcggacgcuggcuucauaaaacaauacggggauugucuuggagacaucgccgcacgugauuugauuugcgcccagaaguucaacggccugaccguccugcccccacucuuaacagacgaaaugaucgcucaguauacgagugcccugcuugcagguaccauuacuuccggguggacauuuggcgcuggagccgcguugcagaucccuuucgccaugcaaauggcuuaccgguuuaauggcauaggggugacccagaacgugcucuaugagaaucagaaacugauugcaaaccaguucaacucugccaucggaaagauucaagauagccuauccucaacagcuagcgcccugggcaaacuccaggacgucguuaaucagaacgcacaggcgcugaauacucuugugaagcaauugaguucuaacuuuggugccaucuccagcguacugaaugacauauuaucgcgacucgauaagguggaagcugagguccagaucgacagacugauuaccgggaggcuucagucacugcaaacguacgugacacagcaguugauccgcgccgcagagauucgggcuucugccaaccucgcagccaccaaaaugagugaaugcguucugggacaguccaagagaguggauuucuguggcaaagguuaccaccuaaugagcuuuccccaaucugcuccacauggcgucguguuccugcacguuacuuaugugccggcgcaggagaagaauuuuaccacagccccugcaaucugccacgacgggaaagcucauuuccccagggaaggagucuuuguaagcaacggcacucacugguucgugacccagcgcaauuuuuacgagccacagauaauuacaacggauaacaccuucguuuccgggaauugugacguggucaucggaaucgugaacaauacuguauaugauccccuccaaccugagcuggacucauucaaggaagaacuugauaaauacuuuaagaaccauacaaguccagacguggauuugggcgacauuagcgguaucaaugccucugucguuaacauucagaaggaaauagaucgacugaaugagguggccaaaaacuuaaacgaaucccucaucgaccugcaggagcuugggaaguaugagcaguacauuaaauggcccugguauaucuggcugggauucauugcuggccuaaucgcaauagugauggucaccaucaugcucugcuguaugacuucaugcuguaguugccugaaggguuguugcagcuguggcuccugcugcaaauuugacgaagaugacucugagccuguguugaaggggguuaagcugcacuacacauga

SEQ ID NO: 11998 - RNA, 3822 nt, Artificial Sequence
  SARS-CoV-2/France/GE1977/2020__EPI_ISL_414632 spike protein CDS human (1-1273)
auguucguguuucugguccuccuuccccugguuagcucccagugcgugaacuugaccacaagaacucaauuaccuccagccuacacuaauucuuucaccaggggcguauauuacccggacaagguguuucggucaaguguccugcacagcacacaggaucuauuccuccccuuuuucuccaacgugacuugguuucaugcuauccacguuucugggaccaauggaacaaaacgcuucgacaacccugugcugccauuuaaugauggugucuauuucgcaucgaccgagaagucaaacauuauacgaggcuggaucuuugggacuacacuugacagcaaaacccagagucuguugauugugaauaacgccacgaauguaguuaucaaggugugugaguuccaguuuugcaacgaucccuuccucggagucuacuaucauaaaaauaacaaguccuggauggagucugaguuccguguguacagcuccgcgaauaacuguacuuuugaguaugugucacaaccuuuccugauggaccuggaaggcaagcaggguaauuuuaaaaaccucagagaguucgucuuuaagaacauugauggguacuucaaaaucuacaguaagcacaccccaauaaauuuaguuagggaccugccccagggauuuagcgcucuugagccuuugguggaucugccaaucggcauuaacaucacacgguuccagacucuacucgcccugcaucgcucuuaucuuaccccgggcgacuccucaagcggguggacagcaggagccgcugcauacuauguagguuaccugcaacccagaaccuuuuugcucaaauauaaugaaaacggcacgauuacugaugccguggacugcgcucuggauccuuuaagugagacaaaguguacccugaagucuuucacugucgaaaaagggaucuaccagacauccaauuuuagggugcagccaaccgagagcauaguucgguuccccaacauuacgaaucucugcccuuuuggagagguguucaacgccacccgcuucgcgucggucuaugcauggaaucgaaagagaaucucuaacuguguggccgacuacuccguacuuuacaauucagcuaguuuuagcacauucaaaugcuauggcguuuccccaacuaagcugaacgacuuguguuuuaccaauguguacgccgauucuuucgucauuaggggugacgaagugcggcagaucgcacccgggcaaacaggaaaaaucgcugauuauaacuacaagcuaccggacgauuuuacuggcugcgucauugccuggaauagcaacaaccuggacucaaaagugggcgggaauuauaacuaccucuaucgucuguuccgcaagaguaaucuuaagccuuuugagagagauauauccaccgaaaucuaccaggcgggaagcacacccuguaacgguguugagggcuucaauugcuacuuuccacugcagucuuauggguuccaaccuaccaacggagugggcuaccagcccuauaggguagucguguugucauuugaacuccugcacgccccagcaacuguuugcggucccaaaaagaguacgaauuuagugaaaaacaagugugucaauuucaacuuuaaugggcugacaggcaccggagugcuaacugagagcaacaaaaaguuccucccuuuccagcaguuuggccgggacauugcugauaccacagacgccguacgagauccacaaacccuggagauccuugacauaacuccgugcuccuucgggggagugucuguuauuacacccgguacgaauaccucgaaccaggucgcuguguuguaccagggcgugaauuguacugaagucccuguugccauccacgcagaccagcugacaccaaccuggcgcguguauagcacaggguccaacguguuucaaacuagagccggaugccucaucggcgcugagcauguaaacaauucauacgaaugugauauucccaucggugcggggauuugcgcaaguuaucagacccagacgaacucuccuaggcgggcccgcagcgucgcuucccagucaauaaucgccuacaccaugagccugggcgcagaaaauucuguggccuacuccaacaauaguauugcuaucccaacaaacuucacuaucagcguuaccacagaaauucuucccgugucuaugacuaagaccuccgucgacuguacgauguauauaugcggagauucaacagaguguaguaaucuguugcuccaauacggcagcuuuugcacccagcugaacagagccuuaacugggaucgcaguggagcaggacaaaaauacacaggaaguuuucgcgcaagugaagcagauuuauaaaaccccgccuaucaaggauuuuggagguuucaacuuuucgcagauucugccagaccccuccaaaccuucuaagaggagcuucaucgaggaucuacucuuuaauaagguaacucuggcugacgccggcuucauaaaacaauacggggauugucuuggagacaucgcagcccgugauuugauuugcgcucagaaguucaacggccugaccguccugcccccacucuuaacagacgaaaugaucgcccaguauacgucagcacugcuugcugguaccauuacgaguggguggacauuuggcgccggagcggccuugcagaucccuuucgcuaugcaaauggcauaccgguuuaauggcauaggggugacccagaacgugcucuaugagaaucagaaacugauugccaaccaguucaacuccgcuaucggaaagauucaagauucucuauuuagcacagccuccgcacugggcaaacuccaggacgucguuaaucagaacgcgcaggcccugaauacucuugugaagcaauugucaagcaacuucggugcuaucaguucuguacugaaugacauauuaucccgacucgauaagguggaagccgagguccagaucgacagacugauuaccgggaggcuucagagccugcaaacguacgugacacagcaguugauccgcgcagcugagauucgggccucggcaaaccucgccgcuaccaaaaugucagaaugcguucugggacagucuaagagaguggauuuuuguggcaaagguuaccaccuaaugaguuucccccaauccgcgccacauggcgucguguuucugcacguuacuuaugugccggcccaggagaagaauuucaccacagcuccugcaaucugccacgacgggaaagcccauuuucccagggaaggagucuucguaagcaacggcacucacugguuugugacccagcgcaauuucuacgagccacagauaauuacaacggauaacaccuucguuucugggaauugugacguggucaucggaaucgugaacaauacuguauaugauccccuccaaccugagcuggacagcuuuaaggaagaacuugauaaauacuucaagaaccauacauccccagacguggauuugggcgacauuucagguaucaaugccagugucguuaacauucagaaggaaauagaucgacugaaugagguggcuaaaaacuuaaacgaaagccucaucgaccugcaggagcuugggaaguaugagcaguacauuaaauggcccugguauaucuggcugggauuuauugcaggccuaaucgccauagugauggucaccaucaugcucugcuguaugacuucuugcuguuccugccugaaggguuguugcucauguggcaguugcugcaaauucgacgaagaugacagcgagccuguguugaaggggguuaagcugcacuacacauga

SEQ ID NO: 11999 - RNA, 3822 nt, Artificial Sequence
  SARS-CoV-2/Finland/FIN-313/2020__EPI_ISL_414641 spike protein CDS human (1-1273)
auguucguguuucugguccuccuuccccugguuagcucccagugcgugaacuugaccacaagaacucaauuaccuccagccuacacuaauucuuucaccaggggcguauauuacccggacaagguguuucggucaaguguccugcacagcacacaggaucuauuccuccccuuuuucuccaacgugacuugguuucaugcuauccacguuucugggaccaauggaacaaaacgcuucgacaacccugugcugccauuuaaugauggugucuauuucgcaucgaccgagaagucaaacauuauacgaggcuggaucuuugggacuacacuugacagcaaaacccagagucuguugauugugaauaacgccacgaauguaguuaucaaggugugugaguuccaguuuugcaacgaucccuuccucggagucuacuaucauaaaaauaacaaguccuggauggagucugaguuccguguguacagcuccgcgaauaacuguacuuuugaguaugugucacaaccuuuccugauggaccuggaaggcaagcaggguaauuuuaaaaaccucagagaguucgucuuuaagaacauugauggguacuucaaaaucuacaguaagcacaccccaauaaauuuaguuagggaccugccccagggauuuagcgcucuugagccuuugguggaucugccaaucggcauuaacaucacacgguucaaaacucuacucgcccugcaucgcucuuaucuuaccccgggcgacuccucaagcggguggacagcaggagccgcugcauacuauguagguuaccugcagcccagaaccuuuuugcucaaguauaaugaaaacggcacgauuacugaugccguggacugcgcucuggauccuuuaagugagacaaaguguacccugaaaucuuucacugucgaaaaggggaucuaccaaacauccaauuuuagggugcagccaaccgagagcauaguucgguuccccaacauuacgaaucucugcccuuuuggagagguguucaacgccacccgcuucgcgucggucuaugcauggaaucgaaaaagaaucucuaacuguguggccgacuacuccguacuuuacaauucagcuaguuuuagcacauucaagugcuauggcguuuccccaacuaaacugaacgacuuguguuuuaccaauguguacgccgauucuuucgucauuaggggugacgaagugcggcagaucgcacccgggcagacaggaaagaucgcugauuauaacuacaaacuaccggacgauuuuacuggcugcgucauugccuggaauagcaacaaccuggacucaaaggugggcgggaauuauaacuaccucuaucgucuguuccgcaagaguaaucuuaaaccuuuugagagagauauauccaccgaaaucuaccaagcgggaagcacacccuguaacgguguugagggcuucaauugcuacuuuccacugcagucuuauggguuccagccuaccaacggagugggcuaccaacccuauaggguagucguguugucauuugaacuccugcacgccccagcaacuguuugcggucccaagaaaaguacgaauuuagugaagaacaaaugugucaauuucaacuuuaaugggcugacaggcaccggagugcuaacugagagcaacaagaaguuccucccuuuccagcaguuuggccgggacauugcugauaccacagacgccguacgagauccacagacccuggagauccuugacauaacuccgugcuccuucgggggagugucuguuauuacacccgguacgaauaccucgaaccaagucgcuguguuguaccagggcgugaauuguacugaagucccuguugccauccacgcagaccagcugacaccaaccuggcgcguguauagcacaggguccaacguguuucagacuagagccggaugccucaucggcgcugagcauguaaacaauucauacgaaugugauauucccaucggugcggggauuugcgcaaguuaucaaacccagacgaacucuccuaggcgggcccgcagcgucgcuucccagucaauaaucgccuacaccaugagccugggcgcagaaaauucuguggccuacuccaacaauaguauugcuaucccaacaaacuucacuaucagcguuaccacagaaauucuucccgugucuaugacuaaaaccuccgucgacuguacgauguauauaugcggagauucaacagaguguaguaaucuguugcuccaguacggcagcuuuugcacccaacugaacagagccuuaacugggaucgcaguggagcaggacaagaauacacaggaaguuuucgcacaggugaaacaaauuuauaagaccccgccuaucaaagauuuuggagguuucaacuuuucgcagauucugccagaccccuccaagccuucuaagaggagcuucaucgaggaucuacucuuuaauaaaguaacucuggcugacgccggcuucauaaagcaguacggggauugucuuggagacaucgcagcccgugauuugauuugcgcucaaaaauucaacggccugaccguccugcccccacucuuaacagacgaaaugaucgcccaguauacgucagcacugcuugcugguaccauuacgaguggguggacauuuggcgccggagcggccuugcagaucccuuucgcuaugcagauggcauaccgguuuaauggcauaggggugacccaaaacgugcucuaugagaaucagaagcugauugccaaccaguucaacuccgcuaucggaaaaauucaggauucucuaagcuccacagccucagcacugggcaagcuccaagacgucguuaaucagaacgcgcaggcccugaauacucuugugaagcaguugagcaguaacuuuggugcuaucucuuccguacugaaugacauauuaagccgacucgauaaaguggaagccgagguccaaaucgacagacugauuaccgggaggcuucagucgcugcagacguacgugacacaacaguugauccgcgcagcugagauucgggccucagcaaaccucgccgcuaccaagaugucugaaugcguucugggacagaguaaaagaguggauuucuguggcaaggguuaccaccuaauguccuuuccccagagcgcgccacauggcgucguguuccugcacguuacuuaugugccggcccaagagaaaaauuuuaccacagcgccugcuaucugccacgacgggaaggcccauuuccccagggaaggagucuuuguaucuaacggcacucacugguucgugacccagcgcaauuuuuacgagccacagauaauuacaacggauaacaccuucguuagcgggaauugugacguggucaucggaaucgugaacaauacuguauaugauccccuccagccugagcuggacuccuucaaagaagaacuugauaaguacuuuaagaaccauacaucaccagacguggauuugggcgacauuagugguaucaaugccagcgucguuaacauucaaaaagaaauagaucgacugaaugagguggcuaagaacuuaaacgaaucucucaucgaccugcaggagcuugggaaauaugagcaguacauuaaguggcccugguauaucuggcugggauucauugcaggccuaaucgccauagugauggucaccaucaugcucugcuguaugacuuccugcuguucaugccugaaagguuguugcaguuguggcagcugcugcaaguuugacgaagaugacuccgagccuguguugaaggggguuaaacugcacuacacauga

SEQ ID NO: 12000 - RNA, 3822 nt, Artificial Sequence
  SARS-CoV-2/Netherlands/ZuidHolland_2/2020__EPI_ISL_414556 spike protein CDS human (1-1273)
auguucguguuucugguccuccuuccccugguuagcucccagugcgugaacuugaccacaagaacucaauuaccuccagccuacacuaauucuuucaccaggggcguauauuacccggacaagguguuucggucaaguguccugcacagcacacaggaucuauuccuccccuuuuucuccaacgugacuugguuucaugcuauccacguuucugggaccaauggaacaaaacgcuucgacaacccugugcugccauuuaaugauggugucuauuucgcaucgaccgagaagucaaacauuauacgaggcuggaucuuugggacuacacuugacagcaaaacccagagucuguugauugugaauaacgccacgaauguaguuaucaaggugugugaguuccaguuuugcaacgaucccuuccucggagucuacuaucauaaaaauaacaaguccuggauggagucugaguuccguguguacagcuccgcgaauaacuguacuuuugaauaugugucacaaccuuuccugauggaccuggaaggcaagcaggguaauuuuaaaaaccucagagaguucgucuuuaagaacauugauggguacuucaaaaucuacaguaagcacaccccaauaaauuuaguuagggaccugccccagggauuuagcgcucuugagccuuugguggaucugccaaucggcauuaacaucacacgguuccagacucuacucgcccugcaucgcucuuaucuuaccccgggcgacuccucaagcggguggacagcaggagccgcugcauacuauguagguuaccugcaacccagaaccuuuuugcucaaauauaaugaaaacggcacgauuacugaugccguggacugcgcucuggauccuuuaagugagacaaaguguacccugaagucuuucacugucgaaaaagggaucuaccagacauccaauuuuagggugcagccaaccgagagcauaguucgguuccccaacauuacgaaucucugcccuuuuggagagguguucaacgccacccgcuucgcgucggucuaugcauggaaucgaaagagaaucucuaacuguguggccgacuacuccguacuuuacaauucagcuaguuuuagcacauucaaaugcuauggcguuuccccaacuaagcugaacgacuuguguuuuaccaauguguacgccgauucuuucgucauuaggggugacgaagugcggcagaucgcacccgggcaaacaggaaaaaucgcugauuauaacuacaagcuaccggacgauuuuacuggcugcgucauugccuggaauagcaacaaccuggacucaaaagugggcgggaauuauaacuaccucuaucgucuguuccgcaagaguaaucuuaagccuuuugagagagauauauccaccgaaaucuaccaggcgggaagcacacccuguaacgguguugagggcuucaauugcuacuuuccacugcagucuuauggguuccaaccuaccaacggagugggcuaccagcccuauaggguagucguguugucauuugaacuccugcacgccccagcaacuguuugcggucccaaaaagaguacgaauuuagugaaaaacaagugugucaauuucaacuuuaaugggcugacaggcaccggagugcuaacugagagcaacaaaaaguuccucccuuuccagcaguuuggccgggacauugcugauaccacagacgccguacgagauccacaaacccuggagauccuugacauaacuccgugcuccuucgggggagugucuguuauuacacccgguacgaauaccucgaaccaggucgcuguguuguaccagggcgugaauuguacugaagucccuguugccauccacgcagaccagcugacaccaaccuggcgcguguauagcacaggguccaacguguuucaaacuagagccggaugccucaucggcgcugagcauguaaacaauucauacgaaugugauauucccaucggugcggggauuugcgcaaguuaucagacccagacgaacucuccuaggcgggcccgcagcgucgcuucccagucaauaaucgccuacaccaugagccugggcgcagaaaauucuguggccuacuccaacaauaguauugcuaucccaacaaacuucacuaucagcguuaccacagaaauucuucccgugucuaugacuaagaccuccgucgacuguacgauguauauaugcggagauucaacagaguguaguaaucuguugcuccaauacggcagcuuuugcacccagcugaacagagccuuaacugggaucgcacuggagcaggacaaaaauacacaggaaguguucgcgcaaguuaagcagauuuauaaaaccccgccuaucaaggauuuuggagguuucaacuuuucgcagauucuaccagaccccuccaaaccuucuaagaggagcuucaucgaggaucuccuguuuaauaaggugacucuugcugacgccggcuucauaaaacaauacggggauuguuugggagacaucgcagcccgugaucugauuugcgcucagaaguucaacggccucaccguacugcccccauuacugacagacgaaaugaucgcccaguauacgucagcacuuuuggcugguaccauuacgaguggguggacauuuggcgccggagcggcccuccagaucccuuucgcuaugcaaauggcauaccgguuuaauggcauaggggucacccagaacgugcuguaugagaaucagaaacuaauugccaaccaguucaacuccgcuaucggaaagauucaagauucucugagcuccacagccucagcacucggcaaacugcaggacguggucaaucagaacgcgcaggcccuuaauacuuugguuaagcaacugagcaguaacuuuggugcuaucucuuccguguuaaaugacauacucagccgacuggauaagguagaagccgaggugcagaucgacagacuuauuaccgggaggcugcagucguugcaaacguacgucacacagcagcucauccgcgcagcugagauucgggccucagcaaaccuggccgcuaccaaaaugucugaaugcgugcuaggacagaguaagagaguugauuucuguggcaaagguuaccaccugauguccuuuccccaaagcgcgccacauggcguggucuuccuccacgugacuuauguuccggcccaggagaagaauuuuaccacagcuccugcaaucugccacgacgggaaagcccauuuccccagggaaggaguguuugucucuaacggcacucacugguucguaacccagcgcaauuuuuacgagccacagauaauuacaacggauaacaccuucgugagcgggaauugugacguugugaucggaaucgucaacaauacuguguaugauccccugcaaccugagcuugacuccuucaaggaagaguuggauaaauacuuuaagaaccauacaucaccagacguagaucugggcgacauuagugguaucaaugccagcguggucaacauucagaaggaaauagaucgauuaaaugagguugcuaaaaaccucaacgaaucucugaucgaccuucaggagcuggggaaguaugagcaguacauuaaauggcccugguauaucuggcuaggauucauugcaggccucaucgccauagugauggugaccaucaugcugugcuguaugacuuccugcuguucaugcuugaaggguuguugcaguuguggcagcugcugcaaauuugacgaagaugacuccgagccuguccugaagggggugaaguuacacuacacauga

SEQ ID NO: 12001 - RNA, 3822 nt, Artificial Sequence
  SARS-CoV-2/USA/WA-UW31/2020__EPI_ISL_414618 spike protein CDS human (1-1273)
auguucguguuucugguccuccuuccccugguuagcucccagugcgugaacuugaccacaagaacucaauuaccuccagccuacacuaauucuuucaccaggggcguauauuacccggacaagguguuucggucaaguguccugcacagcacacaggaucuauuccuccccuuuuucuccaacgugacuugguuucaugcuauccacguuucugggaccaauggaacaaaacgcuucgacaacccugugcugccauuuaaugauggugucuauuucgcaucgaccgagaagucaaacauuauacgaggcuggaucuuugggacuacacuugacagcaaaacccagagucuguugauugugaauaacgccacgaauguaguuaucaaggugugugaguuccaguuuugcaacgaucccuuccucggagucuacuaucauaaaaauaacaaguccuggauggagucugaguuccguguguacagcuccgcgaauaacuguacuuuugaauaugugucacaaccuuuccugauggaccuggaaggcaagcaggguaauuuuaaaaaccucagagaguucgucuuuaagaacauugauggguacuucaaaaucuacaguaagcacaccccaauaaauuuaguuagggaccugccccagggauuuagcgcucuugagccuuugguggaucugccaaucggcauuaacaucacacgguuccagacucuacucgcccugcaucgcucuuaucuuaccccgggcgacuccucaagcggguggacagcaggagccgcugcauacuauguagguuaccugcaacccagaaccuuuuugcucaaauauaaugaaaacggcacgauuacugaugccguggacugcgcucuggauccuuuaagugagacaaaguguacccugaagucuuucacugucgaaaaagggaucuaccagacauccaauuuuagggugcagccaaccgagagcauaguucgguuccccaacauuacgaaucucugcccuuuuggagagguguucaacgccacccgcuucgcgucggucuaugcauggaaucgaaagagaaucucuaacuguguggccgacuacuccguacuuuacaauucagcuaguuuuagcacauucaaaugcuauggcguuuccccaacuaagcugaacgacuuguguuuuaccaauguguacgccgauucuuucgucauuaggggugacgaagugcggcagaucgcacccgggcaaacaggaaaaaucgcugauuauaacuacaagcuaccggacgauuuuacuggcugcgucauugccuggaauagcaacaaccuggacucaaaagugggcgggaauuauaacuaccucuaucgucuguuccgcaagaguaaucuuaagccuuuugagagagauauauccaccgaaaucuaccaggcgggaagcacacccuguaacggugccgagggcuucaauugcuacuuuccacugcagucuuauggguuccaaccuaccaacggaguuggcuaccagcccuauagggugguagucuugucauuugaacuccugcacgcaccagcuacugugugcggucccaaaaagaguacgaauuuaguuaaaaacaagugugugaauuucaacuuuaaugggcugacaggcaccggaguccuaacugagagcaacaaaaaguuccucccuuuccagcaguuuggccgggacauugccgauaccacagacgcugugcgagauccacaaacccuggagauccuugacauaacuccgugcuccuucgggggaguaucugugauuacacccgguacgaauaccucgaaccagguugccgucuuguaccaggacgugaauuguacugaagugccugucgcaauccacgccgaucagcugacaccaaccuggcgcguuuauagcacaggcuccaacguguuucaaacuagagcugggugccucaucggagcggagcaugugaacaauucauacgaaugugacauucccaucggcgcagguauuugcgccaguuaucagacccagacgaacucuccuaggcgggcucgcagcguagccucccagucaauaaucgcauacaccaugagccugggggccgaaaauucugucgcuuacuccaacaauaguauugccaucccaacaaacuucacuaucagcgugaccacagaaauucuucccguuucuaugacuaagaccuccguggauuguacgauguauauaugcggcgacucaacagaguguaguaaucuguugcuccaauacggcagcuuuugcacccagcugaacagagcauuaacuggaaucgcggucgagcaggauaaaaauacacaggaaguguucgcucaaguuaagcagauuuauaaaaccccgccuaucaaggacuuugggggauucaacuuuucgcagauucugccagaucccuccaaaccuucuaagaggagcuucaucgaggaccuacucuuuaauaaggugacucuggccgaugcagguuucauaaaacaauacggcgacugucuuggggauaucgccgcucgugacuugauuugcgcccagaaguucaacggacugaccguacugcccccacucuuaacagaugaaaugaucgcacaguauacgucagcucugcuugccggcaccauuacgagugguuggacauuuggggcgggcgccgcuuugcagaucccuuucgcaaugcaaauggccuaccgguuuaauggaauaggcgucacccagaacgugcucuaugagaaucagaaacugauugcuaaccaguucaacuccgccaucgggaagauucaagacucucuaagcuccacagcaucagcgcugggaaaacuccaggacguggucaaucagaacgcccaggcucugaauacucuuguuaagcaauugagcaguaacuuuggcgccaucucuuccgugcugaaugauauauuaagccgacucgacaagguagaagcagaggugcagaucgauagacugauuaccgguaggcuucagucgcugcaaacguacgucacacagcaguugauccgcgcugccgagauucgggcaucagccaaccucgcugcgaccaaaaugucugaaugcgugcuggggcagaguaagagaguugacuucuguggaaaaggcuaccaccuaauguccuuuccccaaagcgccccacaugguguggucuuccugcacgugacuuauguuccggcacaggagaagaauuuuaccacagcuccugccaucugccacgauggcaaagcccauuuccccagggaagggguguuugucucuaacggaacucacugguucguaacccagcgcaauuuuuacgagccacagauaauuacaacggacaacaccuucgugagcggcaauugugauguugugaucgggaucgucaacaauacuguguaugacccccuccaaccugagcuggauuccuucaaggaggaacuugacaaauacuuuaagaaccauacaucaccagauguagacuugggagauauuaguggcaucaaugcuagcguggucaacauucagaaggaaauagaccgacugaaugagguugccaaaaacuuaaacgaaucucucaucgaccugcaggagcuugguaaguaugagcaguacauuaaauggcccugguauaucuggcugggguucauugcaggacuaaucgcgauagugauggugaccaucaugcucugcuguaugacuuccugcuguucaugccugaagggcuguugcaguugugguagcugcugcaaauuugaugaagacgauuccgagccugucuugaagggcgugaagcugcacuacacauga

SEQ ID NO: 12002 - RNA, 3822 nt, Artificial Sequence
  SARS-CoV-2/South Korea/SNU01/2020__EPI_ISL_411929 spike protein CDS human (1-1273)
auguucguguuucugguccuccuuccccugguuagcucccagugcgugaacuugaccacaagaacucaauuaccuccagccuacaccaauucuuucacgaggggcguauauuacccggacaagguguuucggucaaguguccugcacagcacacaggaucuauuccuccccuuuuucuccaacgugacuugguuucaugcuauccacguuucugggaccaauggaacaaaacgcuucgacaacccugugcugccauuuaaugauggugucuauuucgcaucgaccgagaagucaaacauuauacgaggcuggaucuuugggacuacacuugacagcaaaacccagagucuguugauugugaauaacgccacgaauguaguuaucaaggugugugaguuccaguuuugcaacgaucccuuccucggagucuacuaucauaaaaauaacaaguccuggauggagucugaguuccguguguacagcuccgcgaauaacuguacuuuugaauaugugucacaaccuuuccugauggaccuggaaggcaagcaggguaauuuuaaaaaccucagagaguucgucuuuaagaacauugauggguacuucaaaaucuacaguaagcacaccccaauaaauuuaguuagggaccugccccagggauuuugggcucuugagccuuugguggaucugccaaucggcauuaacaucacacgguuccagacucuacucgcccugcaucgcagcuaucuuaccccgggcgacucuuccucaggguggacagcaggagccgcugcauacuauguagguuaccugcaacccagaaccuuuuugcucaaauauaaugaaaacggcacgauuacugaugccguggacugcgcucuggauccuuuaagcgagacaaaguguacccugaagaguuucacugucgaaaaagggaucuaccagacaucuaauuuuagggugcagccaaccgaguccauaguucgguuccccaacauuacgaaucucugcccuuuuggagagguguucaacgccacccgcuucgcgagcgucuaugcauggaaucgaaagagaaucucgaacuguguggccgacuacucuguacuuuacaauuccgcuucauuuaguacauucaaaugcuauggcguuagcccaacuaagcugaacgacuuguguuuuaccaauguguacgccgauuccuucgucauuaggggugacgaagugcggcagaucgcacccgggcaaacaggaaaaaucgcugauuauaacuacaagcuaccggacgauuuuacuggcugcgucauugccuggaacucuaauaaccuggacagcaaagugggcgggaauuauaacuaccucuaucgucuguuccgcaagucaaaucuuaagccuuuugagagagauauaaguaccgaaaucuaccaggcgggauccacacccuguaacgguguugagggcuucaauugcuacuuuccacugcagagcuauggguuccaaccuaccaacggagugggcuaccagcccuauaggguagucguguugucuuuugaacuccugcacgccccagcaacuguuugcggucccaaaaagucaacgaauuuagugaaaaacaagugugucaauuucaacuuuaaugggcugacaggcaccggagugcuaacugagaguaacaaaaaguuccucccuuuccagcaguuuggccgggacauugcugauaccacagacgccguacgagauccacaaacccuggagauccuugacauaacuccgugcagcuucgggggaguguccguuauuacacccgguacgaauaccucuaaccaggucgcuguguuguaccaggacgugaauuguacugaagucccuguugccauccacgcagaucagcugacaccaaccuggcgcguguauucgacaggcagcaacguguuucaaacuagagccgggugccucaucggagcugagcauguaaacaauuccuacgaaugugacauucccaucggcgcggguauuugcgcaucauaucagacccagacgaacaguccuaggcgggcccgcucugucgcuagccaguccauaaucgccuacaccaugucacugggggcagagaauagcguggccuacucuaacaauuccauugcuaucccaacaaacuucacuaucaguguuaccacagaaauucuucccgugagcaugacuaagaccucugucgauuguacgauguauauaugcggcgacuccacagaguguucaaaucuguugcuccaauacggaaguuuuugcacccagcugaacagagccuuaacuggcaucgcaguggagcaggauaaaaauacacaggaaguuuucgcgcaagugaagcagauuuauaaaaccccgccuaucaaggacuuugggggauucaacuuuagccagauucugccagaucccucgaaaccuuccaagaggucuuucaucgaggaccuacucuuuaauaagguaacucuggcugaugccgguuucauaaaacaauacggcgacugucuuggggauaucgcagcccgugacuugauuugcgcucagaaguucaacggacugaccguccucccuccacuguuaacagaugaaaugaucgcccaguauacgagcgcacugcuugcuggcaccauuacuucagguuggacauuuggggccggcgcggccuugcagaucccuuucgcuaugcaaauggcauaccgguuuaauggaauaggcgugacccagaacgugcucuaugagaaucagaaacugauugccaaccaguucaacagugcuaucgggaagauucaagacucccuaucuagcacagccuccgcacugggaaaacuccaggacgucguuaaucagaacgcgcaggcccugaauacucuugugaagcaauugucaagcaacuuuggcgcuaucaguucuguacugaaugauauauuaucccgacucgacaagguggaagccgagguccagaucgauagacugauuaccgguaggcuucagagccugcaaacguacgugacacagcaguugauccgcgcagcugagauucgggccucggcaaaccucgccgcuaccaaaaugucagaaugcguucuggggcagucuaagagaguggacuucuguggaaaaggcuaccaccuaaugaguuuuccccaauccgcgccacauggugucguguuccugcacguuacuuaugugccggcccaggagaagaauuuuaccacagcacccgcuaucugccacgauggcaaagcccauuuccccagggaaggggucuuuguaagcaacggaacucacugguucgugacccagcgcaauuuuuacgagccacagauaauuacaacggacaacaccuucguuucuggcaauugugauguggucaucgggaucgugaacaauacuguauaugacccccuccaaccugagcuggauagcuucaaggaagaacuugacaaauacuuuaagaaccauacauccccagauguggacuugggagauauuucaggcaucaaugccagugucguuaacauucagaaggaaauagaccgacugaaugagguggcuaaaaacuuaaacgaaagccucaucgaccugcaggagcuugguaaguaugagcaguacauuaaauggcccugguauaucuggcugggguucauugcaggacuaaucgccauagugauggucaccaucaugcucugcuguaugacuucuugcuguuccugccugaagggcuguugcucaugugguaguugcugcaaauuugaugaagacgauagcgagccuguguugaagggcguuaagcugcacuacacauga

SEQ ID NO: 12003 - RNA, 3822 nt, Artificial Sequence
  SARS-CoV-2/China/WF0004/2020__EPI_ISL_413694 spike protein CDS human (1-1273)
auguucguguuucugguccuccuuccccugguuagcucccagugcgugaacuugaccacaagaacucaauuaccuccagccuacacgaauagcuucaccaggggcguauauuacccggacaagguguuucggucaaguguccugcacagcacacaggaucuauuccuccccuuuuucuccaacgugacuugguuucaugcuauccacguuucugggaccaauggaacaaaacgcuucgacaacccugugcugccauuuaaugauggugucuauuucgcaucgaccgagaagucaaacauuauacgaggcuggaucuuugggacuacacuugacagcaaaacccagagucuguugauugugaauaacgccacgaauguaguuaucaaggugugugaguuccaguuuugcaacgaucccuuccucggagucuacuaucauaaaaauaacaaguccuggacugagucugaguuccguguguacagcuccgcgaauaacuguaccuuugaguaugugucacaaccuuuccugauggaccuggaaggcaagcaggguaauuuuaaaaaccucagagaguucgucuuuaagaacauugauggguacuucaaaaucuacaguaagcacacaccaauaaauuuaguuagggaccugccccagggauuuagcgcucuugagccuuugguggaucugccaaucggcauuaacaucacucgguuccagacccuacucgcccugcaucgcucuuaucuuacaccgggcgacuccucaagcggguggaccgcaggagccgcugcauacuauguagguuaccugcaacccagaacguuuuugcucaaauauaaugaaaacggcacuauuacagaugccguggacugcgcucuggauccuuuaagugagaccaaguguacucugaagucuuucacagucgaaaaagggaucuaccagaccuccaauuuuagggugcagccaacggagagcauaguucgguuccccaacauuaccaaucucugcccuuuuggagagguguucaacgccacacgcuucgcgucggucuaugcauggaaucgaaagagaaucucuaacuguguggccgacuacuccguacuuuacaauucagcuaguuuuagcacuuucaaaugcuauggcguuuccccaaccaagcugaacgacuuguguuuuacaaauguguacgccgauucuuucgucauuaggggugacgaagugcggcagaucgcacccgggcaaacuggaaaaaucgcugauuauaacuacaagcuaccggacgauuuuaccggcugcgucauugccuggaauagcaacaaccuggacucaaaagugggcgggaauuauaacuaccucuaucgucuguuccgcaagaguaaucuuaagccuuuugagagagauauauccacagaaaucuaccaggcgggaagcacccccuguaacgguguugagggcuucaauugcuacuuuccacugcagucuuauggguuccaaccuacuaacggagugggcuaccagcccuauaggguagucguguugucauuugaacuccugcacgccccagcaacgguuugcggucccaaaaagaguacaaauuuagugaaaaacaagugugucaauuucaacuuuaaugggcugaccggcacuggagugcuaaccgagagcaacaaaaaguuccucccuuuccagcaguuuggccgggacauugcugauacaaccgacgccguacgagauccacaaacucuggagauccuugacauaacaccgugcuccuucgggggagugucuguuauuacgcccgguaccaauacuucgaaccaggucgcuguguuguaccaggacgugaauuguacagaagucccuguugccauccacgcagaucagcugaccccaacauggcgcguguauagcacuggcuccaacguguuucaaaccagagccgggugccucaucggagcugagcauguaaacaauucauacgaaugugacauucccaucggcgcggguauuugcgcaaguuaucagacgcagaccaacucuccuaggcgggcccgcagcgucgcuucccagucaauaaucgccuacacaaugagccugggggcagaaaauucuguggccuacuccaacaauaguauugcuaucccaacuaacuucaccaucagcguuacaacugaaauucuucccgugucuaugaccaagacguccgucgauuguacaauguauauaugcggcgacucaaccgaguguaguaaucuguugcuccaauacggaucuuuuugcacucagcugaacagagccuuaacaggcaucgcaguggagcaggauaaaaauacccaggaaguuuucgcgcaagugaagcagauuuauaaaacuccgccuaucaaggacuuugggggauucaacuuuucgcagauucugccagaucccuccaaaccuucuaagaggagcuucaucgaggaccuacucuuuaauaagguaacccuggcugaugccgguuucauaaaacaauacggcgacugucuuggggauaucgcagcccgugacuugauuugcgcucagaaguucaacggacugacaguccugcccccacucuuaacggaugaaaugaucgcccaguauaccucagcacugcuugcuggcacuauuacaagugguuggaccuuuggggccggcgcggccuugcagaucccuuucgcuaugcaaauggcauaccgguuuaauggaauaggcgugacacagaacgugcucuaugagaaucagaaacugauugccaaccaguucaacuccgcuaucgggaagauucaagacucucuaagcuccacugccucagcacugggaaaacuccaggacgucguuaaucagaacgcgcaggcccugaauacccuugugaagcaauugagcaguaacuuuggcgcuaucucuuccguacugaaugauauauuaagccgacucgacaagguggaagccgagguccagaucgauagacugauuacggguaggcuucagucgcugcaaacauacgugacccagcaguugauccgcgcagcugagauucgggccucagcaaaccucgccgcuacuaaaaugucugaaugcguucuggggcagaguaagagauucgacuuuuguggaaaaggcuaccaccuaauguccuucccccaaagcgcgccacaugguguggucuuucugcacgugaccuauguuccggcccaggagaagaauuucacaacugcuccugcaaucugccacgauggcaaagcccauuuucccagggaagggguguucgucucuaacggaacccacugguuuguaacacagcgcaauuucuacgagccacagauaauuacgaccgacaacacuuucgugagcggcaauugugauguugugaucgggaucgucaacaauacaguguaugacccccuccaaccugagcuggauuccuuuaaggaagaacuugacaaauacuucaagaaccauaccucaccagauguagacuugggagauauuaguggcaucaaugccagcguggucaacauucagaaggaaauagaccgacugaaugagguugcuaaaaacuuaaacgaaucucucaucgaccugcaggagcuugguaaguaugagcaguacauuaaauggcccugguauaucuggcugggguuuauugcaggacuaaucgccauagugauggugacuaucaugcucugcuguaugacauccugcuguucaugccugaagggcuguugcaguugugguagcugcugcaaauucgaugaagacgauuccgagccugucuugaagggcgugaagcugcacuacaccuga

SEQ ID NO: 12004 - RNA, 3822 nt, Artificial Sequence
  SARS-CoV-2/China/WF0028/2020__EPI_ISL_413791 spike protein CDS human (1-1273)
auguucguguuucugguccuccuuccccugguuagcucccagugcgugaacuugaccacaagaacucaauuaccuccagccuacacuaauucuuucaccaggggcguauauuacccggacaagguguuucggucaaguguccugcacagcacacaggaucuauuccuccccuuuuucuccaacgugacuugguuucaugcuauccacguuucugggaccaauggaacaaaacgcuucgacaacccugugcugccauuuaaugauggugucuauuucgcaucgaccgagaagucaaacauuauacgaggcuggaucuuugggacuacacuugacagcaaaacccagagucuguugauugugaauaacgccacgaauguaguuaucaaggugugugaguuccaguuuugcaacgaucccuuccucggagucuacuaucauaaaaauaacaaguccuggauggagucugaguuccguguguacagcuccgcgaauaacuguacuuuugaauaugugucacaaccuuuccugauggaccuggaaggcaagcaggguaauuuuaaaaaccucagagaguucgucuuuaagaacauugauggguacuucaaaaucuacaguaagcacaccccaauaaauuuaguuagggaccugccccagggauuuagcgcucuugagccuuugguggaucugccaaucggcauuaacaucacacgguuccagacucuacucgcccugcaucgcucuuaucuuaccccgggcgacuccucaagcggguggacagcaggagccgcugcauacuauguagguuaccugcaacccagaaccuuuuugcucaaauauaaugaaaacggcacgauuacugaugccguggacugcgcucuggauccuuuaagugagacaaaguguacccugaagucuuucacugucgaaaaagggaucuaccagacauccaauuuuagggugcagccaaccgagagcauaguucgguuccccaacauuacgaaucucugcccuuuuggagagguguucaacgccacccgcuucgcgucggucuaugcauggaaucgaaagagaaucucuaacuguguggccgacuacuccguacuuuacaauucagcuaguuuuagcacauucaaaugcuauggcguuuccccaacuaagcugaacgacuuguguuuuaccaauguguacgccgauucuuucgucauuaggggugacgaagugcggcagaucgcacccgggcaaacaggaaaaaucgcugauuauaacuacaagcuaccggacgauuuuacuggcugcgucauugccuggaauagcaacaaccuggacucaaaagugggcgggaauuauaacuaccucuaucgucuguuccgcaagaguaaucuuaagccuuuugagagagauauauccaccgaaaucuaccaggcgggaagcacacccuguaacgguguugagggcuucaauugcuacuuuccacugcagucuuauggguuccaaccuaccaacggagugggcuaccagcccuauaggguagucguguugucauuugaacuccugcacgccccagcaacuguuugcggucccaaaaagaguacgaauuuagugaaaaacaagugugucaauuucaacuuuaaugggcugacaggcaccggagugcuaacugagagcaacaaaaaguuccucccuuuccagcaguuuggccgggacauugcugauaccacagacgccguacgagauccacaaacccuggagauccuugacauaacuccgugcuccuucgggggagugucuguuauuacacccgguacgaauaccucgaaccaggucgcuguguuguaccaggacgugaauuguacugaagucccuguugccauccacgcagaucagcugacaccaaccuggcgcguguauagcacaggcuccaacguguuucaaacuagagccgggugccucaucggagcugagcauguaaacaauucauacgaaugugacauucccaucggcgcggguauuugcgcaaguuaucagacccagacgaacucuccuaggcgggcccgcagcgucgcuucccagucaauaaucgccuacaccaugagccugggggcagaaaauucuguggccuacuccaacaauaguauugcuaucccaacaaacuucacuaucagcguuaccacagaaauucuucccgugucuaugacuaagaccuccgucgauuguacgauguauauaugcggcgacucaacagaguguaguaaucuguugcuccaauacggcagcuuuugcacccagcugaacagagccuuaacuggaaucgcaguggagcaggauaaaaauacacaggaaguuuucgcgcaagugaagcagauuuauaaaaccccgccuaucaaggacuuugggggauucaacuuuucgcagauucugccagaucccuccaaaccuucuaagaggagcuucaucgaggaccuacucuuuaauaagguaacucuggcugaugccgguuucauaaaacaauacggcgacugucuuggggauaucgcagcccgugacuugauuugcgcucagaaguucaacggacugaccguccugcccccacucuuaacagaugaaaugaucgcccaguauacgucagcacugcuugcuggcaccauuacgagugguuggacauuuggggccggcgcggccuugcagaucccuuucgcuaugcaaauggcauaccgguuuaauggaauaggcgugacccagaacgugcucuaugagaaucagaaacugauugccaaccaguucaacuccgcuaucgggaagauucaagacucucuaagcuccacagccucagcacugggaaaacuccaggacgucguuaaucagaacgcgcaggcccugaauacucuugugaagcaauugagcaguaacuuuggcgcuaucucuuccguacugaaugauauauuaagccgacucgacaagguggaagccgagguccagaucgauagacugauuaccgguaggcuucagucgcugcaaacguacgugacacagcaguugauccgcgcagcugagauucgggccucagcaaaccucgccgcuaccaaaaugucugaaugcguucuggggcagaguaagagaguggacuucuguggaaaaggcuaccaccuaauguccuuuccccaaagcgcgccacauggugucguguuccugcacguuacuuaugugccggcccaggagaagaauuuuaccacagcuccugcaaucugccacgauggcaaagcccauuuccccagggaaggggucuuuguaucuaacggaacucacugguucgugacccagcgcaauuuuuacgagccacagauaauuacaacggacaacaccuucguuagcggcaauugugauguggucaucgggaucgugaacaauacuguauaugacccccuccaaccugagcuggaauccuucaaggaggaacuugauaaauacuuuaagaaccauacaucaccagacguggauuugggagacauuaguggcaucaaugccagcgucguuaacauucagaaggagauagaucgacugaaugaaguggcuaaaaacuuaaacgagucucucaucgaccugcaggagcuugguaaguaugaacaguacauuaaauggcccugguauaucuggcugggguucauugcaggacuaaucgccauagugauggucaccaucaugcucugcuguaugacuuccugcuguucaugccugaagggcuguugcaguugugguagcugcugcaaauuugacgaggaugacuccgaaccuguguugaagggcguuaagcugcacuacacauga

SEQ ID NO: 12005 - RNA, 3822 nt, Artificial Sequence
  SARS-CoV-2/2019-nCoV/USA-CruiseA-18/2020__MT159716.1 spike protein CDS human (1-1273)
auguucguguuucugguccuccuuccccugguuagcucccagugcgugaacuugaccacaagaacucaauuaccuccagccuacacuaauucuuucaccaggggcguauauuacccggacaagguguuucggucaaguguccugcacagcacacaggaucuauuccuccccuuuuucuccaacgugacuugguuucaugcuauccacguuucugggaccaauggaacaaaacgcuucgacaacccugugcugccauuuaaugauggugucuauuucgcaucgaccgagaagucaaacauuauacgaggcuggaucuuugggacuacacuugacagcaaaacccagagucuguugauugugaauaacgccacgaauguaguuaucaaggugugugaguuccaguuuugcaacgaucccuuccucggagucuacuaucauaaaaauaacaaguccuggauggagucugaacugcguguguacagcuccgcgaauaacuguacuuucgaguaugugucacaaccuuuucugauggaccucgaaggcaagcaggguaauuucaaaaacuuaagagaguuugucuucaagaacauugauggguacuuuaaaaucuacaguaagcacaccccaauaaaucugguuagggaccuuccccagggauucagcgcuuuggagccucugguggaucuaccaaucggcauuaacaucacacgguuucagacucuccuggcccuucaucgcucuuaucugaccccgggcgacuccucaagcggguggacagcaggagccgcugcauacuauguagguuacuugcaacccagaaccuuccuccugaaauauaaugaaaacggcacgauuacugaugccguggacugcgcuuuagauccucugagugagacaaaguguacccucaagucuuuuacugucgaaaaagggaucuaccagacauccaauuucagggugcagccaaccgagagcauaguucgguuucccaacauuacgaaucuuugcccuuucggagagguguuuaacgccacccgcuucgcgucggucuaugcauggaaucgaaagagaaucucuaacuguguggccgacuacuccguacuguacaauucagcuaguuucagcacauuuaaaugcuauggcguuuccccaacuaaguugaacgaccuauguuucaccaauguguacgccgauucuuuugucauuaggggugacgaagugcggcagaucgcacccgggcaaacaggaaaaaucgcugauuauaacuacaagcugccggacgauuucacuggcugcgucauugccuggaauagcaacaaccucgacucaaaagugggcgggaauuauaacuaccuguaucgucuuuuucgcaagaguaaucugaagccuuucgagagagauauauccaccgaaaucuaccaggcgggaagcacacccuguaacgguguugagggcuuuaauugcuacuucccauugcagucuuauggguuucaaccuaccaacggagugggcuaccagcccuauaggguagucgugcucucauucgaacuguuacacgccccagcaacuguuugcggucccaaaaagaguacgaaucuggugaaaaacaagugugucaauuuuaacuucaaugggcuaacaggcaccggagugcucacugagagcaacaaaaaguuucugccuuuccagcaguucggccgggacauugcugauaccacagacgccguacgagauccacaaacccuugagaucuuggacauaacuccgugcuccuuugggggagugucuguuauuacacccgguacgaauaccucgaaccaggucgcugugcuguaccaggacgugaauuguacugaagucccuguugccauccacgcagaucagcucacaccaaccuggcgcguguauagcacaggcuccaacguguuccaaacuagagccgggugccugaucggagcugagcauguaaacaauucauacgaaugugacauucccaucggcgcggguauuugcgcaaguuaucagacccagacgaacucuccuaggcgggcccgcagcgucgcuucccagucaauaaucgccuacaccaugagccuuggggcagaaaauucuguggccuacuccaacaauaguauugcuaucccaacaaacuuuacuaucagcguuaccacagaaauucugcccgugucuaugacuaagaccuccgucgauuguacgauguauauaugcggcgacucaacagaguguaguaauuugcuccugcaauacggcagcuucugcacccaguuaaacagagcccugacuggaaucgcaguggagcaggauaaaaauacacaggaaguuuuugcgcaagugaagcagauuuauaaaaccccgccuaucaaggacuucgggggauuuaacuucucgcagauucuaccagaucccuccaaaccuucuaagaggagcuuuaucgaggaccuccuguucaauaagguaacucuugcugaugccgguuuuauaaaacaauacggcgacuguuugggggauaucgcagcccgugaccugauuugcgcucagaaguucaacggacucaccguccugcccccauuacugacagaugaaaugaucgcccaguauacgucagcacuuuuggcuggcaccauuacgagugguuggacauucggggccggcgcggcccuccagaucccuuuugcuaugcaaauggcauaccgguucaauggaauaggcgugacccagaacgugcuguaugagaaucagaaacuaauugccaaccaguuuaacuccgcuaucgggaagauucaagacucucugagcuccacagccucagcacucggaaaacugcaggacgucguuaaucagaacgcgcaggcccuuaauacuuuggugaagcaacugagcaguaacuucggcgcuaucucuuccguauuaaaugauauacucagccgacuggacaagguggaagccgagguccagaucgauagacuuauuaccgguaggcugcagucguugcaaacguacgugacacagcagcucauccgcgcagcugagauucgggccucagcaaaccuggccgcuaccaaaaugucugaaugcguucuagggcagaguaagagaguggacuuuuguggaaaaggcuaccaccugauguccuucccccaaagcgcgccacauggugucguguuucuccacguuacuuaugugccggcccaggagaagaauuucaccacagcuccugcaaucugccacgauggcaaagcccauuuucccagggaaggggucuucguaucuaacggaacucacugguuugugacccagcgcaauuucuacgagccacagauaauuacaacggacaacaccuuuguuagcggcaauugugauguggucaucgggaucgugaacaauacuguauaugacccccugcaaccugagcuugauuccuucaaggaagaguuggacaaauacuucaagaaccauacaucaccagauguggaccugggagauauuaguggcaucaaugccagcgucguuaacauucagaaggaaauagaccgauuaaaugagguggcuaaaaaccucaacgaaucucugaucgaccuucaggagcuggguaaguaugagcaguacauuaaauggcccugguauaucuggcuaggguuuauugcaggacucaucgccauagugauggucaccaucaugcugugcuguaugacuuccugcuguucaugcuugaagggcuguugcaguugugguagcugcugcaaauucgaugaagacgauuccgagccugugcugaagggcguuaaguuacacuacacauga

SEQ ID NO: 12006 - RNA, 3822 nt, Artificial Sequence
  SARS-CoV-2/SARS-CoV-2/Yunnan-01/human/2020/CHN__MT049951.1 spike protein CDS human (1-1273)
auguucguguuucugguccuccuuccccugguuagcucccagugcgugaacuugaccacaagaacucaauuaccuccagccaauacgaacucuuucaccaggggcguauacuauccggacaagguguuucggucaaguguccugcacagcacacaggaucuauuccuccccuuuuucuccaaugugacuugguuucaugcuauccacguuucugggaccaacggaacaaaacgcuucgacaauccugugcugccauuuaacgauggugucuacuucgcaucgaccgagaagucaaauauuauacgaggcuggaucuuugggacuacacuugacagcaaaacccagagucuguugauugugaacaaugccacgaacguaguuaucaaggugugugaguuccaguuuugcaaugaucccuuccucggagucuauuaccauaaaaacaauaaguccuggauggagucugaguuccguguguauagcuccgcgaacaauuguacuuuugaauacgugucacaaccuuuccugauggaccuggaaggcaagcaggguaacuuuaaaaaccucagagaguucgucuuuaagaauauugauggguauuucaaaaucuacaguaagcacaccccaauaaacuuaguuagggaccugccccagggauuuagcgcucuugagccuuugguggaucugccaaucggcauuaauaucacacgguuccagacucuacucgcccugcaucgcucuuaccuuaccccgggcgacuccucaagcggguggacagcaggagccgcugcauauuacguagguuaucugcaacccagaaccuuuuugcucaaauacaacgaaaauggcacgauuacugaugccguggacugcgcucuggauccuuuaagugagacaaaguguacccugaagucuuucacugucgaaaaagggaucuaucagacauccaacuuuagggugcagccaaccgagagcauaguucgguuccccaauauuacgaaccucugcccuuuuggagagguguucaaugccacccgcuucgcgucggucuacgcauggaaccgaaagagaaucucuaauuguguggccgacuauuccguacuuuacaacucagcuaguuuuagcacauucaaaugcuacggcguuuccccaacuaagcugaaugacuuguguuuuaccaacguguaugccgauucuuucgucauuaggggugacgaagugcggcagaucgcacccgggcaaacaggaaaaaucgcugauuacaauuauaagcuaccggacgauuuuacuggcugcgucauugccuggaacagcaacaaucuggacucaaaagugggcgggaacuacaauuaucucuaccgucuguuccgcaagaguaaccuuaagccuuuugagagagauauauccaccgaaaucuaucaggcgggaagcacacccuguaaugguguugagggcuucaacugcuacuuuccacugcagucuuacggguuccaaccuaccaauggagugggcuaucagcccuacaggguagucguguugucauuugaacuccugcacgccccagcaacuguuugcggucccaaaaagaguacgaacuuagugaaaaauaagugugucaacuucaauuuuaacgggcugacaggcaccggagugcuaacugagagcaauaaaaaguuccucccuuuccagcaguuuggccgggacauugcugauaccacagacgccguacgagauccacaaacccuggagauccuugacauaacuccgugcuccuucgggggagugucuguuauuacacccgguacgaacaccucgaaucaggucgcuguguuguaucaggacgugaacuguacugaagucccuguugccauccacgcagaucagcugacaccaaccuggcgcguguacagcacaggcuccaacguguuucaaacuagagccgggugccucaucggagcugagcauguaaauaacucauaugaaugugacauucccaucggcgcggguauuugcgcaaguuaccagacccagacuaauucuccuaggcgggcccgcagcgucgcuucccagucaauaaucgccuauaccaugagccugggggcagagaacucuguggccuacuccaauaacaguauugcuaucccaacaaauuucacuaucagcguuaccacagaaauucuucccgugucuaugacuaagaccuccgucgauuguacgauguacauaugcggcgacucaacagaguguaguaaccuguugcuccaauauggcagcuuuugcacccagcugaauagagccuuaacuggaaucgcaguggagcaggauaaaaacacacaggaaguuuucgcgcaagugaagcagauuuacaaaaccccgccuaucaaggacuuugggggauucaauuuuucgcagauucugccagaucccuccaaaccuucuaagaggagcuucaucgaggaccuacucuuuaacaagguaacucuggcugaugccgguuucauaaaacaauauggcgacugucuuggggauaucgcagcccgugacuugauuugcgcucagaaguucaauggacugaccguccugcccccacucuuaacagaugaaaugaucgcccaguacacgucagcacugcuugcuggcaccauuacgagugguuggacauuuggggccggcgcggccuugcagaucccuuucgcuaugcaaauggcauaucgguuuaacggaauaggcgugacccagaaugugcucuacgagaaccagaaacugauugccaaccaguucaauuccgcuaucgggaagauucaagacucucuaagcuccacagccucagcacugggaaaacuccaggacgucguuaaccagaaugcgcaggcccugaacacucuugugaagcaauugagcaguaauuuuggcgcuaucucuuccguacugaacgauauauuaagccgacucgacaagguggaagccgagguccagaucgauagacugauuaccgguaggcuucagucgcugcaaacguaugugacacagcaguugauccgcgcagcugagauucgggccucagcaaaucucgccgcuaccaaaaugucugaaugcguucuggggcagaguaagagaguggacuucuguggaaaaggcuaccaccuaauguccuuuccccaaagcgcgccacauggugucguguuccugcacguuacuuacgugccggcccaggagaagaacuuuaccacagcuccugcaaucugccacgauggcaaagcccauuuccccagggaaggggucuuuguaucuaauggaacucacugguucgugacccagcgcaacuuuuaugagccacagauaauuacaacggacaauaccuucguuagcggcaacugugauguggucaucgggaucgugaauaacacuguauacgacccccuccaaccugagcuggauuccuucaaggaagaacuugacaaauauuuuaagaaucauacaucaccagauguggacuugggagauauuaguggcaucaacgccagcgucguuaauauucagaaggaaauagaccgacugaacgagguggcuaaaaacuuaaaugaaucucucaucgaccugcaggagcuugguaaguacgagcaguauauuaaauggcccugguacaucuggcugggguucauugcaggacuaaucgccauagugauggucaccaucaugcucugcuguaugacuuccugcuguucaugccugaagggcuguugcaguugugguagcugcugcaaauuugaugaagacgauuccgagccuguguugaagggcguuaagcugcacuauacauga

SEQ ID NO: 12007 - RNA, 3822 nt, Artificial Sequence
  SARS-CoV-2/USA/WA-UW292/2020__EPI_ISL_418077 spike protein CDS human (1-1273)
auguucguguuucugguccuccuuccccugguuagcucccagugcgugaacuugaccacaagaacucaauuaccuccagccuacaccaauucuuucacgaggggcguauauuacccggacaagguguuucggucaaguguccugcacagcacacaggaucuauuccuccccuuuuucuccaacgugacuugguuucaugcuauccacguuucugggaccaauggaacaaaacgcuucgacaacccugugcugccauuuaaugauggugucuauuucgcaucgaccgagaagucaaacauuauacgaggcuggaucuuugggacuacacuugacagcaaaacccagagucuguugauugugaauaacgccacgaauguaguuaucaaggugugugaguuccaguuuugcaacgaucccuuccucggagucuacuaucauaaaaauaacaaguccuggauggagucugaguuccguguguacagcuccgcgaauaacuguacuuuugaguaugugucacaaccuuuccugauggaccuggaaggcaagcaggguaauuuuaaaaaccucagagaguucgucuuuaagaacauugauggguacuucaaaaucuacaguaagcacaccccaauaaauuuaguuagggaccugccccagggauuuagcgcucuugagccuuugguggaucugccaaucggcauuaacaucacacgguuccagacucuacucgcccugcaucgcucuuaucuuaccccgggcgacuccucaagcggguggacagcaggagccgcugcauacuauguagguuaccugcaacccagaaccuuuuugcucaaauauaaugaaaacggcacgauuacugaugccguggacugcgcucuggauccuuuaagugagacaaaguguacccugaagucuuucacugucgaaaaagggaucuaccagacauccaauuuuagggugcagccaaccgagagcauaguucgguuccccaacauuacgaaucucugcccuuuuggagagguguucaacgccacccgcuucgcgucggucuaugcauggaaucgaaagagaaucucuaacuguguggccgacuacuccguacuuuacaauucagcuaguuuuagcacauucaaaugcuauggcguuuccccaacuaagcugaacgacuuguguuuuaccaauguguacgccgauucuuucgucauuaggggugacgaagugcggcagaucgcacccgggcaaacaggaaaaaucgcugauuauaacuacaagcuaccggacgauuuuacuggcugcgucauugccuggaauagcaacaaccuggacucaaaagugggcgggaauuauaacuaccucuaucgucuguuccgcaagaguaaucuuaagccuuuugagagagauauauccaccgaaaucuaccaggcgagcucuacacccuguaacggaguugaggguuucaauugcuacuuuccacugcagucauauggcuuccaaccuaccaacggggugggauaccagcccuauaggguagucguguugaguuuugaacuccugcacgccccagcaacuguuugcggccccaaaaagagcacgaauuuagugaaaaacaagugugucaauuucaacuuuaauggucugacagggaccggcgugcuaacugaguccaacaaaaaguuccucccuuuccagcaguuuggacgggacauugcugauaccacagacgccguacgagauccacaaacccuggagauccuugacauaacuccgugcucuuucggcggggugucgguuauuacacccggaacgaauaccagcaaccaggucgcuguguuguaccaggacgugaauuguacugaagucccuguugccauccacgcagaucagcugacaccaaccuggcgcguguauuccacagguucaaacguguuucaaacuagagccggcugccucaucggggcugagcauguaaacaauaguuacgaaugugacauucccaucggagcgggcauuugcgcaucuuaucagacccagacgaacagcccuaggcgggcccgcuccgucgcuucacagagcauaaucgccuacaccaugucucugggugcagaaaauuccguggccuacaguaacaauagcauugcuaucccaacaaacuucacuaucucuguuaccacagaaauucuucccguguccaugacuaagaccucagucgauuguacgauguauauaugcggggacaguacagaguguagcaaucuguugcuccaauacggcucguuuugcacccagcugaacagagccuuaacuggaaucgcaguggagcaggauaaaaauacacaggaaguuuucgcgcaagugaagcagauuuauaaaaccccgccuaucaaggacuuuggcggguucaacuuuucccagauucugccagaucccucuaaaccuagcaagaggucauucaucgaggaccuacucuuuaauaagguaacucuggcugaugccggauucauaaaacaauacggugacugucuuggcgauaucgcagcccgugacuugauuugcgcucagaaguucaacgggcugaccguccucccuccacuguuaacagaugaaaugaucgcccaguauacgagugcacugcuugcuggaaccauuacuuccggcuggacauuuggugccggggcggccuugcagaucccuuucgcuaugcaaauggcauaccgguuuaauggcauaggagugacccagaacgugcucuaugagaaucagaaacugauugccaaccaguucaacucugcuaucggcaagauucaagacagccuauccucaacagccagcgcacuggggaaacuccaggacgucguuaaucagaacgcgcaggcccugaauacucuugugaagcaauugaguucuaacuuuggagcuaucuccagcguacugaaugauauauuaucgcgacucgacaagguggaagccgagguccagaucgauagacugauuaccggcaggcuucagucacugcaaacguacgugacacagcaguugauccgcgcagcugagauucgggccucugcaaaccucgccgcuaccaaaaugagugaaugcguucugggucaguccaagagaguggacuucugugggaaaggauaccaccuaaugagcuuuccccaaucugcgccacauggcgucguguuccugcacguuacuuaugugccggcccaggagaagaauuuuaccacagcacccgcuaucugccacgaugguaaagcccauuuccccagggaaggcgucuuuguaagcaacgggacucacugguucgugacccagcgcaauuuuuacgagccacagauaauuacaacggacaacaccuucguuuccggaaauugugauguggucaucggcaucgugaacaauacuguauaugacccccuccaaccugagcuggauucauucaaggaagaacuugacaaauacuuuaagaaccauacaaguccagauguggacuugggggauauuagcggaaucaaugccucugucguuaacauucagaaggaaauagaccgacugaaugagguggcuaaaaacuuaaacgaaucccucaucgaccugcaggagcuuggcaaguaugagcaguacauuaaauggcccugguauaucuggcuggguuucauugcagggcuaaucgccauagugauggucaccaucaugcucugcuguaugacuucaugcuguaguugccugaagggauguugcagcuguggcuccugcugcaaauuugaugaagacgauucugagccuguguugaaggguguuaagcugcacuacacauga

SEQ ID NO: 12008 - RNA, 3822 nt, Artificial Sequence
  SARS-CoV-2/Iceland/192/2020__EPI_ISL_417819 spike protein CDS human (1-1273)
auguucguguuuuucguccugcucccccuuguuagcucccagugcgugaaccugaccacaagaacucaauugccuccagccuacacuaauucuuuuaccaggggcguauauuacccggacaagguguuccggucaagugucuuacacagcacacaggaucuguuucuacccuucuuuuccaacgugacuugguuccaugcuauccacguuucugggaccaauggaacaaaacgcuuugacaacccugugcucccauucaaugauggugucuauuuugcaucgaccgagaagucaaacauuauacgaggcuggaucuucgggacuacacuggacagcaaaacccagagucuucugauugugaauaacgccacgaauguaguuaucaaggugugugaauuucaguucugcaacgaucccuucuugggagucuacuaucauaaaaauaacaaguccuggauggagucugaauuucguguguacagcuccgcgaauaacuguacuuucgaguaugugucacaaccuuuucucauggaccuggaaggcaagcaggguaauuucaaaaaccugagagaguuugucuucaagaacauugauggguacuuuaaaaucuacaguaagcacaccccaauaaaucucguuagggacuuaccccagggauucagcgcucuggagccucuuguggauuugccaaucggcauuaacaucacacgguuucagacucugcuagcccuccaucgcucuuaucugaccccgggcgacuccucaagcggguggacagcaggagccgcugcauacuauguagguuaccuucaacccagaaccuuccuguugaaauauaaugaaaacggcacgauuacugaugccguggacugcgcucucgauccucugagugagacaaaguguaccuuaaagucuuuuacugucgaaaaagggaucuaccagacauccaauuucagggugcagccaaccgagagcauaguucgguuucccaacauuacgaaucugugcccuuucggagagguguucaacgccacccgcuuugcgucggucuaugcauggaaucgaaagagaaucucuaacuguguggccgacuacuccguacucuacaauucagcuaguuucagcacauuuaaaugcuauggcguuuccccaacuaaacuuaacgaccuguguuucaccaauguguacgccgauucuuuugucauuaggggugacgaagugcggcagaucgcacccgggcaaacaggaaagaucgcugauuauaacuacaaguugccggacgauuucacuggcugcgucauugccuggaauagcaacaaccuagacucaaaagugggcgggaauuauaacuaccuguaucgucucuuucgcaagaguaaucugaagccuuucgagagagauauauccaccgaaaucuaccaggcgggaagcacacccuguaacgguguugagggcuuuaauugcuacuucccacuucagucuuauggguuucaaccuaccaacggagugggcuaccagcccuauaggguagucgugcugucauucgaauugcuccacgccccagcaacuguuugcggucccaaaaagaguacgaaucuggugaaaaacaagugugucaauuuuaacuucaauggguuaacaggcaccggagugcugacugagagcaacaaaaaguuccuaccuuuucagcaguucggccgggacauugcugauaccacagacgccguacgagauccacaaacccucgagauccuggacauaacuccgugcuccuuugggggagugucuguuauuacacccgguacgaauaccucgaaccaggucgcugugcuuuaccagggcgugaauuguacugaagucccuguugccauccacgcagaccaguugacaccaaccuggcgcguguauagcacaggguccaacguguuccaaacuagagccggaugccugaucggcgcugagcauguaaacaauucauacgaaugugauauucccaucggugcggggauuugcgcaaguuaucagacccagacgaacucuccuaggcgggcccgcagcgucgcuucccagucaauaaucgccuacaccaugagccucggcgcagaaaauucuguggccuacuccaacaauaguauugcuaucccaacaaacuuuacuaucagcguuaccacagaaauucugcccgugucuaugacuaagaccuccgucgacuguacgauguauauaugcggagauucaacagaguguaguaaucuucuguugcaauacggcagcuucugcacccagcucaacagagcccugacugggaucgcaguggagcaggacaaaaauacacaggaaguuuuugcgcaagugaagcagauuuauaaaaccccgccuaucaaggauuucggagguuuuaacuucucgcagauuuuaccagaccccuccaaaccuucuaagaggagcuuuaucgaggaucugcuauucaauaagguaacucucgcugacgccggcuucauaaaacaauacggggauugucugggagacaucgcagcccgugaucuuauuugcgcucagaaguuuaacggcuugaccguccugcccccacuccugacagacgaaaugaucgcccaguauacgucagcauuacuggcugguaccauuacgaguggguggacauucggcgccggagcggcccuucagaucccuuuugcuaugcaaauggcauaccgguucaauggcauaggggugacccagaacguguuguaugagaaucagaaacucauugccaaccaguuuaacuccgcuaucggaaagauucaagauucucugagcuccacagccucagcacuaggcaaacugcaggacgucguuaaucagaacgcgcaggcccucaauacucuggugaagcaacuuagcaguaacuucggugcuaucucuuccguauugaaugacauacugagccgauuagauaagguggaagccgagguccagaucgacagacucauuaccgggaggcugcagucgcuucaaacguacgugacacagcagcugauccgcgcagcugagauucgggccucagcaaacuuggccgcuaccaaaaugucugaaugcguucucggacagaguaagagaguggauuuuuguggcaaagguuaccaccugauguccuucccccaaagcgcgccacauggcgucguguuucuacacguuacuuaugugccggcccaggagaagaauuucaccacagcuccugcaaucugccacgacgggaaagcccauuuucccagggaaggagucuucguaucuaacggcacucacugguuugugacccagcgcaauuucuacgagccacagauaauuacaacggauaacaccuucguuagcgggaauugugacguggucaucggaaucgugaacaauacuguauaugauccccugcaaccugagcucgacuccuuuaaggaggagcuggauaaauacuucaagaaccauacaucaccagacguggaucuuggcgacauuagugguaucaaugccagcgucguuaacauucagaaggaaauagaucgauugaaugagguggcuaaaaaccugaacgaaucuuuaaucgaccuccaggagcuggggaaguaugagcaguacauuaaauggcccugguauaucuggcuuggauuuauugcaggccugaucgccauagugauggucaccaucaugcuaugcuguaugacuuccugcuguucaugccucaaggguuguugcaguuguggcagcugcugcaaauucgacgaagaugacuccgagccugugcugaaggggguuaaguugcacuacacauga

SEQ ID NO: 12009 - RNA, 3822 nt, Artificial Sequence
  SARS-CoV-2/Belgium/ULG-6939/2020__EPI_ISL_417020 spike protein CDS human (1-1273)
auguucguguuucugguccuccuuccccugguuagcucccagugcgugaacuugaccacaagaacucaauuaccuccagccuacacuaauucuuucaccaggggcguauauuacccggacaagguguuucggucaaguguccugcacagcacacaggaucuauuccuccccuuuuucuccaacgugacuugguuucaugcuauccacguuucugggaccaauggaacaaaacgcuucgacaacccugugcugccauuuaaugauggugucuauuucgcaucgaccgagaagucaaacauuauacgaggcuggaucuuugggacuacacuugacagcaaaacccagagucuguugauugugaauaacgccacgaauguaguuaucaaggugugugaguuccaguuuugcaacgaucccuuccucggagucuacuaucauaaaaauaacaaguccuggauggagucugaguuccguguguacagcuccgcgaauaacuguacuuuugaguaugugucacaaccuuuccugauggaccuggaaggcaagcaggguaauuuuaaaaaccucagagaguucgucuuuaagaacauugauggguacuucaaaaucuacaguaagcacaccccaauaaauuuaguuagggaccugccccagggauuuagcgcucuugagccuuugguggaucugccaaucggcauuaacaucacacgguuccagacucuacucgcccugcaucgcucuuaucuuaccccgggcgacuccucaagcggguggacagcaggagccgcugcauacuauguagguuaccugcaacccagaaccuuuuugcucaaauauaaugaaaacggcacgauuacugaugccguggacugcgcucuggauccuuuaagugagacaaaguguacccugaagucuuucacugucgaaaaagggaucuaccagacauccaauuuuagggugcagccaaccgagagcauaguucgguuccccaacauuacgaaucucugcccuuuuggagagguguucaacgccacccgcuucgcgucggucuaugcauggaaucgaaagagaaucucuaacuguguggccgacuacuccguacuuuacaauucagcuaguuuuagcacauucaaaugcuauggcguuuccccaacuaagcugaacgacuuguguuuuaccaauguguacgccgauucuuucgucauuaggggugacgaagugcggcagaucgcacccgggcaaacaggaaaaaucgcugauuauaacuacaagcuaccggacgauuuuacuggcugcgucauugccuggaauagcaacaaccuggacucaaaagugggcgggaauuauaacuaccucuaucgucuguuccgcaagaguaaucuuaagccuuuugagagagauauauccaccgaaaucuaccaggcgggaagcacacccuguaacgguguugagggcuucaauugcuacuuuccacugcagucuuauggguuccaaccuaccaacggagugggcuaccagcccuauaggguagucguguugucauuugaacuccugcacgccccagcaacuguuugcggucccaaaaagaguacgaauuuagugaaaaacaagugugucaauuucaacuuuaaugggcugacaggcaccggagugcuaacugagagcaacaaaaaguuccucccuuuccagcaguuuggccgggacauugcugauaccacagacgccguacgagauccacaaacccuggagauccuugacauaacuccgugcuccuucgggggagugucuguuauuacacccgguacgaauaccucgaaccaggucgcuguguuguaccagggcgugaauuguacugaagucccuguugccauccacgcagaccagcugacaccaaccuggcgcguguauagcacaggguccaacguguuucaaacuagagccggaugccucaucggcgcugagcauguaaacaauucauacgaaugugauauucccaucggugcggggauuugcgcaaguuaucagacccagacgaacucuccuaggcgggcccgcagcgucgcuucccagucaauaaucgccuacaccaugagccugggcgcagaaaauucugugguuuacuccaacaauaguauugccaucccaacaaacuucacuaucagcgugaccacagaaauucuucccgucucuaugacuaagaccuccguggacuguacgauguauauaugcggagauucaacagaguguaguaaucuguugcuccaauacggcagcuuuugcacccagcugaacagagcuuuaacugggaucgccguugagcaggacaaaaauacacaggaaguguucgcacaaguaaagcagauuuauaaaaccccgccuaucaaggauuuuggagguuucaacuuuucgcagauucugccagaccccuccaaaccuucuaagaggagcuucaucgaggaucuacucuuuaauaaggucacucuggcggacgcuggcuucauaaaacaauacggggauugucuuggagacaucgccgcacgugauuugauuugcgcccagaaguucaacggccugaccgugcugcccccacucuuaacagacgaaaugaucgcucaguauacgucagcccugcuugcagguaccauuacgaguggguggacauuuggcgcuggagccgcguugcagaucccuuucgccaugcaaauggcuuaccgguuuaauggcauaggggugacccagaacguccucuaugagaaucagaaacugauugcaaaccaguucaacuccgccaucggaaagauucaagauucucuaagcuccacagcuucagcccugggcaaacuccaggacguugugaaucagaacgcacaggcgcugaauacucuuguaaagcaauugagcaguaacuuuggugccaucucuuccgugcugaaugacauauuaagccgacucgauaaggucgaagcugaggugcagaucgacagacugauuaccgggaggcuucagucgcugcaaacguacguuacacagcaguugauccgcgccgcagagauucgggcuucagccaaccucgcagccaccaaaaugucugaaugcgugcugggacagaguaagagagucgauuucuguggcaaagguuaccaccuaauguccuuuccccaaagcgcuccacauggcgugguuuuccugcacgugacuuaugucccggcgcaggagaagaauuuuaccacagccccugcaaucugccacgacgggaaagcucauuuccccagggaaggaguauuugugucuaacggcacucacugguucguuacccagcgcaauuuuuacgagccacagauaauuacaacggauaacaccuucgugagcgggaauugugacgucgugaucggaaucguaaacaauacuguguaugauccccuccaaccugagcuggacuccuucaaggaagaacuugauaaauacuuuaagaaccauacaucaccagacgucgauuugggcgacauuagugguaucaaugccagcguugugaacauucagaaggaaauagaucgacugaaugagguggccaaaaacuuaaacgaaucucucaucgaccugcaggagcuugggaaguaugagcaguacauuaaauggcccugguauaucuggcugggauucauugcuggccuaaucgcaauagucauggugaccaucaugcucugcuguaugacuuccugcuguucaugccugaaggguuguugcaguuguggcagcugcugcaaauuugacgaagaugacuccgagccuguuuugaaggggguaaagcugcacuacacauga

SEQ ID NO: 12010 - RNA, 3822 nt, Artificial Sequence
  SARS-CoV-2/France/HF2496/2020__EPI_ISL_418231 spike protein CDS human (1-1273)
auguucguguuucugguccuccuuccccugguuagcucccagugcgugaacuugaccacaagaacucaauuaccuccagccuacacuaauucuuucaccaggggcguauauuacccggacaagguguuucggucaaguguccugcacagcacacaggaucuauuccuccccuuuuucuccaacgugacuugguuucaugcuauccacguuucugggaccaauggaacaaaacgcuucgacaacccugugcugccauuuaaugauggugucuauuucgcaucgaccgagaagucaaacauuauacgaggcuggaucuuugggacuacacuugacagcaaaacccagagucuguugauugugaauaacgccacgaauguaguuaucaaggugugugaguuccaguuuugcaacgaucccuuccucggagucuacuaucauaaaaauaacaaguccuggauggagucugaguuccguguguacagcuccgcgaauaacuguacuuuugaguaugugucacaaccuuuccugauggaccuggaaggcaagcaggguaauuuuaaaaaccucagagaguucgucuuuaagaacauugauggguacuucaaaaucuacaguaagcacaccccaauaaauuuaguuagggaccugccccagggauuuagcgcucuugagccuuugguggaucugccaaucggcauuaacaucacacgguuccagacucuacucgcccugcaucgcucuuaucuuaccccgggcgacuccucaagcggguggacagcaggagccgcugcauacuauguagguuaccugcaacccagaaccuuuuugcucaaauauaaugaaaacggcacgauuacugaugccguggacugcgcucuggauccuuuaagugagacaaaguguacccugaagucuuucacugucgaaaaagggaucuaccagacauccaauuuuagggugcagccaaccgagagcauaguucgguuccccaacauuacgaaucucugcccuuuuggagagguguucaacgccacccgcuucgcgucggucuaugcauggaaucgaaagagaaucucuaacuguguggccgacuacuccguacuuuacaauucagcuaguuuuagcacauucaaaugcuauggcguuuccccaacuaagcugaacgacuuguguuuuaccaauguguacgccgauucuuucgucauuaggggugacgaagugcggcagaucgcacccgggcaaacaggaaaaaucgcugauuauaacuacaagcuaccggacgauuuuacuggcugcgucauugccuggaauagcaacaaccuggacucaaaagugggcgggaauuauaacuaccucuaucgucuguuccgcaagaguaaucuuaagccuuuugagagagauauauccaccgaaaucuaccaggcgggaagcacacccuguaacgguguugagggcuucaauugcuacuuuccacugcagucuuauggguuccaaccuaccaacggagugggcuaccagcccuauaggguagucguguugucauuugaacuccugcacgccccagcaacuguuugcggucccaaaaagaguacgaauuuagugaaaaacaagugugucaauuucaacuuuaaugggcugacaggcaccggagugcuaacugagagcaacaaaaaguuccucccuuuccagcaguuuggccgggacauugcugauaccacagacgccguacgagauccacaaacccuggagauccuugacauaacuccgugcuccuucgggggagugucuguuauuacacccgguacgaauaccucgaaccaggucgcuguguuguaccagggcgugaauuguacugaagucccuguugccauccacgcagaccagcugacaccaaccuggcgcguguauagcacaggguccaacguguuucaaacuagagccggaugccucaucggcgcugagcauguaaacaauucauacgaaugugauauucccaucggugcggggauuugcgcaaguuaucagacccagacgaacucuccuaggcgggcccgcagcgucgcuucccagucaauaaucgccuacaccaugagccugggcgcagaaaauucuguggccuacuccaacaauaguauugcuaucccaacaaacuucacuaucagcguuaccacagaaauucuucccgugucuaugacuaagaccuccgucgacuguacgauguauauaugcggagauucaacagaguguaguaaucuguugcuccaauacggcagcuuuugcacccagcugaacagagccuuaacugggaucgcaguggagcaggacaaaaauacacaggaaguuuucgcgcaagugaagcagauuuauaaaaccccgccuaucaaggauuuuggagguuucaacuuuucgcagauucugccagaccccuccaaaccuucuaagaggagcuucaucgaggaucuacucuuuaauaagguaacucuggcugacgccggcuucauaaaacaauacggggauugucuuggagacaucgucgcacgugauuugauuugcgcccagaaguucaacggccugaccgugcugcccccacucuuaacagacgaaaugaucgcucaguauacgucagcccugcuugcagguaccauuacgaguggguggacauuuggcgcuggagccgcguugcagaucccuuucgccaugcaaauggcuuaccgguuuaauggcauaggggugacccagaacguccucuaugagaaucagaaacugauugcaaaccaguucaacuccgccaucggaaagauucaagauucucuaagcuccacagcuucagcccugggcaaacuccaggacguugugaaucagaacgcacaggcgcugaauacucuuguaaagcaauugagcaguaacuuuggugccaucucuuccgugcugaaugacauauuaagccgacucgauaaggucgaagcugaggugcagaucgacagacugauuaccgggaggcuucagucgcugcaaacguacguuacacagcaguugauccgcgccgcagagauucgggcuucagccaaccucgcagccaccaaaaugucugaaugcgugcugggacagaguaagagagucgauuucuguggcaaagguuaccaccuaauguccuuuccccaaagcgcuccacauggcgugguuuuccugcacgugacuuaugucccggcgcaggagaagaauuuuaccacagccccugcaaucugccacgacgggaaagcucauuuccccagggaaggaguauuugugucuaacggcacucacugguucguuacccagcgcaauuuuuacgagccacagauaauuacaacggauaacaccuucgugagcgggaauugugacgucgugaucggaaucguaaacaauacuguguaugauccccuccaaccugagcuggacuccuucaaggaagaacuugauaaauacuuuaagaaccauacaucaccagacgucgauuugggcgacauuagugguaucaaugccagcguugugaacauucagaaggaaauagaucgacugaaugagguggccaaaaacuuaaacgaaucucucaucgaccugcaggagcuugggaaguaugagcaguacauuaaauggcccugguauaucuggcugggauucauugcuggccuaaucgcaauagucauggugaccaucaugcucugcuguaugacuuccugcuguucaugccugaaggguuguugcaguuguggcagcugcugcaaauuugacgaagaugacuccgagccuguuuugaaggggguaaagcugcacuacacauga

SEQ ID NO: 12011 - RNA, 3822 nt, Artificial Sequence
  SARS-CoV-2/USA/WA-UW291/2020__EPI_ISL_418076 spike protein CDS human (1-1273)
auguucguguuucugguccuccuuccccugguuagcucccagugcgugaacuugaccacaagaacucaauuaccuccagccuacacuaauucuuucaccaggggcguauauuacccggacaagguguuucggucaaguguccugcacagcacacaggaucuauuccuccccuuuuucuccaacgugacuugguuucaugcuauccacguuucugggaccaauggaacaaaacgcuucgacaacccugugcugccauuuaaugauggugucuauuucgcaucgaccgagaagucaaacauuauacgaggcuggaucuuugggacuacacuugacagcaaaacccagagucuguugauugugaauaacgccacgaauguaguuaucaaggugugugaguuccaguuuugcaacgaucccuuccucggagucuacuaucauaaaaauaacaaguccuggauggagucugaguuccguguguacagcuccgcgaauaacuguacuuuugaguaugugucacaaccuuuccugauggaccuggaaggcaagcaggguaauuuuaaaaaccucagagaguucgucuuuaagaacauugauggguacuucaaaaucuacaguaagcacaccccaauaaauuuaguuagggaccugccccagggauuuagcgcucuugagccuuugguggaucugccaaucggcauuaacaucacacgguuccagacucuacucgcccugcaucgcucuuaucuuaccccgggcgacuccucaagcggguggacagcaggagccgcugcauacuauguagguuaccugcaacccagaaccuuuuugcucaaauauaaugaaaacggcacgauuacugaugccguggacugcgcucuggauccuuuaagugagacaaaguguacccugaagucuuucacugucgaaaaagggaucuaccagacauccaauuuuagggugcagccaaccgagagcauaguucgguuccccaacauuacgaaucucugcccuuuuggagagguguucaacgccacccgcuucgcgucggucuaugcauggaaucgaaagagaaucucuaacuguguggccgacuacuccguacuuuacaauucagcuaguuuuagcacauucaaaugcuauggcguuuccccaacuaagcugaacgacuuguguuuuaccaauguguacgccgauucuuucgucauuaggggugacgaagugcggcagaucgcacccgggcaaacaggaaaaaucgcugauuauaacuacaagcuaccggacgauuuuacuggcugcgucauugccuggaauagcaacaaccuggacucaaaagugggcgggaauuauaacuaccucuaucgucuguuccgcaagaguaaucuuaagccuuuugagagagauauauccaccgaaaucuaccaggcgggaagcacacccuguaacgguguugagggcuucaauugcuacuuuccacugcagucuuauggguuccaaccuaccaacggagugggcuaccagcccuauaggguagucguguugucauuugaacuccugcacgccccagcaacuguuugcggucccaaaaagaguacgaauuuagugaaaaacaagugugucaauuucaacuuuaaugggcugacaggcaccggagugcuaacugagagcaacaaaaaguuccucccuuuccagcaguuuggccgggacauugcugauaccacagacgccguacgagauccacaaacccuggagauccuugacauaacuccgugcuccuucgggggagugucuguuauuacacccgguacgaauaccucgaaccaggucgcuguguuguaccagggcgugaauuguacugaagucccuguugccauccacgcagaccagcugacaccaaccuggcgcguguauagcacaggguccaacguguuucaaacuagagccggaugccucaucggcgcugagcauguaaacaauucauacgaaugugauauucccaucggugcggggauuugcgcaaguuaucagacccagacgaacucuccuaggcgggcccgcagcgucgcuucccagucaauaaucgccuacaccaugagccugggcgcagaaaauucuguggccuacuccaacaauaguauugcuaucccaacaaacuucacuaucagcguuaccacagaaauucuucccgugucuaugacuaagaccuccgucgacuguacgauguauauaugcggagauucaacagaguguaguaaucuguugcuccaauacggcagcuuuugcacccagcugaacagagccuuaacugggaucgcaguggagcaggacaaaaauacacaggaaguuuucgcgcaagugaagcagauuuauaaaaccccgccuaucaaggauuuuggagguuucaacuuuucgcagauucugccagaccccuccaaaccuucuaagaggagcuucaucgaggaucuacucuuuaauaagguaacucuggcugacgccggcuucauaaaacaauacggggauugucuuggagacaucgcagcccgugauuugauuugcgcucagaaguucaacggccugaccguccugcccccacucuuaacagacgaaaugaucgcccaguauacgucagcacugcuugcugguaccauuacgaguggguggacauuuggcgccggagcggccuugcagaucccuuucgcuaugcaaauggcauaccgguuuaauggcauaggggugacccagaacgugcucuaugagaaucagaaacugauugccaaccaguucaacuccgcuaucggaaagauucaauacucucuaagcuccacagccucagcacugggcaaacuccaggaugucguuaaucagaacgcgcaggcccugaauacucuugugaagcaauugagcaguaacuuuggugcuaucucuuccguacugaaugacauauuaagccgacucgacaagguggaagccgagguccagaucgauagacugauuaccgggaggcuucagucgcugcaaacguacgugacacagcaguugauccgcgcagcugagauucgggccucagcaaaccucgccgcuaccaaaaugucugaaugcguucugggacagaguaagagaguggacuucuguggcaaagguuaucaccuaauguccuuuccccaaagcgcgccacauggcgucguguuccugcacguuacuuacgugccggcccaggagaagaauuuuaccacagcuccugcaaucugccacgaugggaaagcccauuuccccagggaaggagucuuuguaucuaacggcacucacugguucgugacccagcgcaauuuuuaugagccacagauaauuacaacggacaacaccuucguuagcgggaauugugauguggucaucggaaucgugaacaauacuguauacgacccccuccaaccugagcuggauuccuucaaggaagaacuugacaaauauuuuaagaaccauacaucaccagauguggacuugggcgauauuagugguaucaaugccagcgucguuaacauucagaaggaaauagaccgacugaaugagguggcuaaaaacuuaaacgaaucucucaucgaucugcaggagcuugggaaguacgagcaguauauuaaauggcccugguacaucuggcugggauucauugcaggccuaaucgccauagugauggucaccaucaugcucugcuguaugacuuccugcuguucaugccugaaggguuguugcaguuguggcagcugcugcaaauuugacgaagacgauuccgagccuguguugaaggggguuaagcugcacuacacauga

SEQ ID NO: 12012 - RNA, 3822 nt, Artificial Sequence
  SARS-CoV-2/Portugal/PT0034/2020__EPI_ISL_418019 spike protein CDS human (1-1273)
auguucguguuucugguccuccuuccccugguuagcucccagugcgugaacuugaccacaagaacucaauuaccuccagccuacacuaauucuuucaccaggggcguauauuacccggacaagguguuucggucaaguguccugcacagcacacaggaucuauuccuccccuuuuucuccaacgugacuugguuucaugcuauccacguuucugggaccaauggaacaaaacgcuucgacaacccugugcugccauuuaaugauggugucuauuucgcaucgaccgagaagucaaacauuauacgaggcuggaucuuugggacuacacuugacagcaaaacccagagucuguugauugugaauaacgccacgaauguaguuaucaaggugugugaguuccaguuuugcaacgaucccuuccucggagucuacuaucauaaaaauaacaaguccuggauggagucugaguuccguguguacagcuccgcgaauaacuguacuuuugaguaugugucacaaccuuuccugauggaccuggaaggcaagcaggguaauuuuaaaaaccucagagaguucgucuuuaagaacauugauggguacuucaaaaucuacaguaagcacaccccaauaaauuuaguuagggaccugccccagggauuuagcgcucuugagccuuugguggaucugccaaucggcauuaacaucacacgguuccagacucuacucgcccugcaucgcucuuaucuuaccccgggcgacuccucaagcggguggacagcaggagccgcugcauacuauguagguuaccugcaacccagaaccuuuuugcucaaauauaaugaaaacggcacgauuacugaugccguggacugcgcucuggauccuuuaagugagacaaaguguacccugaagucuuucacugucgaaaaagggaucuaccagacauccaauuuuagggugcagccaaccgagagcauaguucgguuccccaacauuacgaaucucugcccuuuuggagagguguucaacgccacccgcuucgcgucggucuaugcauggaaucgaaagagaaucucuaacuguguggccgacuacuccguacuuuacaauucagcuaguuuuagcacauucaaaugcuauggcguuuccccaacuaagcugaacgacuuguguuuuaccaauguguacgccgauucuuucgucauuaggggugacgaagugcggcagaucgcacccgggcaaacaggaaaaaucgcugauuauaacuacaagcuaccggacgauuuuacuggcugcgucauugccuggaauagcaacaaccuggacucaaaagugggcgggaauuauaacuaccucuaucgucuguuccgcaagaguaaucuuaagccuuuugagagagauauauccaccgaaaucuaccaggcgggaagcacacccuguaacgguguugagggcuucaauugcuacuuuccacugcagucuuauggguuccaaccuaccaacggagugggcuaccagcccuauaggguagucguguugucauuugaacuccugcacgccccagcaacuguuugcggucccaaaaagaguacgaauuuagugaaaaacaagugugucaauuucaacuuuaaugggcugacaggcaccggagugcuaacugagagcaacaaaaaguuccucccuuuccagcaguuuggccgggacauugcugauaccacagacgccguacgagauccacaaacccuggagauccuugacauaacuccgugcuccuucgggggagugucuguuauuacacccgguacgaauaccucgaaccaggucgcuguguuguaccagggcgugaauuguacugaagucccuguugccauccacgcagaccagcugacaccaaccuggcgcguguauagcacaggguccaacguguuucaaacuagagccggaugccucaucggcgcugagcauguaaacaauucauacgaaugugauauucccaucggugcggggauuugcgcaaguuaucagacccagacgaacucuccuaggcgggcccgcagcgucgcuucccagucaauaaucgccuacaccaugagccugggcgcagaaaauucuguggccuacuccaacaauaguauugcuaucccaacaaacuucacuaucagcguuaccacagaaauucuucccgugucuaugacuaagaccuccgucgacuguacgauguauauaugcggagauucaacagaguguaguaaucuguugcuccaauacggcagcuuuugcacccagcugaacagagccuuaacugggaucgcaguggagcaggacaaaaauacacaggaaguuuucgcgcaagugaagcagauuuauaaaaccccgccuaucaaggauuuuggagguuucaacuuuucgcagauucugccagaccccuccaaaccuucuaagaggagcuucaucgaggaucuacucuuuaauaagguaacucuggcugacgccggcuucauaaaacaauacggggauugucuuggagacaucgcagcccgugauuugauuugcgcucagaaguucaacggccugaccguccugcccccacucuuaacagacgaaaugaucgcccaguauacgucagcacugcuugcugguaccauuacgaguggguggacauuuggcgccggagcggccuugcagaucccuuucgcuaugcaaauggcauaccgguuuaauggcauaggggugacccagaacgugcucuaugagaaucagaaacugauugccaaccaguucaacuccgcuaucggaaagauucaagauucucuaagcuccacagccucagcacugggcaaacuccaggacgucguuaaucagaacgcgcaggcccugaauacucuugugaagcaauugagcaguaacuuuggugcuaucucuuccguacugaaugacauauuaagccgacucgauaagguggaagccgagguccagaucgacagacugauuaccgggaggcuucagucgcugcaaacguacgugacacagcaguugauccgcgcagcugagauucgggccucagcaaaccucgccgcuaccaaaaugucugaaugcguucugggacagaguaagagaguggauuucuguggcaaagguuaccaccuaauguccuuuccccaaagcgcgccacauggcgucguguuccugcacguuacuuaugugccggcccaggagaagaauuuuaccacagcuccugcaaucugccacgacgggaaagcccauuuccccagggaaggagucuuuguaucuaacggcacucacugguucgugacccagcgcaauuuuuacgagccacagauaauuacaacggauaacaccuucguuagcgggaauugugacguggucaucggaaucgugaacaauacuguauaugauccccuccaaccugagcuggacuccuucaaggaagaacuugauaaauacuuuaagaaccauacaucaccagacguggauuugggcgacauuagugguaucaaugccagcgucguuaacauucagaaggaaauagaucgacugaaugagguggcuaaaaacuuaaacgaaucucucaucgaccugcaggagcuugggaaguaugagcaguacauuaaauggcccugguauaucuggcugggauucauugcaggccuaaucgccauagugauggucaccaucaugcucugcuguauuacuuccugcuguucaugccugaaggguuguugcaguuguggcagcugcugcaaauuugacgaagaugacuccgagccuguguugaaggggguuaagcugcacuacacauga

SEQ ID NO: 12013 - RNA, 3822 nt, Artificial Sequence
  SARS-CoV-2/Iceland/202/2020__EPI_ISL_417750 spike protein CDS human (1-1273)
auguucguguuucugguccuccuuccccugguuagcucccagugcgugaacuugaccacaagaacucaauuaccuccagccuacacuaauucuuucaccaggggcguauauuacccggacaagguguuucggucaaguguccugcacagcacacaggaucuauuccuccccuuuuucuccaacgugacuugguuucaugcuauccacguuucugggaccaauggaacaaaacgcuucgacaacccugugcugccauuuaaugauggugucuauuucgcaucgaccgagaagucaaacauuauacgaggcuggaucuuugggacuacacuugacagcaaaacccagagucuguugauugugaauaacgccacgaauguaguuaucaaggugugugaguuccaguuuugcaacgaucccuuccucggagucuacuaucauaaaaauaacaaguccuggauggagucugaguuccguguguacagcuccgcgaauaacuguacuuuugaauaugugucacaaccuuuccugauggaccuggaaggcaagcaggguaauuuuaaaaaccucagagaguucgucuuuaagaacauugauggguacuucaaaaucuacaguaagcacaccccaauaaauuuaguuagggaccugccccagggauuuagcgcucuugagccuuugguggaucugccaaucggcauuaacaucacacgguuccagacucuacucgcccugcaucgcucuuaucuuaccccgggcgacuccucaagcggguggacagcaggagccgcugcauacuauguagguuaccugcaacccagaaccuuuuugcucaaauauaaugaaaacggcacgauuacugaugccguggacugcgcucuggauccuuuaagugagacaaaguguacccugaagucuuucacugucgaaaaagggaucuaccagacauccaauuuuagggugcagccaaccgagagcauaguucgguuccccaacauuacgaaucucugcccuuuuggagagguguucaacgccacccgcuucgcgucggucuaugcauggaaucgaaagagaaucucuaacuguguggccgacuacuccguacuuuacaauucagcuaguuuuagcacauucaaaugcuauggcguuuccccaacuaagcugaacgacuuguguuuuaccaauguguacgccgauucuuucgucauuaggggugacgaagugcggcagaucgcacccgggcaaacaggaaaaaucgcugauuauaacuacaagcuaccggacgauuuuacuggcugcgucauugccuggaauagcaacaaccuggacucaaaagugggcgggaauuauaacuaccucuaucgucuguuccgcaagaguaaucuuaagccuuuugagagagauauauccaccgaaaucuaccaggcgggaagcacacccuguaacgguguugagggcuucaauugcuacuuuccacugcagucuuauggguuccaaccuaccaacggagugggcuaccagcccuauaggguagucguguugucauuugaacuccugcacgccccagcaacuguuugcggucccaaaaagaguacgaauuuagugaaaaacaagugugucaauuucaacuuuaaugggcugacaggcaccggagugcuaacugagagcaacaaaaaguuccucccuuuccagcaguuuggccgggacauugcugauaccacagacgccguacgagauccacaaacccuggagauccuugacauaacuccgugcuccuucgggggagugucuguuauuacacccgguacgaauaccucgaaccaggucgcuguguuguaccaggacgugaauuguacugaagucccuguugccauccacgcagaucagcugacaccaaccuggcgcguguauagcacaggcuccaacguguuucaaacuagagccgggugccucaucggagcugagcauguaaacaauucauacgaaugugacauucccaucggcgcggguauuugcgcaaguuaucagacccagacgaacucuccuaggcgggcccgcagcgucgcuucccagucaauaaucgccuacaccaugagccugggggcagaaaauucuguggccuacuccaacaauaguauugcuaucccaacaaacuucacuaucagcguuaccacagaaauucuucccgugucuaugacuaagaccuccgucgauuguacgauguauauaugcggcgacucaacagaguguaguaaucuguugcuccaauacggcagcuuuugcacccagcugaacagagccuuaacuggaaucgcaguggagcaggauaaaaauacacaggaaguuuucgcgcaagugaagcagauuuauaaaaccccgccuaucaaggacuuugggggauucaacuuuucgcagauucugccagaucccuccaaaccuucuaagaggagcuucaucgaggaccuacucuuuaauaagguaacucuggcugaugccgguuucauaaaacaauacggcgacugucuuggggauaucgcagcccgugacuugauuugcgcucagaaguucaacggacugaccguccugcccccacucuuaacagaugaaaugaucgcccaguauacgucagcacugcuugcuggcaccauuacgagugguuggacauuuggggccggcgcggccuugcagaucccuuucgcuaugcaaauggcauaccgguuuaauggaauaggcgugacccagaacgugcucuaugagaaucagaaacugauugccaaccaguucaacuccgcuaucgggaagauucaagacucucuaagcuccacagccucagcacugggaaaacuccaggacgucguuaaucagaacgcgcaggcccugaauacucuugugaagcaauugagcaguaacuuuggcgcuaucucuuccguacugaaugauauauuaagccgacucgacaagguggaagccgagguccagaucgauagacugauuaccgguaggcuucagucgcugcaaacguacgugacacagcaguugauccgcgcagcugagauucgggccucagcaaaccucgccgcuaccaaaaugucugaaugcguucuggggcagaguaagagaguggacuucuguggaaaaggcuaccaccuaauguccuuuccccaaagcgcgccacauggugucguguuccugcacguuacuuaugugccggcccaggagaagaauuuuaccacagcuccugcaaucugccacgauggcaaagcccauuuccccagggaaggggucuuuguaucuaacggaacucacugguucgugacccagcgcaauuuuuacgagccacagauaauuacaacggacaacaccuucguuagcggcaauugugauguggucaucgggaucgugaacaauacuguauaugacccccuccaaccugagcuggauuccuucaaggaggaacuugacaaauacuuuaagaaccauacaucaccagauguggacuugggagauauucccggcaucaaugccagugucguuaacauucagaaggaaauagaccgacugaaugagguggcuaaaaacuuaaacgaaagccucaucgaccugcaggagcuugguaaguaugagcaguacauuaaauggccuugguauaucuggcugggguucauugcaggacuaaucgccauagugauggucaccaucaugcucugcuguaugacuucuugcuguuccugccugaagggcuguugcucaugugguaguugcugcaaauuugaugaagacgauagcgagccgguguugaagggcguuaagcugcacuacacauga

SEQ ID NO: 12014 - RNA, 3822 nt, Artificial Sequence
  SARS-CoV-2/USA/WA-UW261/2020__EPI_ISL_418046 spike protein CDS human (1-1273)
auguucguguuucugguccuccuuccccugguuagcucccagugcgugaacuugaccacaagaacucaauuaccuccagccuacacgaauagcuucaccaggggcguauauuacccggacaagguguuucggucaaguguccugcacagcacacaggaucuauuccuccccuuuuucuccaacgugacuugguuucaugcuauccacguuucugggaccaauggaacaaaacgcuucgacaacccugugcugccauuuaaugauggugucuauuucgcaucgaccgagaagucaaacauuauacgaggcuggaucuuugggacuacacuugacagcaaaacccagagucuguugauugugaauaacgccacgaauguaguuaucaaggugugugaguuccaguuuugcaacgaucccuuccucggagucuacuaucauaaaaauaacaaguccuggauggagucugaguuccguguguacagcuccgcgaauaacuguacuuuugaguaugugucacaaccuuuccugauggaccuggaaggcaagcaggguaauuuuaaaaaccucagagaguucgucuuuaagaacauugauggguacuucaaaaucuacaguaagcacaccccaauaaauuuaguuagggaccugccccagggauuuagcgcucuugagccuuugguggaucugccaaucggcauuaacaucacacgguuccagacucuacucgcccugcaucgcucuuaucuuaccccgggcgacuccucaagcggguggacagcaggagccgcugcauacuauguagguuaccugcaacccagaaccuuuuugcucaaauauaaugaaaacggcacgauuacugaugccguggacugcgcucuggauccuuuaagugagacaaaguguacccugaagucuuucacugucgaaaaagggaucuaccagacauccaauuuuagggugcagccaaccgagagcauaguucgguuccccaacauuacgaaucucugcccuuuuggagagguguucaacgccacccgcuucacaucggucuaugcguggaaucgaaagagaaucucuaacuguguggcagacuacuccguacuuuacaauucagccaguuuuagcacuuucaaaugcuauggcguuuccccaaccaagcugaacgacuuguguuuuacaaauguguacgcugauucuuucgucauuaggggugacgaagugcggcagaucgcccccgggcaaacuggaaaaaucgcagauuauaacuacaagcuaccggacgauuuuaccggcugcgucauugcuuggaauagcaacaaccuggacucaaaagugggcgggaauuauaacuaccucuaucgucuguuccgcaagaguaaucuuaagccuuuugagagagauauauccacagaaaucuaccaggccggaagcacccccuguaacgguguugagggcuucaauugcuacuuuccacugcagucuuauggguuccaaccuacuaacggagugggcuaccagcccuauaggguagucguguugucauuugaacuccugcacgcgccagccacgguuugcggucccaaaaagaguacaaauuuagugaaaaacaagugugucaauuucaacuuuaaugggcugaccggcacuggagugcuaaccgagagcaacaaaaaguuccucccuuuccagcaguuuggccgggacauugcagauacaaccgacgcuguacgagauccacaaacucuggagauccuugacauaacaccgugcuccuucgggggagugucuguuauuacgcccgguaccaauacuucgaaccaggucgccguguuguaccaggacgugaauuguacagaagucccuguugcuauccacgccgaucagcugaccccaacauggcgcguguauagcacuggcuccaacguguuucaaaccagagcagggugccucaucggagccgagcauguaaacaauucauacgaaugugacauucccaucggcgcugguauuugcgcgaguuaucagacgcagaccaacucuccuaggcgggcacgcagcgucgccucccagucaauaaucgcuuacacaaugagccugggggccgaaaauucuguggcauacuccaacaauaguauugccaucccaacuaacuucaccaucagcguuacaacugaaauucuucccgugucuaugaccaagacguccgucgauuguacaauguauauaugcggcgacucaaccgaguguaguaaucuguugcuccaauacggaucuuuuugcacucagcugaacagagcuuuaacaggcaucgccguggagcaggauaaaaauacccaggaaguuuucgcacaagugaagcagauuuauaaaacuccgccuaucaaggacuuugggggauucaacuuuucgcagauucugccagaucccuccaaaccuucuaagaggagcuucaucgaggaccuacucuuuaauaagguaacccuggcggaugcugguuucauaaaacaauacggcgacugucuuggggauaucgccgcacgugacuugauuugcgcccagaaguucaacggacugacaguccugcccccacucuuaacggaugaaaugaucgcucaguauaccucagcccugcuugcaggcacuauuacaagugguuggaccuuuggggcuggcgccgcguugcagaucccuuucgccaugcaaauggcuuaccgguuuaauggaauaggcgugacacagaacgugcucuaugagaaucagaaacugauugcaaaccaguucaacuccgccaucgggaagauucaagacucucuaagcuccacugcuucagcccugggaaaacuccaggacgucguuaaucagaacgcacaggcgcugaauacccuugugaagcaauugagcaguaacuuuggcgccaucucuuccguacugaaugauauauuaagccgacucgacaagguggaagcugagguccagaucgauagacugauuacggguaggcuucagucgcugcaaacauacgugacccagcaguugauccgcgccgcagagauucgggcuucagccaaccucgcagccacuaaaaugucugaaugcguucuggggcagaguaagagaguggacuucuguggaaaaggcuaccaccuaauguccuuuccccaaagcgcuccacauggugucguguuccugcacguuaccuaugugccggcgcaggagaagaauuuuacaacugccccugcaaucugccacgauggcaaagcucauuuccccagggaaggggucuuuguaucuaacggaacccacugguucgugacacagcgcaauuuuuacgagccacagauaauuacgaccgacaacacuuucguuagcggcaauugugauguggucaucgggaucgugaacaauacaguauaugacccccuccaaccugagcuggauuccuucaaggaagaacuugacaaauacuuuaagaaccauaccucaccagauguggacuugggagauauuaguggcaucaaugccagcgucguuaacauucagaaggaaauagaccgacugaaugagguggccaaaaacuuaaacgaaucucucaucgaccugcaggagcuugguaaguaugagcaguacauuaaauggcccugguauaucuggcugggguucauugcuggacuaaucgcaauagugauggucacuaucaugcucugcuguaugacauccugcuguucaugccugaagggcuguugcaguugugguagcugcugcaaauuugaugaagacgauuccgagccuguguugaagggcguuaagcugcacuacaccuga

SEQ ID NO: 12015 - RNA, 3822 nt, Artificial Sequence
  SARS-CoV-2/Portugal/PT0035/2020__EPI_ISL_418020 spike protein CDS human (1-1273)
auguucguguuucugguccuccuuccccugguuagcucccagugcgugaacuugaccacaagaacucaauuaccuccagccuacacgaauagcuucaccaggggcguauauuacccggacaagguguuucggucaaguguccugcacagcacacaggaucuauuccuccccuuuuucuccaacgugacuugguuucaugcuauccacguuucugggaccaauggaacaaaacgcuucgacaacccugugcugccauuuaaugauggugucuauuucgcaucgaccgagaagucaaacauuauacgaggcuggaucuuugggacuacacuugacagcaaaacccagagucuguugauugugaauaacgccacgaauguaguuaucaaggugugugaguuccaguuuugcaacgaucccuuccucggagucuacuaucauaaaaauaacaaguccuggauggagucugaguuccguguguacagcuccgcgaauaacuguacuuuugaguaugugucacaaccuuuccugauggaccuggaaggcaagcaggguaauuuuaaaaaccucagagaguucgucuuuaagaacauugauggguacuucaaaaucuacaguaagcacaccccaauaaauuuaguuagggaccugccccagggauuuagcgcucuugagccuuugguggaucugccaaucggcauuaacaucacacgguuccagacucuacucgcccugcaucgcucuuaucuuaccccgggcgacuccucaagcggguggacagcaggagccgcugcauacuauguagguuaccugcaacccagaaccuuuuugcucaaauauaaugaaaacggcacgauuacugaugccguggacugcgcucuggauccuuuaagugagacaaaguguacccugaagucuuucacugucgaaaaagggaucuaccagacauccaauuuuagggugcagccaaccgagagcauaguucgguuccccaacauuacgaaucucugcccuuuuggagagguguucaacgccacccgcuucgcgucggucuaugcauggaaucgaaagagaaucucuaacuguguggccgacuacuccguacuuuacaauucagcuaguuuuagcacauucaaaugcuauggcguuuccccaacuaagcugaacgacuuguguuuuaccaauguguacgccgauucuuucgucauuaggggugacgaagugcggcagaucgcacccgggcaaacaggaaaaaucgcugauuauaacuacaagcuaccggacgauuuuacuggcugcgucauugccuggaauagcaacaaccuggacucaaaagugggcgggaauuauaacuaccucuaucgucuguuccgcaagaguaaucuuaagccuuuugagagagauauauccaccgaaaucuaccaggcgggaagcacacccuguaacgguguugagggcuucaauugcuacuuuccacugcagucuuauggguuccaaccuaccaacggagugggcuaccagcccuauaggguagucguguugucauuugaacuccugcacgccccagcaacuguuugcggucccaaaaagaguacgaauuuagugaaaaacaagugugucaauuucaacuuuaaugggcugacaggcaccggagugcuaacugagagcaacaaaaaguuccucccuuuccagcaguuuggccgggacauugcugauaccacagacgccguacgagauccacaaacccuggagauccuugacauaacuccgugcuccuucgggggagugucuguuauuacacccgguacgaauaccucgaaccaggucgcuguguuguaccaggacgugaauuguacugaagucccuguugccauccacgcagaucagcugacaccaaccuggcgcguguauagcacaggcuccaacguguuucaaacuagagccgggugccucaucggagcugagcauguaaacaauucauacgaaugugacauucccaucggcgcggguauuugcgcaaguuaucagacccagacgaacucuccuaggcgggcccgcagcgucgcuucccagucaauaaucgccuacaccaugagccugggggcagaaaauucuguggccuacuccaacaauaguauugcuaucccaacaaacuucacuaucagcguuaccacagaaauucuucccgugucuaugacuaagaccuccgucgauuguacgauguauauaugcggcgacucaacagaguguaguaaucuguugcuccaauacggaucuuuuugcacccagcugaacagagccuuaacuggcaucgcaguggagcaggauaaaaauacacaggaaguuuucgcgcaagugaagcagauuuauaaaaccccgccuaucaaggacuuugggggauucaacuuuucgcagauucugccagaucccuccaaaccuucuaagaggagcuucaucgaggaccuacucuuuaauaagguaacucuggcugaugccgguuucauaaaacaauacggcgacugucuuggggauaucucagcacgugacuugauuugcgcccagaaguucaacggacugaccguccugcccccacucuuaacagaugaaaugaucgcucaguauacgagugcccugcuugcaggcaccauuacuuccgguuggacauuuggggcuggcgccgcguugcagaucccuuucgccaugcaaauggcuuaccgguuuaauggaauaggcgugacccagaacgugcucuaugagaaucagaaacugauugcaaaccaguucaacucugccaucgggaagauucaagacagccuauccucaacagcuagcgcccugggaaaacuccaggacgucguuaaucagaacgcacaggcgcugaauacucuugugaagcaauugaguucuaacuuuggcgccaucuccagcguacugaaugauauauuaucgcgacucgacaagguggaagcugagguccagaucgauagacugauuaccgguaggcuucagucacugcaaacguacgugacacagcaguugauccgcgccgcagagauucgggcuucugccaaccucgcagccaccaaaaugagugaaugcguucuggggcaguccaagagaguggacuucuguggaaaaggcuaccaccuaaugagcuuuccccaaucugcuccacauggugucguguuccugcacguuacuuaugugccggcgcaggagaagaauuuuaccacagccccugcaaucugccacgauggcaaagcucauuuccccagggaaggggucuuuguaagcaacggaacucacugguucgugacccagcgcaauuuuuacgagccacagauaauuacaacggacaacaccuucguuuccggcaauugugauguggucaucgggaucgugaacaauacuguauaugacccccuccaaccugagcuggauucauucaaggaagaacuugacaaauacuuuaagaaccauacaaguccagauguggacuugggagauauuagcggcaucaaugccucugucguuaacauucagaaggaaauagaccgacugaaugagguggccaaaaacuuaaacgaaucccucaucgaccugcaggagcuugguaaguaugagcaguacauuaaauggcccugguauaucuggcugggguucauugcuggacuaaucgcaauagugauggucaccaucaugcucugcuguaugacuucaugcuguaguugccugaagggcuguugcagcugugguuccugcugcaaauuugaugaagacgauucugagccuguguugaagggcguuaagcugcacuacacauga

SEQ ID NO: 12016 - RNA, 3822 nt, Artificial Sequence
  SARS-CoV-2/USA/NY-NYUMC7/2020__EPI_ISL_418192 spike protein CDS human (1-1273)
auguucguguuucugguccuccuuccccugguuagcucccagugcgugaacuugaccacaagaacucaauuaccuccagccuacacuaauucuuucaccaggggcguauauuacccggacaagguguuucggucaaguguccugcacagcacacaggaucuauuccuccccuuuuucuccaacgugacuugguuucaugcuauccacguuucugggaccaauggaacaaaacgcuucgacaacccugugcugccauuuaaugauggugucuauuucgcaucgaccgagaagucaaacauuauacgaggcuggaucuuugggacuacacuugacagcaaaacccagagucuguugauugugaauaacgccacgaauguaguuaucaaggugugugaguuccaguuuugcaacgaucccuuccucggagucuaccaucacaaaaauaacaaguccuggauggagucugaguuccguguguauagcuccgcgaauaacuguacuuuugaguacgugucacaaccuuuccugauggaccuggaaggcaagcaggguaauuuuaaaaaccucagagaguucgucuuuaagaacauugauggguauuucaaaaucuacaguaagcauaccccaauaaauuuaguuagggaccugccccagggauuuagcgcucuugagccuuugguggaucugccaaucggcauuaacaucacacgguuccagacucuacucgcccugcaccgcucuuaccuuaccccgggcgacuccucaagcggguggacagcaggagccgcugcauauuacguagguuaucugcaacccagaaccuuuuugcucaaauacaaugaaaacggcacgauuacugaugccguggacugcgcucuggauccuuuaagugagacaaaguguacccugaagucuuucacugucgaaaaagggaucuaucagacauccaauuuuagggugcagccaaccgagagcauaguucgguuccccaacauuacgaaucucugcccuuuuggagagguguucaacgccacccgcuucgcgucggucuacgcauggaaucgaaagagaaucucuaacuguguggccgacuauuccguacuuuacaauucagcuaguuuuagcacauucaaaugcuacggcguuuccccaacuaagcugaacgacuuguguuuuaccaauguguaugccgauucuuucgucauuaggggugacgaagugcggcagaucgcacccgggcaaacaggaaaaaucgcugauuacaacuauaagcuaccggacgauuuuacuggcugcgucauugccuggaauagcaacaaccuggacucaaaagugggcgggaauuacaacuaucucuaccgucuguuccgcaagaguaaucuuaagccuuuugagagagauauauccaccgaaaucuaucaggcgggaagcacacccuguaacgguguugagggcuucaauugcuacuuuccacugcagucuuacggguuccaaccuaccaacggagugggcuaucagcccuacaggguagucguguugucauuugaacuccugcacgccccagcaacuguuugcggucccaaaaagaguacgaauuuagugaaaaacaagugugucaauuucaacuuuaaugggcugacaggcaccggagugcuaacugagagcaacaaaaaguuccucccuuuccagcaguuuggccgggacauugcugauaccacagacgccguacgagauccacaaacccuggagauccuugacauaacuccgugcuccuucgggggagugucuguuauuacacccgguacgaauaccucgaaccaggucgcuguguuguaucagggcgugaauuguacugaagucccuguugccauccaugcagaccagcugacaccaaccuggcgcguguacagcacaggguccaacguguuucaaacuagagccggaugccucaucggcgcugagcacguaaacaauucauaugaaugugauauucccaucggugcggggauuugcgcaaguuaccagacccagacgaacucuccuaggcgggcccgcagcgucgcuucccagucaauaaucgccuauaccaugagccugggcgcagaaaauucuguggccuacuccaacaauaguauugcuaucccaacaaacuucacuaucagcguuaccacagaaauucuucccgugucuaugacuaagaccuccgucgacuguacgauguacauaugcggagauucaacagaguguaguaaucuguugcuccaauauggcagcuuuugcacccagcugaacagagccuuaacugggaucgcaguggagcaggacaaaaauacacaggaaguuuucgcgcaagugaagcagauuuacaaaaccccgccuaucaaggauuuuggagguuucaacuuuucgcagauucugccagaccccuccaaaccuucuaagaggagcuucaucgaggaucuacucuuuaauaagguaacucuggcugacgccggcuucauaaaacaauauggggauugucuuggagacaucgcagcccgugauuugauuugcgcucagaaguucaacggccugaccguccugcccccacucuuaacagacgaaaugaucgcccaguacacgucagcacugcuugcugguaccauuacgaguggguggacauuuggcgccggagcggccuugcagaucccuuucgcuaugcaaauggcauaucgguuuaauggcauaggggugacccagaacgugcucuacgagaaucagaaacugauugccaaccaguucaacuccgcuaucggaaagauucaagauucucuaagcuccacagccucagcacugggcaaacuccaggacgucguuaaucagaacgcgcaggcccugaauacucuugugaagcaauugagcaguaacuuuggugcuaucucuuccguacugaaugacauauuaagccgacucgauaagguggaagccgagguccagaucgacagacugauuaccgggaggcuucagucgcugcaaacguaugugacacagcaguugauccgcgcagcugagauucgggccucagcaaaccucgccgcuaccaaaaugucugaaugcguucugggacagaguaagagaguggauuucuguggcaaagguuaccaucuaauguccuuuccccaaagcgcgccacacggcgucguguuccugcacguuacuuacgugccggcccaggagaagaauuuuaccacagcuccugcaaucugccaugacgggaaagcccacuuccccagggaaggagucuuuguaucuaacggcacucauugguucgugacccagcgcaauuuuuaugagccacagauaauuacaacggauaacaccuucguuagcgggaauugugacguggucaucggaaucgugaacaauacuguauacgauccccuccaaccugagcuggacuccuucaaggaagaacuugauaaauauuuuaagaaccacacaucaccagacguggauuugggcgacauuagugguaucaaugccagcgucguuaacauucagaaggaaauagaucgacugaaugagguggcuaaaaacuuaaacgaaucucucaucgaccugcaggagcuugggaaguacgagcaguauauuaaauggcccugguacaucuggcugggauucauugcaggccuaaucgccauagugauggucaccaucaugcucugcuguaugacuuccugcuguucaugccugaaggguuguugcaguuguggcagcugcugcaaauuugacgaagaugacuccgagccuguguugaaggggguuaagcugcauuauacauga

SEQ ID NO: 12017 - RNA, 3822 nt, Artificial Sequence
  SARS-CoV-2/Iceland/189/2020__EPI_ISL_417709 spike protein CDS human (1-1273)
auguucguguuucugguccuccuuccccugguuagcucccagugcgugaacuugaccacaagaacucaauuaccuccagccuacaccaauucuuucacgaggggcguauauuacccggacaagguguuucggucaaguguccugcacagcacacaggaucuauuccuccccuuuuucuccaacgugacuugguuucaugcuauccacguuucugggaccaauggaacaaaacgcuucgacaacccugugcugccauuuaaugauggugucuauuucgcaucgaccgagaagucaaacauuauacgaggcuggaucuuugggacuacacuugacagcaaaacccagagucuguugauugugaauaacgccacgaauguaguuaucaaggugugugaguuccaguuuugcaacgaucccuuccucggagucuacuaucauaaaaauaacaaguccuggauggagucugaguuccguguguacagcuccgcgaauaacuguacuuuugaguaugugucacaaccuuuccugauggaccuggaaggcaagcaggguaauuuuaaaaaccucagagaguucgucuuuaagaacauugauggguacuucaaaaucuacaguaagcacaccccaauaaauuuaguuagggaccugccccagggauuuagcgcucuugagccuuugguggaucugccaaucggcauuaacaucacacgguuccagacucuacucgcccugcaucgcucuuaucuuaccccgggcgacuccucaagcggguggacagcaggagccgcugcauacuauguagguuaccugcaacccagaaccuuuuugcucaaauauaaugaaaacggcacgauuacugaugccguggacugcgcucuggauccuuuaagugagacaaaguguacccugaagucuuucacugucgaaaaagggaucuaccagacauccaauuuuagggugcagccaaccgagagcauaguucgguuccccaacauuacgaaucucugcccuuuuggagagguguucaacgccacccgcuucgcgucggucuaugcauggaaucgaaagagaaucucuaacuguguggccgacuacuccguacuuuacaauucagcuaguuuuagcacauucaaaugcuauggcguuuccccaacuaagcugaacgacuuguguuuuaccaauguguacgccgauucuuucgucauuaggggugacgaagugcggcagaucgcacccgggcaaacaggaaaaaucgcugauuauaacuacaagcuaccggacgauuuuacuggcugcgucauugccuggaauagcaacaaccuggacucaaaagugggcgggaauuauaacuaccucuaucgucuguuccgcaagaguaaucuuaagccuuuugagagagauauauccaccgaaaucuaccaggcgggaagcacacccuguaacgguguugagggcuucaauugcuacuuuccacugcagucuuauggguuccaaccuaccaacggagugggcuaccagcccuauaggguagucguguugucauuugaacuccugcacgccccagcaacuguuugcggucccaaaaagaguacgaauuuagugaaaaacaagugugucaauuucaacuuuaaugggcugacaggcaccggagugcuaacugagagcaacaaaaaguuccucccuuuccagcaguuuggccgggacauugcugauaccacagacgccguacgagauccacaaacccuggagauccuugacauaacuccgugcuccuucgggggagugucuguuauuacacccgguacgaauaccucgaaccaggucgcuguguuguaccagggcgugaauuguacugaagucccuguugccauccacgcagaccagcugacaccaaccuggcgcguguauagcacaggguccaacguguuucaaacuagagccggaugccucaucggcgcugagcauguaaacaauucauacgaaugugauauucccaucggugcggggauuugcgcaaguuaucagacccagacgaacucuccuaggcgggcccgcagcgucgcuucccagucaauaaucgccuacaccaugagccugggcgcagaaaauucuguggccuacuccaacaauaguauugcuaucccaacaaacuucacuaucagcguuaccacagaaauucuucccgugucuaugacuaagaccuccgucgacuguacgauguauauaugcggagauucaacagaguguaguaaucuguugcuccaauacggcagcuuuugcacccagcugaacagagccuuaacugggaucgcaguggagcaggacaaaaauacacaggaaguuuucgcgcaagugaagcagauuuauaaaaccccgccuaucaaggauuuuggagguuucaacuuuucgcagauucugccagaccccuccaaaccuucuaagaggagcuucaucgaggaucuacucuuuaauaagguaacucuggcugacgccggcuucaccaaacaauacggggauugucuuggagacauagcagcccgugauuugaucugcgcucagaaguucaacggccugacaguccucccuccacuguuaacggacgaaaugauugcccaguauaccucagcacugcuugcugguacuaucacaaguggguggaccuuuggcgccggagcggccuugcagauuccuuucgcuaugcaaauggcauaccgguuuaauggcaucggggugacacagaacgugcucuaugagaaucagaaacugauagccaaccaguucaacuccgcuauuggaaagauccaagauucucuaagcuccacugccucagcacugggcaaacuccaggacgucguuaaucagaacgcgcaggcccugaauacccuugugaagcaauugagcaguaacuuuggugcuauuucuuccguacugaaugacaucuuaagccgacucgauaagguggaagccgagguccagauagacagacugaucacggggaggcuucagucgcugcaaacauacgugacccagcaguugauucgcgcagcugagauccgggccucagcaaaccucgccgcuacuaaaaugucugaaugcguucugggacagaguaagagaguggauuucuguggcaaagguuaccaccuaauguccuuuccccaaagcgcgccacauggcgucguguuccugcacguuaccuaugugccggcccaggagaagaauuuuacaacugcacccgcuauuugccacgacgggaaagcccauuuccccagggaaggagucuuuguaucuaacggcacccacugguucgugacacagcgcaauuuuuacgagccacagaucauaacgaccgauaacacuuucguuagcgggaauugugacguggucauuggaaucgugaacaauacaguauaugauccccuccaaccugagcuggacuccuucaaggaagaacuugauaaauacuuuaagaaccauaccucaccagacguggauuugggcgacaucagugguauuaaugccagcgucguuaacauccagaaggaaauugaucgacugaaugagguggcuaaaaacuuaaacgaaucucucauagaccugcaggagcuugggaaguaugagcaguacaucaaauggcccugguauauuuggcugggauucaucgcaggccuaauugccaucgugauggucacuauaaugcucugcuguaugacauccugcuguucaugccugaaggguuguugcaguuguggcagcugcugcaaauuugacgaagaugacuccgagccuguguugaaggggguuaagcugcacuacaccuga

SEQ ID NO: 12018 - RNA, 3822 nt, Artificial Sequence
  SARS-CoV-2/Australia/NSW56/2020__EPI_ISL_417408 spike protein CDS human (1-1273)
auguucguguuucugguccuccuuccccugguuagcucccagugcgugaacuugaccacaagaacucaauuaccuccagccuacacgaauagcuucaccaggggcguauauuacccggacaagguguuucggucaaguguccugcacagcacacaggaucuauuccuccccuuuuucuccaacgugacuugguuucaugcuauccacguuucugggaccaauggaacaaaacgcuucgacaacccugugcugccauuuaaugauggugucuauuucgcaucgaccgagaagucaaacauuauacgaggcuggaucuuugggacuacacuugacagcaaaacccagagucuguugauugugaauaacgccacgaauguaguuaucaaggugugugaguuccaguuuugcaacgaucccuuccucggagucuacuaucauaaaaauaacaaguccuggauggagucugaguuccguguguacagcuccgcgaauaacuguacuuuugaguaugugucacaaccuuuccugauggaccuggaaggcaagcaggguaauuuuaaaaaccucagagaguucgucuuuaagaacauugauggguacuucaaaaucuacaguaagcacaccccaauaaauuuaguuagggaccugccccagggauuuagcgcucuugagccuuugguggaucugccaaucggcauuaacaucacacgguuccagacucuacucgcccugcaucgcucuuaucuuaccccgggcgacuccucaagcggguggacagcaggagccgcugcauacuauguagguuaccugcaacccagaaccuuuuugcucaaauauaaugaaaacggcacgauuacugaugccguggacugcgcucuggauccuuuaagugagacaaaguguacccugaagucuuucacugucgaaaaagggaucuaccagacauccaauuuuagggugcagccaaccgagagcauaguucgguuccccaacauuacgaaucucugcccuuuuggagagguguucaacgccacccgcuucgcgucggucuaugcauggaaucgaaagagaaucucuaacuguguggccgacuacuccguacuuuacaauucagcuaguuuuagcacauucaaaugcuauggcguuuccccaacuaagcugaacgacuuguguuuuaccaauguguacgccgauucuuucgucauuaggggugacgaagugcggcagaucgcacccgggcaaacaggaaaaaucgcugauuauaacuacaagcuaccggacgauuuuacuggcugcgucauugccuggaauagcaacaaccuggacucaaaagugggcgggaauuauaacuaccucuaucgucuguuccgcaagaguaaucuuaagccuuuugagagagauauauccaccgaaaucuaccaggcgggaagcacacccuguaacgguguugagggcuucaauugcuacuuuccacugcagucuuauggguuccaaccuaccaacggagugggcuaccagcccuauaggguagucguguugucauuugaacuccugcacgccccagcaacuguuugcggucccaaaaagaguacgaauuuagugaaaaacaagugugucaauuucaacuuuaaugggcugacaggcaccggagugcuaacugagagcaacaaaaaguuccucccuuuccagcaguuuggccgggacauugcugauaccacagacgccguacgagauccacaaacccuggagauccuugacauaacuccgugcuccuucgggggagugucuguuauuacacccgguacgaauaccucgaaccaggucgcuguguuguaccaggacgugaauuguacugaagucccuguugccauccacgcagaucagcugacaccaaccuggcgcguguauagcacaggcuccaacguguuucaaacuagagccgggugccucaucggagcugagcauguaaacaauucauacgaaugugacauucccaucggcgcggguauuugcgcaaguuaucagacccagacgaacucuccuaggcgggcccgcagcgucgcuucccagucaauaaucgccuacaccaugagccugggggcagaaaauucuguggccuacuccaacaauaguauugcuaucccaacaaacuucacuaucagcguuaccacagaaauucuucccgugucuaugacuaagaccuccgucgauuguacgauguauauaugcggcgacucaacagaguguaguaaucuguugcuccaauacggaucuuuuugcacccagcugaacagagccuuaacuggcaucgcaguggagcaggauaaaaauacacaggaaguuuucgcgcaagugaagcagauuuauaaaaccccgccuaucaaggacuuugggggauucaacuuuucgcagauucugccagauuccucuaaacccagcaagaggucauucaucgaggaccuacucuuuaauaagguaacucuggcugaugccgguuucauaaaacaauacggcgacugucuuggggauaucgcagcccgugacuugauuugcgcucagaaguucaacggacugaccguccucccuccccuguuaacagaugaaaugaucgcccaguauacgagugcacugcuugcuggcaccauuacuuccgguuggacauuuggggccggcgcggccuugcagaucccauucgcuaugcaaauggcauaccgguuuaauggaauaggcgugacccagaacgugcucuaugagaaucagaaacugauugccaaccaguucaacucugcuaucgggaagauucaagacagccuauccucaacagccagcgcacugggaaaacuccaggacgucguuaaucagaacgcgcaggcccugaauacucuugugaagcaauugaguucuaacuuuggcgcuaucuccagcguacugaaugauauauuaucgcgacucgacaagguggaagccgagguccagaucgauagacugauuaccgguaggcuucagucacugcaaacguacgugacacagcaguugauccgcgcagcugagauucgggccucugcaaaccucgccgcuaccaaaaugagugaaugcguucuggggcaguccaagagaguggacuucuguggaaaaggcuaccaccuaaugagcuuuccucaaucugcgccccauggugucguguuccugcacguuacuuaugugccagcccaggagaagaauuuuaccacagcaccggcuaucugccacgauggcaaagcccauuucccuagggaaggggucuuuguaagcaacggaacucacugguucgugacccagcgcaauuuuuacgagccccagauaauuacaacggacaacaccuucguuuccggcaauugugauguggucaucgggaucgugaacaauacuguauaugacccacuccaacccgagcuggauucauucaaggaagaacuugacaaauacuuuaagaaccauacaaguccugauguggacuugggagauauuagcggcaucaaugccucugucguuaacauucagaaggaaauagaccgacugaaugagguggcuaaaaacuuaaacgaaucccucaucgaccugcaggagcuugguaaguaugagcaguacauuaaauggccaugguauaucuggcugggguucauugcaggacuaaucgccauagugauggucaccaucaugcucugcuguaugacuucaugcuguaguugccugaagggcuguugcagcugugguuccugcugcaaauuugaugaagacgauucugagcccguguugaagggcguuaagcugcacuacacauga

SEQ ID NO: 12019 - RNA, 3822 nt, Artificial Sequence
  SARS-CoV-2/Iceland/280/2020__EPI_ISL_417608 spike protein CDS human (1-1273)
auguucguguuucugguccuccuuccccugguuagcucccagugcgugaacuugaccacaagaacucaauuaccuccagccuacacuaauucuuucaccaggggcguauauuacccggacaagguguuucggucaaguguccugcacagcacacaggaucuauuccuccccuuuuucuccaacgugacuugguuucaugcuauccacguuucugggaccaauggaacaaaacgcuucgacaacccugugcugccauuuaaugauggugucuauuucgcaucgaccgagaagucaaacauuauacgaggcuggaucuuugggacuacacuugacagcaaaacccagagucuguugauugugaauaacgccacgaauguaguuaucaaggugugugaguuccaguuuugcaacgaucccuuccucggagucuacuaucauaaaaauaacaaguccuggauggagucugaguuccguguguacagcuccgcgaauaacuguacuuuugaguaugugucacaaccuuuccugauggaccuggaaggcaagcaggguaauuuuaaaaaccucagagaguucgucuuuaagaacauugauggguacuucaaaaucuacaguaagcacaccccaauaaauuuaguuagggaccugccccagggauuuagcgcucuugagccuuugguggaucugccaaucggcauuaacaucacacgguuccagacucuacucgcccugcaucgcucuuaucuuaccccgggcgacuccucaagcggguggacagcaggagccgcugcauacuauguagguuaccugcaacccagaaccuuuuugcucaaauauaaugaaaacggcacgauuacugaugccguggacugcgcucuggauccuuuaagugagacaaaguguacccugaagucuuucacugucgaaaaagggaucuaccagacauccaauuuuagggugcagccaaccgagagcauaguucgguuccccaacauuacgaaucucugcccuuuuggagagguguucaacgccacccgcuucgcgucggucuaugcauggaaucgaaagagaaucucuaacuguguggccgacuacuccguacuuuacaauucagcuaguuuuagcacauucaaaugcuauggcguuuccccaacuaagcugaacgacuuguguuuuaccaauguguacgccgauucuuucgucauuaggggugacgaagugcggcagaucgcacccgggcaaacaggaaaaaucgcugauuauaacuacaagcuaccggacgauuuuacuggcugcgucauugccuggaauagcaacaaccuggacucaaaagugggcgggaauuauaacuaccucuaucgucuguuccgcaagaguaaucuuaagccuuuugagagagauauauccaccgaaaucuaccaggcgggaagcacacccuguaacgguguugagggcuucaauugcuacuuuccacugcagucuuauggguuccaaccuaccaacggagugggcuaccagcccuauaggguagucguguugucauuugaacuccugcacgccccagcaacuguuugcggucccaaaaagaguacgaauuuagugaaaaacaagugugucaauuucaacuuuaaugggcugacaggcaccggagugcuaacugagagcaacaaaaaguuccucccuuuccagcaguuuggccgggacauugcugauaccacagacgccguacgagauccacaaacccuggagauccuugacauaacuccgugcuccuucgggggagugucuguuauuacacccgguacgaauaccucgaaccaggucgcuguguuguaccagggcgugaauuguacugaagucccuguugccauccacgcagaccagcugacaccaaccuggcgcguguauagcacaggguccaacguguuucaaacuagagccggaugccucaucggcgcugagcauguaaacaauucauacgaaugugauauucccaucggugcggggauuugcgcaaguuaucacacccagacgaacucuccuaggcgggcccgcagcgucgcuucccagucaauaaucgccuacaccaugagccugggcgcagaaaauucuguggccuacuccaacaauaguauugcuaucccaacaaacuucacuaucagcguuaccacagaaauucuucccgugucuaugacuaagaccuccgucgacuguacgauguauauaugcggagauucaacagaguguaguaaucuguugcuccaguacggcagcuuuugcacccaacugaacagagccuuaacugggaucgcaguggagcaggacaaaaauacacaggaaguuuucgcacaggugaagcaaauuuauaaaaccccgccuaucaaggauuuuggagguuucaacuuuucgcagauucugccagaccccuccaaaccuucuaagaggagcuucaucgaggaucuacucuuuaauaagguaacucuggcugacgccggcuucauaaaacaguacggggauugucuuggagacaucgcagcccgugauuugauuugcgcucaaaaguucaacggccugaccguccugcccccacucuuaacagacgaaaugaucgcccaguauacgucagcacugcuugcugguaccauuacgaguggguggacauuuggcgccggagcggccuugcagaucccuuucgcuaugcagauggcauaccgguuuaauggcauaggggugacccaaaacgugcucuaugagaaucagaaacugauugccaaccaguucaacuccgcuaucggaaagauucaggauucucuaagcuccacagccucagcacugggcaaacuccaagacgucguuaaucagaacgcgcaggcccugaauacucuugugaagcaguugagcaguaacuuuggugcuaucucuuccguacugaaugacauauuaagccgacucgauaagguggaagccgagguccaaaucgacagacugauuaccgggaggcuucagucgcugcagacguacgugacacaacaguugauccgcgcagcugagauucgggccucagcaaaccucgccgcuaccaaaaugucugaaugcguucugggacagaguaagagaguggauuucuguggcaaagguuaccaucuaauguccuuuccccagagcgcgccacacggcgucguguuccugcacguuacuuaugugccggcccaagagaagaauuuuaccacagcgccugcuaucugccaugacgggaaagcccacuuccccagggaaggagucuuuguaucuaacggcacucauugguucgugacccagcgcaauuuuuacgagccacagauaauuacaacggauaacaccuucguuagcgggaauugugacguggucaucggaaucgugaacaauacuguauaugauccccuccagccugagcuggacuccuucaaggaagaacuugauaaauacuuuaagaaccacacaucaccagacguggauuugggcgacauuagugguaucaaugccagcgucguuaacauucaaaaggaaauagaucgacugaaugagguggcuaaaaacuuaaacgaaucucucaucgaccugcaggagcuugggaaguaugagcaguacauuaaauggcccugguauaucuggcugggauucauugcaggccuaaucgccauagugauggucaccaucaugcucugcuguaugacuuccugcuguucaugccugaaggguuguugcaguuguggcagcugcugcaaauuugacgaagaugacuccgagccuguguugaaggggguuaagcugcauuacacauga

SEQ ID NO: 12020 - RNA, 3822 nt, Artificial Sequence
  SARS-CoV-2/Iceland/247/2020__EPI_ISL_417575 spike protein CDS human (1-1273)
auguucguguuucugguccuccuuccccugguuagcucccagugcgugaacuugaccacaagaacucaauuaccuccagccuacacuaauucuuucaccaggggcguauauuacccggacaagguguuucggucaaguguccugcacagcacacaggaucuauuccuccccuuuuucuccaacgugacuugguuucaugcuauccacguuucugggaccaauggaacaaaacgcuucgacaacccugugcugccauuuaaugauggugucuauuucgcaucgaccgagaagucaaacauuauacgaggcuggaucuuugggacuacacuugacagcaaaacccagagucuguugauugugaauaacgccacgaauguaguuaucaaggugugugaguuccaguuuugcaacgaucccuuccucggagucuacuaucauaaaaauaacaaguccuggauggagucugaguuccguguguacagcuccgcgaauaacuguacuuuugaguaugugucacaaccuuuccugauggaccuggaaggcaagcaggguaauuuuaaaaaccucagagaguucgucuuuaagaacauugauggguacuucaaaaucuacaguaagcacaccccaauaaauuuaguuagggaccugccccagggauuuagcgcucuugagccuuugguggaucugccaaucggcauuaacaucacacgguuccagacucuacucgcccugcaucgcucuuaucuuaccccgggcgacuccucaagcggguggacagcaggagccgcugcauacuauguagguuaccugcaacccagaaccuuuuugcucaaauauaaugaaaacggcacgauuacugaugccguggacugcgcucuggauccuuuaagugagacaaaguguacccugaagucuuucacugucgaaaaagggaucuaccagacauccaauuuuagggugcagccaaccgagagcauaguucgguuccccaacauuacgaaucucugcccuuuuggagagguguucaacgccacccgcuucgcgucggucuaugcauggaaucgaaagagaaucucuaacuguguggccgacuacuccguacuuuacaauucagcuaguuuuagcacauucaaaugcuauggcguuuccccaacuaagcugaacgacuuguguuuuaccaauguguacgccgauucuuucgucauuaggggugacgaagugcggcagaucgcacccgggcaaacaggaaaaaucgcugauuauaacuacaagcuaccggacgauuuuacuggcugcgucauugccuggaauagcaacaaccuggacucaaaagugggcgggaauuauaacuaccucuaucgucuguuccgcaagaguaaucuuaagccuuuugagagagauauauccaccgaaaucuaccaggcgggaagcacacccuguaacgguguugagggcuucaauugcuacuuuccacugcagucuuauggguuccaaccuaccaacggagugggcuaccagcccuauaggguagucguguugucauuugaacuccugcacgccccagcaacuguuugcggucccaaaaagaguacgaauuuagugaaaaacaagugugucaauuucaacuuuaaugggcugacaggcaccggagugcuaacugagagcaacaaaaaguuccucccuuuccagcaguuuggccgggacauugcugauaccacagacgccguacgagauccacaaacccuggagauccuugacauaacuccgugcuccuucgggggagugucuguuauuacacccgguacgaauaccucgaaccaggucgcuguguuguaccagggcgugaauuguacugaagucccuguugccauccacgcagaccagcugacaccaaccuggcgcguguauagcacaggguccaacguguuucaaacuagagccggaugccucaucggcgcugagcauguaaacaauucauacgaaugugauauucccaucggugcggggauuugcgcaaguuaucagacccagacgaacucuccuaggcgggcccgcagcgucgcuucccagucaauaaucgccuacaccaugagccugggcgcagaaaauucuguggccuacuccaacaauaguauugcuaucccaacaaacuucacuaucagcguuaccacagaaauucuucccgugucuaugacuaagaccuccgucgacuguacgauguauauaugcggagauucaacagaguguaguaaucuguugcuccaauacggcagcuuuugcacccagcugaacagagccuuaacugggaucgcaguggagcaggacaaaaauacacaggaaguuuucgcgcaagugaagcagauuuauaaaaccccgccuaucaaggauuuuggagguuucaacuuuucgcagauucugccagaccccuccaaaccuucuaagaggagcuucaucgaggaucuacucuuuaauaagguaacucuggcugacgccggcuucauaaaacaauacggggauugucuuggagacaucgcagcccgugauuugauuugcgcucagaaguucaacggccugaccguccugcccccacucuuaacagacgaaaugaucgcccaguauacgucagcacugcuugcugguaccauuacgaguggguggacauuuggcgccggagcggccuugcagaucccuuucgcuaugcaaauggcauaccgguuuaauggcauaggggugacccagaacgugcucuaugagaaucagaaacugauugccaaccaguucaacuccgcuaucggaaagauucaagauucucuaagcuccacagccucagcacugggcaaacuccaggacgucguuaaucagaacgcgcaggcccugaauacucuugugaagcaauugagcaguaacuuuggugcuaucucuuccguacugaaugacauauuaagccgacucgauaagguggaagccgagguccagaucgacagacugauuaccgggaggcuucagucgcugcaaacguacgugacacagcaguugauccgcgcagcugagauucgggccucagcaaaccucgccgcuaccaaaaugucugaaugcguucugggacagaguaagagaguggauuucuguggcaaagguuaccaccuaauguccuuuccccaaagcgcgccacauggcgucguguuccugcacguuacuuaugugccggcccaggagaagaauuuuaccacagcuccugcaaucugccacgacgggaaagcccauuuccccagggaaggagucuuuguaucuaacggcacucacugguucgugacccagcgcaauuuuuacgagccacagauaauuacaacggauaacaccuucguuagcgggaauugugacguggucaucggaaucgugaacaauacuguauaugauccccuccaaccugagcuggacuccuucaaggaagaacuugauaaauacuuuaagaaccauacaucaccagacguggauuugggcgacauuagugguaucaaugccagcgucguuaacauucagaaggaaauagaucgacugaaugagguggcuaaaaacuuaaacgaaucucucaucgaccugcaggagcuugggaaguaugagcaguacauuaaauggcccugguauaucuggcugggauucauugcaggccuaaucgccauagugaucgucaccauuaugcucugcuguaugacuuccugcuguucaugccugaaggguuguugcaguuguggcagcugcugcaaauuugacgaagaugacuccgagccuguguugaaggggguuaagcugcacuacacauga

SEQ ID NO: 12021 - RNA, 3822 nt, Artificial Sequence
  SARS-CoV-2/Iceland/238/2020__EPI_ISL_417566 spike protein CDS human (1-1273)
auguucguguuucugguccuccuuccccugguuagcucccagugcgugaacuugaccacaagaacucaauuaccuccagccuacacuaauucuuucaccaggggcguauauuacccggacaagguguuucggucaaguguccugcacagcacacaggaucuauuccuccccuuuuucuccaacgugacuugguuucaugcuauccacguuucugggaccaauggaacaaaacgcuucgacaacccugugcugccauuuaaugauggugucuauuucgcaucgaccgagaagucaaacauuauacgaggcuggaucuuugggacuacacuugacagcaaaacccagagucuguugauugugaauaacgccacgaauguaguuaucaaggugugugaguuccaguuuugcaacgaucccuuccucggagucuacuaucauaaaaauaacaaguccuggauggagucugaguuccguguguacagcuccgcgaauaacuguacuuuugaguaugugucacaaccuuuccugauggaccuggaaggcaagcaggguaauuuuaaaaaccucagagaguucgucuuuaagaacauugauggguacuucaaaaucuacaguaagcacaccccaauaaauuuaguuagggaccugccccagggauuuagcgcucuugagccuuugguggaucugccaaucggcauuaacaucacacgguuccagacucuacucgcccugcaucgcucuuaucuuaccccgggcgacuccucaagcggguggacagcaggagccgcugcauacuauguagguuaccugcaacccagaaccuuuuugcucaaauauaaugaaaacggcacgauuacugaugccguggacugcgcucuggauccuuuaagugagacaaaguguacccugaagucuuucacugucgaaaaagggaucuaccagacauccaauuuuagggugcagccaaccgagagcauaguucgguuccccaacauuacgaaucucugcccuuuuggagagguguucaacgccacccgcuucgcgucggucuaugcauggaaucgaaagagaaucucuaacuguguggccgacuacuccguacuuuacaauucagcuaguuuuagcacauucaaaugcuauggcguuuccccaacuaagcugaacgacuuguguuuuaccaauguguacgccgauucuuucgucauuaggggugacgaagugcggcagaucgcacccgggcaaacaggaaaaaucgcugauuauaacuacaagcuaccggacgauuuuacuggcugcgucauugccuggaauagcaacaaccuggacucaaaagugggcgggaauuauaacuaccucuaucgucuguuccgcaagaguaaucuuaagccuuuugagagagauauauccaccgaaaucuaccaggcgggaagcacacccuguaacgguguugagggcuucaauugcuacuuuccacugcagucuuauggguuccaaccuaccaacggagugggcuaccagcccuauaggguagucguguugucauuugaacuccugcacgccccagcaacuguuugcggucccaaaaagaguacgaauuuagugaaaaacaagugugucaauuucaacuuuaaugggcugacaggcaccggagugcuaacugagagcaacaaaaaguuccucccuuuccagcaguuuggccgggacauugcugauaccacagacgccguacgagauccacaaacccuggagauccuugacauaacuccgugcuccuucgggggagugucuguuauuacacccgguacgaauaccucgaaccaggucgcuguguuguaccagggcgugaauuguacugaagucccuguugccauccacgcagaccagcugacaccaaccuggcgcguguauagcacaggguccaacguguuucaaacuagagccggaugccucaucggcgcugagcauguaaacaauucauacgaaugugauauucccaucggugcggggauuugcgcaaguuaucagacccagacgaacucuccuaggcgggcccgcagcgucgcuucccagucaauaaucgccuacaccaugagccugggcgcagaaaauucuguggccuacuccaacaauaguauugcuaucccaacaaacuucacuaucagcguuaccacagaaauucuucccgugucuaugacuaagaccuccgucgacuguacgauguauauaugcggagauucaacagaguguaguaaucuguugcuccaauacggcagcuuuugcacccagcugaacagagccuuaacugggaucgcaguggagcaggacaaaaauacacaggaaguuuucgcgcaagugaagcagauuuauaaaaccccgccuaucaaggauuuuggagguuucaacuuuucgcagauucugccagaccccuccaaaccuucuaagaggagcuucaucgaggaucuacucuuuaauaagguaacucuggcugacgucggcuucauaaaacaauacggggauugucuuggagacaucgccgcacgugauuugauuugcgcccagaaguucaacggccugaccgugcugcccccacucuuaacagacgaaaugaucgcucaguauacgucagcccugcuugcagguaccauuacgaguggguggacauuuggcgcuggagccgcguugcagaucccuuucgccaugcaaauggcuuaccgguuuaauggcauaggggugacccagaacguccucuaugagaaucagaaacugauugcaaaccaguucaacuccgccaucggaaagauucaagauucucuaagcuccacagcuucagcccugggcaaacuccaggacguugugaaucagaacgcacaggcgcugaauacucuuguaaagcaauugagcaguaacuuuggugccaucucuuccgugcugaaugacauauuaagccgacucgauaaggucgaagcugaggugcagaucgacagacugauuaccgggaggcuucagucgcugcaaacguacguuacacagcaguugauccgcgccgcagagauucgggcuucagccaaccucgcagccaccaaaaugucugaaugcgugcugggacagaguaagagagucgauuucuguggcaaagguuaccaccuaauguccuuuccccaaagcgcuccacauggcgugguuuuccugcacgugacuuaugucccggcgcaggagaagaauuuuaccacagccccugcaaucugccacgacgggaaagcucauuuccccagggaaggaguauuugugucuaacggcacucacugguucguuacccagcgcaauuuuuacgagccacagauaauuacaacggauaacaccuucgugagcgggaauugugacgucgugaucggaaucguaaacaauacuguguaugauccccuccaaccugagcuggacuccuucaaggaagaacuugauaaauacuuuaagaaccauacaucaccagacgucgauuugggcgacauuagugguaucaaugccagcguugugaacauucagaaggaaauagaucgacugaaugagguggccaaaaacuuaaacgaaucucucaucgaccugcaggagcuugggaaguaugagcaguacauuaaauggcccugguauaucuggcugggauucauugcuggccuaaucgcaauagucauggugaccaucaugcucugcuguaugacuuccugcuguucaugccugaaggguuguugcaguuguggcagcugcugcaaauuugacgaagaugacuccgagccuguuuugaaggggguaaagcugcacuacacauga

SEQ ID NO: 12022 - RNA, 3822 nt, Artificial Sequence
  SARS-CoV-2/Greece/16/2020__EPI_ISL_418265 spike protein CDS human (1-1273)
auguucguguuucugguccuccuuccccugguuagcucccagugcgugaacuugaccacaagaacucaauuaccuccagccuacacuaauucuuucaccaggggcguauauuacccggacaagguguuucggucaaguguccugcacagcacacaggaucuauuccuccccuuuuucuccaacgugacuugguuucaugcuauccacguuucugggaccaauggaacaaaacgcuucgacaacccugugcugccauuuaaugauggugucuauuucgcaucgaccgagaagucaaacauuauacgaggcuggaucuuugggacuacacuugacagcaaaacccagagucuguugauugugaauaacgccacgaauguaguuaucaaggugugugaguuccaguuuugcaacgaucccuuccucggagucuacuaucauaaaaauaacaaguccuggauggagucugaguuccguguguacagcuccgcgaauaacuguacuuuugaauaugugucacaaccuuuccugauggaccuggaaggcaagcaggguaauuuuaaaaaccucagagaguucgucuuuaagaacguugauggguacuucaaaauuuacaguaagcacaccccaaucaauuuagugagggaccugccccagggauuuagcgcucuugagccuuugguagaucugccaauaggcaucaacauuacacgguuccagacucuacucgcccugcaucgcucuuaucuuaccccgggcgacuccucaagcggguggacagcaggagccgcugcauacuauguggguuaccugcaacccagaaccuuuuugcucaaauauaaugaaaacggcacgaucacugaugccgucgacugcgcucuggauccuuuaagugagacaaaguguacccugaagucuuucacuguggaaaaagggauuuaccagacauccaauuuuaggguucagccaaccgagagcaucgugcgguuccccaacauaacgaaucucugcccuuuuggagaggucuucaacgccacccgcuucgcgucgguguaugcauggaaucgaaagagaauuucuaacuguguagccgacuacuccguucuuuacaauucagcuaguuuuagcacauucaaaugcuauggcguguccccaacuaagcugaacgacuuguguuuuaccaaugucuacgccgauucuuucgugaucaggggugacgaaguccggcagauugcacccgggcaaacaggaaaaaucgcugauuauaacuacaagcuaccggacgauuuuacuggcugcgugaucgccuggaauagcaacaaccuggacucaaaaguuggcgggaauuauaacuaccucuaucgucuguuccgcaagaguaaucuuaagccuuuugagagagauauuuccaccgaaauauaccaggcgggaagcacacccuguaacgguguggagggcuucaauugcuacuuuccacugcagucuuauggguuccaaccuaccaacggaguaggcuaccagcccuauagggucgugguuuugucauuugaacuccugcacgccccagcaacugugugcggucccaaaaagaguacgaauuuagucaaaaacaagugugugaauuucaacuuuaaugggcugacaggcaccggaguacuaacugagagcaacaaaaaguuccucccuuuccagcaguuuggccgggacaucgcugauaccacagacgccgugcgagauccacaaacccuggagauucuugacaucacuccgugcuccuucgggggaguuucugucauaacacccgguacgaauaccucgaaccagguggcuguguuguaccaggacgucaauuguacugaaguuccuguggccauucacgcagaucagcugacaccaaccuggcgcguguauagcacaggcuccaacguauuucaaacuagagccgggugccucaucggagcugagcaugucaacaauucauacgaaugugacauccccauuggcgcggguaucugcgcaaguuaucagacccagacgaacucuccuaggcgggcccgcagcguggcuucccagucaauuauagccuacaccaugagccugggggcagaaaauucuguugccuacuccaacaauaguaucgcuauuccaacaaacuucacuaucagcgugaccacagaaauccuucccgucucuaugacuaagaccuccguggauuguacgauguauauuugcggcgacucaacagaguguaguaaucuguugcuccaauacggcagcuuuugcacccagcugaacagagccuuaacuggaauagcaguugagcaggauaaaaauacacaggaaguguucgcgcaaguaaagcagaucuauaaaaccccgccuauuaaggacuuugggggauucaacuuuucgcagauccugccagaucccuccaaaccuucuaagaggagcuucauugaggaccuacucuuuaauaaggucacucuggcugaugccgguuucaucaaacaauacggcgacugucuuggggauauagcagcccgugacuugaucugcgcucagaaguucaacggacugaccgugcugcccccacucuuaacagaugaaaugauugcccaguauacgucagcacugcuugcuggcaccaucacgagugguuggacauuuggggccggcgcggccuugcagauuccuuucgcuaugcaaauggcauaccgguuuaauggaaucggcgugacccagaacguccucuaugagaaucagaaacugauagccaaccaguucaacuccgcuauugggaagauccaagacucucuaagcuccacagccucagcacugggaaaacuccaggacguugugaaucagaacgcgcaggcccugaauacucuuguaaagcaauugagcaguaacuuuggcgcuauuucuuccgugcugaaugauaucuuaagccgacucgacaaggucgaagccgaggugcagauagauagacugaucaccgguaggcuucagucgcugcaaacguacguuacacagcaguugauucgcgcagcugagauccgggccucagcaaaccucgccgcuaccaaaaugucugaaugcgugcuggggcagaguaagagagucgacuucuguggaaaaggcuaccaccuaauguccuuuccccaaagcgcgccacauggugugguuuuccugcacgugacuuaugucccggcccaggagaagaauuuuaccacagcuccugcaauuugccacgauggcaaagcccauuuccccagggaagggguauuugugucuaacggaacucacugguucguuacccagcgcaauuuuuacgagccacagaucauaacaacggacaacaccuucgugagcggcaauugugaugucgugauugggaucguaaacaauacuguguaugacccccuccaaccugagcuggauuccuucaaggaggaacuugacaaauacuuuaagaaccauacaucaccagaugucgacuugggagauaucaguggcauuaaugccagcguugugaacauccagaaggaaauugaccgacugaaugagguggcuaaaaacuuaaacgaaucucucauagaccugcaggagcuugguaaguaugagcaguacaucaaauggcccugguauauuuggcugggguucaucgcaggacuaauugccaucgucauggugaccauaaugcucugcuguaugacuuccugcuguucaugccugaagggcuguugcaguugugguagcugcugcaaauuugaugaagacgauuccgagccuguuuugaagggcguaaagcugcacuacacauga

SEQ ID NO: 12023 - RNA, 3822 nt, Artificial Sequence
  SARS-CoV-2/Iceland/319/2020__EPI_ISL_417648 spike protein CDS human (1-1273)
auguucguguuucugguccuccuuccccugguuagcucccagugcgugaacuugaccacaagaacucaauuaccuccagccuacacuaauucuuucaccaggggcguauauuacccggacaagguguuucggucaaguguccugcacagcacacaggaucuauuccuccccuuuuucuccaacgugacuugguuucaugcuauccacguuucugggaccaauggaacaaaacgcuucgacaacccugugcugccauuuaaugauggugucuauuucgcaucgaccgagaagucaaacauuauacgaggcuggaucuuugggacuacacuugacagcaaaacccagagucuguugauugugaauaacgccacgaauguaguuaucaaggugugugaguuccaguuuugcaacgaucccuuccucggagucuacuaucauaaaaauaacaaguccuggauggagucugaguuccguguguacagcuccgcgaauaacuguacuuuugaguaugugucacaaccuuuccugauugaccuggaaggcaagcaggguaauuuuaaaaaccucagagaguucgucuuuaagaacaucgauggguacuucaaaauauacaguaagcacaccccaaucaauuuaguuagggaccugccccagggauuuagcgcucuugagccuuugguggaucugccaauuggcaucaacauuacacgguuccagacucuacucgcccugcaucgcucuuaucuuaccccgggcgacuccucaagcggguggacagcaggagccgcugcauacuauguagguuaccugcaacccagaaccuuuuugcucaaauauaaugaaaacggcacgaucacugaugccguggacugcgcucuggauccuuuaagugagacaaaguguacccugaagucuuucacugucgaaaaagggauauaccagacauccaauuuuagggugcagccaaccgagagcauuguucgguuccccaacaucacgaaucucugcccuuuuggagagguguucaacgccacccgcuucgcgucggucuaugcauggaaucgaaagagaauuucuaacuguguggccgacuacuccguacuuuacaauucagcuaguuuuagcacauucaaaugcuauggcguuuccccaacuaagcugaacgacuuguguuuuaccaauguguacgccgauucuuucgucaucaggggugacgaagugcggcagaucgcacccgggcaaacaggaaaaauugcugauuauaacuacaagcuaccggacgauuuuacuggcugcgucauagccuggaauagcaacaaccuggacucaaaagugggcgggaauuauaacuaccucuaucgucuguuccgcaagaguaaucuuaagccuuuugagagagauaucuccaccgaaauuuaccaggcgggaagcacacccuguaacgguguugagggcuucaauugcuacuuuccacugcagucuuauggguuccaaccuaccaacggagugggcuaccagcccuauaggguagucguguugucauuugaacuccugcacgccccagcaacuguuugcggucccaaaaagaguacgaauuuagugaaaaacaagugugucaauuucaacuuuaaugggcugacaggcaccggagugcuaacugagagcaacaaaaaguuccucccuuuccagcaguuuggccgggacaucgcugauaccacagacgccguacgagauccacaaacccuggagauacuugacauuacuccgugcuccuucgggggagugucuguuaucacacccgguacgaauaccucgaaccaggucgcuguguuguaccagggcgugaauuguacugaagucccuguugccauccacgcagaccagcugacaccaaccuggcgcguguauagcacaggguccaacguguuucaaacuagagccggaugccucauuggcgcugagcauguaaacaauucauacgaaugugauauccccauuggugcggggauaugcgcaaguuaucagacccagacgaacucuccuaggcgggcccgcagcgucgcuucccagucaaucauugccuacaccaugagccugggcgcagaaaauucuguggccuacuccaacaauaguaucgcuaucccaacaaacuucacuauuagcguuaccacagaaauacuucccgugucuaugacuaagaccuccgucgacuguacgauguauaucugcggagauucaacagaguguaguaaucuguugcuccaauacggcagcuuuugcacccagcugaacagagccuuaacugggauugcaguggagcaggacaaaaauacacaggaaguuuucgcgcaagugaagcagaucuauaaaaccccgccuauuaaggauuuuggagguuucaacuuuucgcagauccugccagaccccuccaaaccuucuaagaggagcuucauagaggaucuacucuuuaauaagguaacucuggcugacgccggcuucaucaaacaauacggggauugucuuggagacauugcagcccgugauuugaucugcgcucagaaguucaacggccugaccguccugcccccacucuuaacagacgaaaugauugcccaguauacgucagcacugcuugcugguaccaucacgaguggguggacauuuggcgccggagcggccuugcagauaccuuucgcuaugcaaauggcauaccgguuuaauggcauuggggugacccagaacgugcucuaugagaaucagaaacugaucgccaaccaguucaacuccgcuauuggaaagauccaagauucucuaagcuccacagccucagcacugggcaaacuccaggacgucguuaaucagaacgcgcaggcccugaauacucuugugaagcaauugagcaguaacuuuggugcuauaucuuccguacugaaugacaucuuaagccgacucgauaagguggaagccgagguccagauugacagacugaucaccgggaggcuucagucgcugcaaacguacgugacacagcaguugauucgcgcagcugagauccgggccucagcaaaccucgccgcuaccaaaaugucugaaugcguucugggacagaguaagagaguggauuucuguggcaaagguuaccaccuaauguccuuuccccaaagcgcgccacauggcgucguguuccugcacguuacuuaugugccggcccaggagaagaauuuuaccacagcuccugcaauaugccacgacgggaaagcccauuuccccagggaaggagucuuuguaucuaacggcacucacugguucgugacccagcgcaauuuuuacgagccacagauuaucacaacggauaacaccuucguuagcgggaauugugacguggucaucggaauugugaacaauacuguauaugauccccuccaaccugagcuggacuccuucaaggaagaacuugauaaauacuuuaagaaccauacaucaccagacguggauuugggcgacaucagugguauuaaugccagcgucguuaacauacagaaggaaaucgaucgacugaaugagguggcuaaaaacuuaaacgaaucucucauugaccugcaggagcuugggaaguaugagcaguacaucaaauggcccugguauauuuggcugggauucaucgcaggccuaauagccaucgugauggucaccauuaugcucugcuguaugacuuccugcuguucaugccugaaggguuguugcaguuguggcagcugcugcaaauuugacgaagaugacuccgagccuguguugaaggggguuaagcugcacuacacauga

SEQ ID NO: 12024 - RNA, 3822 nt, Artificial Sequence
  SARS-CoV-2/Congo/94/2020__EPI_ISL_417947 spike protein CDS human (1-1273)
auguucguguuucugguccuccuuccccugguuagcucccagugcgugaacuugaccacaagaacucaauuaccuccagccuacacuaauucuuucaccaggggcguauauuacccggacaagguguuucggucaaguguccugcacagcacacaggaucuauuccuccccuuuuucuccaacgugacuugguuucaugcuauccacguuucugggaccaauggaacaaaacgcuucgacaacccugugcugccauuuaaugauggugucuauuucgcaucgaccgagaagucaaacauuauacgaggcuggaucuuugggacuacacuugacagcaaaacccagagucuguugauugugaauaacgccacgaauguaguuaucaaggugugugaguuccaguuuugcaacgaucccuuccucggagucuacuaucauaaaaauaacaaguccuggauggagucugaguuccguguguacagcuccgcgaauaacuguacuuuugaguaugugucacaaccuuuccugauggaccuggaaggcaagcaggguaauuuuaaaaaccucagagaguucgucuuuaagaacauugauggguacuucaaaaucuacaguaagcacaccccaauaaauuuaguuagggaccugccccagggauuuagcgcucuugagccuuugguggaucugccaaucggcauuaacaucacacgguuccagacucuacucgcccugcaucgcucuuaucuuaccccgggcgacuccucaagcggguggacagcaggagccgcugcauacuauguagguuaccugcaacccagaaccuuuuugcucaaauauaaugaaaacggcacgauuacugaugccguggacugcgcucuggauccuuuaagugagacaaaguguacccugaagucuuucacugucgaaaaagggaucuaccagacauccaauuuuagggugcagccaaccgagagcauaguucgguuccccaacauuacgaaucucugcccuuuuggagagguguucaacgccacccgcuucgcgucggucuaugcauggaaucgaaagagaaucucuaacuguguggccgacuacuccguacuuuacaauucagcuaguuuuagcacauucaaaugcuauggcguuuccccaacuaagcugaacgacuuguguuuuaccaauguguacgccgauucuuucgucauuaggggugacgaagugcggcagaucgcacccgggcaaacaggaaaaaucgcugauuauaacuacaagcuaccggacgauuuuacuggcugcgucauugccuggaauagcaacaaccuggacucaaaagugggcgggaauuauaacuaccucuaucgucuguuccgcaagaguaaucuuaagccuuuugagagagauauauccaccgaaaucuaccaggcgggaagcacacccuguaacgguguugagggcuucaauugcuacuuuccacugcagucuuauggguuccaaccuaccaacggagugggcuaccagcccuauaggguagucguguugucauuugaacuccugcacgccccagcaacuguuugcggucccaaaaagaguacgaauuuagugaaaaacaagugugucaauuucaacuuuaaugggcugacaggcaccggagugcuaacugagagcaacaaaaaguuccucccuuuccagcaguuuggccgggacauugcugauaccacagacgccguacgagauccacaaacccuggagauccuugacauaacuccgugcuccuucgggggagugucuguuauuacacccgguacgaauaccucgaaccaggucgcuguguuguaccagggcgugaauuguacugaagucccuguugccauccacgcagaccagcugacaccaaccuggcgcguguauagcacaggguccaacguguuucaaacuagagccggaugccucaucggcgcugagcauguaaacaauucauacgaaugugauauucccaucggugcggggauuugcgcaaguuaucagacccagacgaacucuccuaggcgggcccgcagcgucgcuucccagucaauaaucgccuacaccaugagccugggcgcagaaaauucuguggccuacuccaacaauaguauugcuaucccaacaaacuucacuaucagcguuaccacagaaauucuucccgugucuaugacuaagaccuccgucgacuguacgauguauauaugcggagauucaacagaguguaguaaucuguugcuccaauacggcagcuuuugcacccagcugaacagagccuuaacugggaucgcaguggagcaggacaaaaauacacaggaaguuuucgcgcaagugaagcagauuuauaaaaccccgccuaucaaggauuuuggagguuucaacuuuucgcagauucugccagaccccuccaaaccuucuaagaggagcuucaucgaggauauacuauuuaauaagguaacucucgcugacgccggcuucaucaaacaauacggggauugucugggagacauugcagcccgugaucuuaucugcgcucagaaguucaacggcuugaccguccugcccccacuccugacagacgaaaugauugcccaguauacgucagcauuacuggcugguaccaucacgaguggguggacauuuggcgccggagcggcccuucagauaccuuucgcuaugcaaauggcauaccgguuuaauggcauuggggugacccagaacguguuguaugagaaucagaaacucaucgccaaccaguucaacuccgcuauuggaaagauccaagauucucugagcuccacagccucagcacuaggcaaacugcaggacgucguuaaucagaacgcgcaggcccucaauacucuggugaagcaacuuagcaguaacuuuggugcuauaucuuccguauugaaugacauccugagccgauuagauaagguggaagccgagguccagauugacagacucaucaccgggaggcugcagucgcuucaaacguacgugacacagcagcugauucgcgcagcugagauccgggccucagcaaacuuggccgcuaccaaaaugucugaaugcguucucggacagaguaagagaguggauuucuguggcaaagguuaccaccugauguccuuuccccaaagcgcgccacauggcgucguguuccuacacguuacuuaugugccggcccaggagaagaauuuuaccacagcuccugcaauaugccacgacgggaaagcccauuuccccagggaaggagucuuuguaucuaacggcacucacugguucgugacccagcgcaauuuuuacgagccacagauuaucacaacggauaacaccuucguuagcgggaauugugacguggucaucggaauugugaacaauacuguauaugauccccugcaaccugagcucgacuccuucaaggaagaacuggauaaauacuuuaagaaccauacaucaccagacguggaucuuggcgacaucagugguauuaaugccagcgucguuaacauacagaaggaaaucgaucgauugaaugagguggcuaaaaaccugaacgaaucuuuaauugaccuccaggagcuggggaaguaugagcaguacaucaaauggcccugguauauuuggcuuggauucaucgcaggccugauagccaucgugauggucaccauuaugcuaugcuguaugacuuccugcuguucaugccucaaggguuguugcaguuguggcagcugcugcaaauuugacgaagaugacuccgagccugugcugaaggggguuaaguugcacuacacauga

SEQ ID NO: 12025 - RNA, 3822 nt, Artificial Sequence
  SARS-CoV-2/Congo/158/2020__EPI_ISL_417950 spike protein CDS human (1-1273)
auguucguguuucugguccuccuuccccugguuagcucccagugcgugaacuugaccacaagaacucaauuaccuccagccuacacuaauucuuucaccaggggcguauauuacccggacaagguguuucggucaaguguccugcacagcacacaggaucuauuccuccccuuuuucuccaacgugacuugguuucaugcuauccacguuucugggaccaauggaacaaaacgcuucgacaacccugugcugccauuuaaugauggugucuauuucgcaucgaccgagaagucaaacauuauacgaggcuggaucuuugggacuacacuugacagcaaaacccagagucuguugauugugaauaacgccacgaauguaguuaucaaggugugugaguuccaguuuugcaacgaucccuuccucggagucuacuaucauaaaaauaacaaguccuggauggagucugaguuccguguguacagcuccgcgaauaacuguacuuuugaauaugugucacaaccuuuccugauggaccuggaaggcaagcaggguaauuuuaaaaaccucagagaguucgucuuuaagaacauugauggguacuucaaaaucuacaguaagcacaccccaauaaauuuaguuagggaccugccccagggauuuagcgcucuugagccuuugguggaucugccaaucggcauuaacaucacacgguuccagacucuacucgcccugcaucgcucuuaucuuaccccgggcgacuccucaagcggguggacagcaggagccgcugcauacuauguagguuaccugcaacccagaaccuuuuugcucaaauauaaugaaaacggcacgauuacugaugccguggacugcgcucuggauccuuuaagugagacaaaguguacccugaagucuuucacugucgaaaaagggaucuaccagacauccaauuuuagggugcagccaaccgagagcauaguucgguuccccaacauuacgaaucucugcccuuuuggagagguguucaacgccacccgcuucgcgucggucuaugcauggaaucgaaagagaaucucuaacuguguggccgacuacuccguacuuuacaauucagcuaguuuuagcacauucaaaugcuauggcguuuccccaacuaagcugaacgacuuguguuuuaccaauguguacgccgauucuuucgucauuaggggugacgaagugcggcagaucgcacccgggcaaacaggaaaaaucgcugauuauaacuacaagcuaccggacgauuuuacuggcugcgucauugccuggaauagcaacaaccuggacucaaaagugggcgggaauuauaacuaccucuaucgucuguuccgcaagaguaaucuuaagccuuuugagagagauauauccaccgaaaucuaccaggcgggaagcacacccuguaacgguguugagggcuucaauugcuacuuuccacugcagucuuauggguuccaaccuaccaacggagugggcuaccagcccuauaggguagucguguugucauuugaacuccugcacgccccagcaacuguuugcggucccaaaaagaguacgaauuuagugaaaaacaagugugucaauuucaacuuuaaugggcugacaggcaccggagugcuaacugagagcaacaaaaaguuccucccuuuccagcaguuuggccgggacauugcugauaccacagacgccguacgagauccacaaacccuggagauccuugacauaacuccgugcuccuucgggggagugucuguuauuacacccgguacgaauaccucgaaccaggucgcuguguuguaccaggacgugaauuguacugaagucccuguugccauccacgcagaucagcugacaccaaccuggcgcguguauagcacaggcuccaacguguuucaaacuagagccgggugccucaucggagcugagcauguaaacaauucauacgaaugugacauucccaucggcgcggguauuugcgcaaguuaucagacccagacgaacucuccuaggcgggcccgcagcgucgcuucccagucaauaaucgccuacaccaugagccugggggcagaaaauucuguggccuacuccaacaauaguauugcuaucccaacaaacuucacuaucagcguuaccacagaaauucuucccgugucuaugacuaagaccuccgucgauuguacgauguauauaugcggcgacucaacagaguguaguaaucuguugcuccaauacggcagcuuuugcacccagcugaacagagccuuaacuggaaucgcaguggagcaggauaaaaauacacaggaaguuuucgcgcaagugaagcagauuuauaaaaccccgccuaucaaggacuuugggggauucaacuuuucgcagauucugccagaucccuccaaaccuucuaagaggagcuucaucgaggaccuacucuuuaauaagguaacucuggcugaugccgguuucauaaaacaauacggcgacugucuuggggauaucgcagcccgugacuugauuugcgcucagaaguucaacggacugaccguccugcccccacucuuaacagaugaaaugaucgcccaguauacgucagcacugcuugcuggcaccauuacgagugguuggacauuuggggccggcgcggccuugcagaucccuuucgcuaugcaaauggcauaccgguuuaauggaauaggcgugacccagaacgugcucuaugagaaucagaaacugauugccaaccaguucaacuccgcuaucgggaagauucaagacucucuaagcuccacagccucagcacugggaaaacuccaggacgucguuaaucagaacgcgcaggcccugaauacucuugugaagcaauugagcaguaacuuuggcgcuaucucuuccguacugaaugauauauuaagccgacucgacaagguggaagccgagguccagaucgauagacugauuaccgguaggcuucagucgcugcaaacguacgugacacagcaguugauccgcgcagcugagauucgggccucagcaaaccucgccgcuaccaaaaugucugaaugcguucuggggcagaguaagagaguggacuucuguggaaaaggcuaccaccuaauguccuuuccccaaagcgcgccacauggugucguguuccugcacguuacuuaugugccggcccaggagaagaauuuuaccacagcuccugcaaucugccacgauggcaaagcccauuuccccagggaaggggucuuuguaucuaacggaacucacugguucgugacccagcgcaauuuuuacgagccacagauaauuacaacggacaacaccuuccucagcggcaauugugauguugugaucgggaucgucaacaauacuguguaugacccccugcaaccugagcuugauuccuucaaggaagaguuggacaaauacuuuaagaaccauacaucaccagauguagaccugggagauauuaguggcaucaaugccagcguggucaacauucagaaggaaauagaccgauuaaaugagguugcuaaaaaccucaacgaaucucugaucgaccuucaggagcuggguaaguaugagcaguacauuaaauggcccugguauaucuggcuaggguucauugcaggacucaucgccauagugauggugaccaucaugcugugcuguaugacuuccugcuguucaugcuugaagggcuguugcaguugugguagcugcugcaaauuugaugaagacgauuccgagccuguccugaagggcgugaaguuacacuacacauga

SEQ ID NO: 12026 - RNA, 3822 nt, Artificial Sequence
  SARS-CoV-2/USA/UT-00034/2020__EPI_ISL_417977 spike protein CDS human (1-1273)
auguucguguuucugguccuccuuccccugguuagcucccagugcgugaacuugaccacaagaacucaauuaccuccagccuacacuaauucuuucaccaggggcguauauuacccggacaagguguuucggucaaguguccugcacagcacacaggaucuauuccuccccuuuuucuccaacgugacuugguuucaugcuauccacguuucugggaccaauggaacaaaacgcuucgacaacccugugcugccauuuaaugauggugucuauuucgcaucgaccgagaagucaaacauuauacgaggcuggaucuuugggacuacacuugacagcaaaacccagagucuguugauugugaauaacgccacgaauguaguuaucaaggugugugaguuccaguuuugcaacgaucccuuccucggagucuacuauuacaaaaauaacaaguccuggauggagucugaguuccguguguauagcuccgcgaauaacuguacuuuugaguacgugucacaaccuuuccugauggaccuggaaggcaagcaggguaauuuuaaaaaccucagagaguucgucuuuaagaacauugauggguacuucaaaaucuauaguaagcauaccccaauaaauuuaguuagggaccugccccagggauuuagcgcucuugagccuuugguggaucugccaaucggcauuaacaucacacgguuccagacucuacucgcccugcaccgcucuuaccuuaccccgggcgacuccucaagcggguggacagcaggagccgcugcauauuacguagguuaucugcaacccagaaccuuuuugcucaaauacaaugaaaacggcacgauuacugaugccguggacugcgcucuggauccuuuaagugagacaaaguguacccugaagucuuucacugucgaaaaagggaucuaucagacauccaauuuuagggugcagccaaccgagagcauaguucgguuccccaacauuacgaaucucugcccuuuuggagagguguucaacgccacccgcuucgcgucggucuacgcauggaaucgaaagagaaucucuaacuguguggccgacuacuccguacuuuauaauucagcuaguuuuagcacauucaaaugcuacggcguuuccccaacuaagcugaacgacuuguguuuuaccaauguguaugccgauucuuucgucauuaggggugacgaagugcggcagaucgcacccgggcaaacaggaaaaaucgcugauuacaacuauaagcuaccggacgauuuuacuggcugcgucauugccuggaauagcaacaaccuggacucaaaagugggcgggaauuacaacuaucucuaccgucuguuccgcaagaguaaucuuaagccuuuugagagagauauauccaccgaaaucuaccaggcgggaagcacacccuguaacgguguugagggcuucaauugcuauuuuccacugcagucuuacggguuccaaccuaccaacggagugggcuaucagcccuacaggguagucguguugucauuugaacuccugcaugccccagcaacuguuugcggucccaaaaagaguacgaauuuagugaaaaacaagugugucaauuucaacuuuaaugggcugacaggcaccggagugcuaacugagagcaacaaaaaguuccucccuuuccagcaguuuggccgggacauugcugauaccacagacgccguacgagauccacaaacccuggagauccuugacauaacuccgugcuccuucgggggagugucuguuauuacacccgguacgaauaccucgaaccaggucgcuguguuguaucagggcgugaauuguacugaagucccuguugccauccacgcagaccagcugacaccaaccuggcgcguguacagcacaggguccaacguguuucaaacuagagccggaugccucaucggcgcugagcacguaaacaauucauaugaaugugauauucccaucggugcggggauuugcgcaaguuaccagacccagacgaacucuccuaggcgggcccgcagcgucgcuucccagucaauaaucgccuacaccaugagccugggcgcagaaaauucuguggccuauuccaacaauaguauugcuaucccaacaaacuucacuaucagcguuaccacagaaauucuucccgugucuaugacuaagaccuccgucgacuguacgauguacauaugcggagauucaacagaguguaguaaucuguugcuccaauauggcagcuuuugcacccagcugaacagagccuuaacugggaucgcaguggagcaggacaaaaauacacaggaaguuuucgcgcaagugaagcagauuuacaaaaccccgccuaucaaggauuuuggagguuucaacuuuucgcagauucugccagaccccuccaaaccuucuaagaggagcuucaucgaggaucuacucuuuaauaagguaacucuggcugacgccggcuucauaaaacaauauggggauugucuuggagacaucgcagcccgugauuugauuugcgcucagaaguucaacggccugaccguccugcccccacucuuaacagacgaaaugaucgcccaguacacgucagcacugcuugcugguaccauuacgaguggguggacauuuggcgccggagcggccuugcagaucccuuucgcuaugcaaauggcauaucgguuuaauggcauaggggugacccagaacgugcucuacgagaaucagaaacugauugccaaccaguucaacuccgcuaucggaaagauucaagauucucuaagcuccacagccucagcacugggcaaacuccaggacgucguuaaucagaacgcgcaggcccugaauacucuugugaagcaauugagcaguaacuuuggugcuaucucuuccguacugaaugacauauuaagccgacucgauaagguggaagccgagguccagaucgacagacugauuaccgggaggcuucagucgcugcaaacguacgugacacagcaguugauccgcgcagcugagauucgggccucagcaaaccucgccgcuaccaaaaugucugaaugcguucugggacagaguaagagaguggauuucuguggcaaagguuaucaucuaauguccuuuccccaaagcgcgccacacggcgucguguuccugcauguuacuuacgugccggcccaggagaagaauuuuaccacagcuccugcaaucugccacgacgggaaagcccacuuccccagggaaggagucuuuguaucuaacggcacucauugguucgugacccagcgcaauuuuuaugagccacagauaauuacaacggauaacaccuucguuagcgggaauugugacguggucaucggaaucgugaacaauacuguauacgauccccuccaaccugagcuggacuccuucaaggaagaacuugauaaauauuuuaagaaccacacaucaccagacguggauuugggcgacauuagugguaucaaugccagcgucguuaacauucagaaggaaauagaucgacugaaugagguggcuaaaaacuuaaacgaaucucucaucgaccugcaggagcuugggaaguacgagcaguauauuaaauggcccugguacaucuggcugggauucauugcaggccuaaucgccauagugauggucaccaucaugcucugcuguaugacuuccugcuguucaugccugaaggguuguugcaguuguggcagcugcugcaaauuugacgaagaugacuccgagccuguguugaaggggguuaagcugcauuacacauga

SEQ ID NO: 12027 - RNA, 3822 nt, Artificial Sequence
  SARS-CoV-2/USA/UT-00033/2020__EPI_ISL_417976 spike protein CDS human (1-1273)
auguucguguuucugguccuccuuccccugguuagcucccagugcgugaacuugaccacaagaacucaauuaccuccagccuacacuaauucuuucaccaggggcguauauuacccggacaagguguuucggucaaguguccugcacagcacacaggaucuauuccuccccuuuuucuccaacgugacuugguuucaugcuauccacguuucugggaccaauggaacaaaacgcuucgacaacccugugcugccauuuaaugauggugucuauuucgcaucgaccgagaagucaaacauuauacgaggcuggaucuuugggacuacacuugacagcaaaacccagagucuguugauugugaauaacgccacgaauguaguuaucaaggugugugaguuccaguuuugcaacgaucccuuccucggagucuacuaucauaaaaauaacaaguccuggauggagucugaguuccguguguacagcuccgcgaauaacuguacuuuugaauaugugucacaaccuuuccugauggaccuggaaggcaagcaggguaauuuuaaaaaccucagagaguucgucuuuaagaacauugauggguacuucaaaaucuacaguaagcacaccccaauaaauuuaguuagggaccugccccagggauuuagcgcucuugagccuuugguggaucugccaaucggcauuaacaucacacgguuccagacucuacucgcccugcaucgcucuuaucuuaccccgggcgacuccucaagcgggcugacagcaggagccgcugcauacuauguagguuacuugcaacccagaaccuuucuccugaaauauaaugaaaacggcacgauuacugaugccguggacugcgcuuuagauccucugagugagacaaaguguacccucaagucuuucacugucgaaaaagggaucuaccagacauccaauuuuagggugcagccaaccgagagcauaguucgguuccccaacauuacgaaucuuugcccuuuuggagagguguucaacgccacccgcuucgcgucggucuaugcauggaaucgaaagagaaucucuaacuguguggccgacuacuccguacuguacaauucagcuaguuuuagcacauucaaaugcuauggcguuuccccaacuaaguugaacgaccuauguuuuaccaauguguacgccgauucuuucgucauuaggggugacgaagugcggcagaucgcacccgggcaaacaggaaaaaucgcugauuauaacuacaagcugccggacgauuuuacuggcugcgucauugccuggaauagcaacaaccucgacucaaaagugggcgggaauuauaacuaccuguaucgucuuuuccgcaagaguaaucugaagccuuuugagagagauauauccaccgaaaucuaccaggcgggaagcacacccuguaacgguguugagggcuucaauugcuacuuuccauugcagucuuauggguuccaaccuaccaacggagugggcuaccagcccuauaggguagucgugcucucauuugaacuguuacacgccccagcaacuguuugcggucccaaaaagaguacgaaucuggugaaaaacaagugugucaauuucaacuuuaaugggcuaacaggcaccggagugcucacugagagcaacaaaaaguuccugccuuuccagcaguuuggccgggacauugcugauaccacagacgccguacgagauccacaaacccuugagaucuuggacauaacuccgugcuccuucgggggagugucuguuauuacacccgguacgaauaccucgaaccaggucgcugugcuguaccagggcgugaauuguacugaagucccuguugccauccacgcagaccagcucacaccaaccuggcgcguguauagcacaggguccaacguguuucaaacuagagccggaugccugaucggcgcugagcauguaaacaauucauacgaaugugauauucccaucggugcggggauuugcgcaaguuaucagacccagacgaacucuccuaggcgggcccgcagcgucgcuucccagucaauaaucgccuacaccaugagccuuggcgcagaaaauucuguggccuacuccaacaauaguauugcuaucccaacaaacuucacuaucagcguuaccacagaaauucugcccgugucuaugacuaagaccuccgucgacuguacgauguauauaugcggagauucaacagaguguaguaauuugcuccugcaauacggcagcuuuugcacccaguuaaacagagcccugacugggaucgcaguggagcaggacaaaaauacacaggaaguuuucgcgcaagugaagcagauuuauaaaaccccgccuaucaaggauuuuggagguuucaacuuuucgcagauucuaccagaccccuccaaaccuucuaagaggagcuucaucgaggaucuccuguuuaauaagguaacucuugcugacgccggcuucauaaaacaauacggggauuguuugggagacaucgcagcccgugaucugauuugcgcucagaaguucaacggccucaccguccugcccccauuacugacagacgaaaugaucgcccaguauacgucagcacuuuuggcugguaccauuacgaguggguggacauuuggcgccggagcggcccuccagaucccuuucgcuaugcaaauggcauaccgguuuaauggcauaggggugacccagaacgugcuguaugagaaucagaaacuaauugccaaccaguucaacuccgcuaucggaaagauucaagauucucugagcuccacagccucagcacucggcaaacugcaggacgucguuaaucagaacgcgcaggcccuuaauacuuuggugaagcaacugagcaguaacuuuggugcuaucucuuccguauuaaaugacauacucagccgacuggauaagguggaagccgagguccagaucgacagacuuauuaccgggaggcugcagucguugcaaacguacgugacacagcagcucauccgcgcagcugagauucgggccucagcaaaccuggccgcuaccaaaaugucugaaugcguucuaggacagaguaagagaguggauuucuguggcaaagguuaccaccugauguccuuuccccaaagcgcgccacauggcgucguguuccuccacguuacuuaugugccggcccaggagaagaauuuuaccacagcuccugcaaucugccacgacgggaaagcccauuuccccagggaaggagucuuuguaucuaacggcacucacugguucgugacccagcgcaauuuuuacgagccacagauaauuacaacggauaacaccuucguuagcgggaauugugacguggucaucggaaucgugaacaauacuguauaugauccccugcaaccugagcuugacuccuucaaggaagaguuggauaaauacuuuaagaaccauacaucaccagacguggaucugggcgacauuagugguaucaaugccagcgucguuaacauucagaaggaaauagaucgauuaaaugagguggcuaaaaaccucaacgaaucucugaucgaccuucaggagcuggggaaguaugagcaguacauuaaauggcccugguauaucuggcuaggauucauugcaggccucaucgccauagugauggucaccaucaugcugugcuguaugacuuccugcuguucaugcuugaaggguuguugcaguuguggcagcugcugcaaauuugacgaagaugacuccgagccugugcugaaggggguuaaguuacacuacacauga

SEQ ID NO: 12028 - RNA, 3822 nt, Artificial Sequence
  SARS-CoV-2/USA/WI-13/2020__EPI_ISL_417516 spike protein CDS human (1-1273)
auguucguguuucugguccuccuuccccugguuagcucccagugcgugaacuugaccacaagaacucaauuaccuccagccuacacuaauucuuucaccaggggcguauauuacccggacaagguguuucggucaaguguccugcacagcacacaggaucuauuccuccccuuuuucuccaacgugacuugguuucaugcuauccacguuucugggaccaauggaacaaaacgcuucgacaacccugugcugccauuuaaugauggugucuauuucgcaucgaccgagaagucaaacauuauacgaggcuggaucuuugggacuacacuugacagcaaaacccagagucuguugauugugaauaacgccacgaauguaguuaucaaggugugugaguuccaguuuugcaacgaucccuuccucggagucuacuaucauaaaaauaacaaguccuggauggagucugaguuccguguguacagcuccgcgaauaacuguacuuuugaauaugugucacaaccuuuccugauggaccuggaaggcaagcaggguaauuuuaaaaaccucagagaguucgucuuuaagaacauugauggguacuucaaaaucuacaguaagcacaccccaauaaauuuaguuagggaccugccccagggauuuagcgcucuugagccuuugguggaucugccaaucggcauuaacaucacacgguuccagacucuacucgcccugcaucgcucuuaucuuaccccgggcgacuccucaagcggguggacagcaggagccgcugcauacuauguagguuaccugcaacccagaaccuuuuugcucaaauauaaugaaaacggcacgauuacugaugccguggacugcgcucuggauccuuuaagugagacaaaguguacccugaagucuuucacugucgaaaaagggaucuaccagacauccaauuuuagggugcucccaaccgagagcauaguucgguuccccaacauuacgaaucuuugcccuuuuggagagguguucaacgccacccgcuucgcgucggucuaugcauggaaucgaaagagaaucucuaacuguguggccgacuacuccguacuguacaauucagcuaguuuuagcacauucaaaugcuauggcguuuccccaacuaaguugaacgaccuauguuuuaccaauguguacgccgauucuuucgucauuaggggugacgaagugcggcagaucgcacccgggcagacaggaaaaaucgcugauuauaacuacaagcugccggacgauuuuacuggcugcgucauugccuggaauagcaacaaccucgacucaaaagugggcgggaauuauaacuaccuguaucgucuuuuccgcaagaguaaucugaagccuuuugagagagauauauccaccgaaaucuaccaagcgggaagcacacccuguaacgguguugagggcuucaauugcuacuuuccauugcagucuuauggguuccagccuaccaacggagugggcuaccaacccuauaggguagucgugcucucauuugaacuguuacacgccccagcaacuguuugcggucccaaaaagaguacgaaucuggugaaaaacaagugugucaauuucaacuuuaaugggcuaacaggcaccggagugcucacugagagcaacaaaaaguuccugccuuuccagcaguuuggccgggacauugcugauaccacagacgccguacgagauccacagacccuugagaucuuggacauaacuccgugcuccuucgggggagugucuguuauuacacccgguacgaauaccucgaaccaagucgcugugcuguaccagggcgugaauuguacugaagucccuguugccauccacgcagaccagcucacaccaaccuggcgcguguauagcacaggguccaacguguuucagacuagagccggaugccugaucggcgcugagcauguaaacaauucauacgaaugugauauucccaucggugcggggauuugcgcaaguuaucaaacccagacgaacucuccuaggcgggcccgcagcgucgcuucccagucaauaaucgccuacaccaugagccuuggcgcagaaaauucuguggccuacuccaacaauaguauugcuaucccaacaaacuucacuaucagcguuaccacagaaauucugcccgugucuaugacuaagaccuccgucgacuguacgauguauauaugcggagauucaacagaguguaguaauuugcuccugcaguacggcagcuuuugcacccaauuaaacagagcccugacugggaucgcaguggagcaggacaaaaauacacaggaaguuuucgcacaggugaagcaaauuuauaaaaccccgccuaucaaggauuuuggagguuucaacuuuucgcagauucuaccagaccccuccaaaccuucuaagaggagcuucaucgaggaucuccuguuuaauaagguaacucuugcugacgccggcuucauaaaacaguacggggauuguuugggagacaucgcagcccgugaucugauuugcgcucaaaaguucaacggccucaccguccugcccccauuacugacagacgaaaugaucgcccaguauacgucagcacuuuuggcugguaccauuacgaguggguggacauuuggcgccggagcggcccuccagaucccuuucgcuaugcagauggcauaccgguuuaauggcauaggggugacccaaaacgugcuguaugagaaucagaaacuaauugccaaccaguucaacuccgcuaucggaaagauucaggauucucugagcuccacagccucagcacucggcaaacugcaagacgucguuaaucagaacgcgcaggcccuuaauacuuuggugaagcagcugagcaguaacuuuggugcuaucucuuccguauuaaaugacauacucagccgacuggauaagguggaagccgagguccaaaucgacagacuuauuaccgggaggcugcagucguugcagacguacgugacacaacagcucauccgcgcagcugagauucgggccucagcaaaccuggccgcuaccaaaaugucugaaugcguucuaggacagaguaagagaguggauuucuguggcaaagguuaccaccugauguccuuuccccagagcgcgccacauggcgucguguuccuccacguuacuuaugugccggcccaagagaagaauuuuaccacagcgccugcuaucugccacgacgggaaagcccauuuccccagggaaggagucuuuguaucuaacggcacucacugguucgugacccagcgcaauuuuuacgagccacagauaauuacaacggauaacaccuucguuagcgggaauugugacguggucaucggaaucgugaacaauacuguauaugauccccugcagccugagcuugacuccuucaaggaagaguuggauaaauacuuuaagaaccauacaucaccagacguggaucugggcgacauuagugguaucaaugccagcgucguuaacauucaaaaggaaauagaucgauuaaaugagguggcuaaaaaccucaacgaaucucugaucgaccuucaggagcuggggaaguaugagcaguacauuaaauggcccugguauaucuggcuaggauucauugcaggccucaucgccauagugauggucaccaucaugcugugcuguaugacuuccugcuguucaugcuugaaggguuguugcaguuguggcagcugcugcaaauuugacgaagaugacuccgagccugugcugaaggggguuaaguuacacuacacauga

SEQ ID NO: 12029 - RNA, 3819 nt, Artificial Sequence
  SARS-CoV-2/India/1-27/2020__EPI_ISL_413522 spike protein CDS human (1-1272)
auguucguguuucugguccuccuuccccugguuagcucccagugcgugaacuugaccacaagaacucaauuaccuccagccuacacgaauagcuucaccaggggcguauauuacccggacaagguguuucggucaaguguccugcacagcacacaggaucuauuccuccccuuuuucuccaacgugacuugguuucaugcuauccacguuucugggaccaauggaacaaaacgcuucgacaacccugugcugccauuuaaugauggugucuauuucgcaucgaccgagaagucaaacauuauacgaggcuggaucuuugggacuacacuugacagcaaaacccagagucuguugauugugaauaacgccacgaauguaguuaucaaggugugugaguuccaguuuugcaacgaucccuuccucggagucuaccauaaaaauaacaaguccuggauggagucugaguuccguguguauagcuccgcgaauaacuguacuuuugaauacgugucacaaccuuuccugauggaccuggaaggcaagcaggguaauuuuaaaaaccucagagaguucgucuuuaagaacauugauggguauuucaaaaucuacaguaagcacaccccaauaaauuuaguuagggaccugccccagggauuuagcgcucuugagccuuugguggaucugccaaucggcauuaacaucacacgguuccagacucuacucgcccugcaucgcucuuaccuuaccccgggcgacuccucaagcggguggacagcaggagccgcugcauauuacguagguuaucugcaacccagaaccuuuuugcucaaauacaaugaaaacggcacgauuacugaugccguggacugcgcucuggauccuuuaagugagacaaaguguacccugaagucuuucacugucgaaaaagggaucuaucagacauccaauuuuagggugcagccaaccgagagcauaguucgguuccccaacauuacgaaucucugcccuuuuggagagguguucaacgccacccgcuucgcgucggucuacgcauggaaucgaaagagaaucucuaacuguguggccgacuauuccguacuuuacaauucagcuaguuuuagcacauucaaaugcuacggcguuuccccaacuaagcugaacgacuuguguuuuaccaauguguaugccgauucuuucgucauuaggggugacgaagugauccagaucgcacccgggcaaacaggaaaaauugcugauuacaacuauaagcuaccggacgauuuuacuggcugcgucauagccuggaauagcaacaaccuggacucaaaagugggcgggaauuacaacuaucucuaccggcuguuccguaagaguaaucuuaagccuuuugagcgcgauaucuccaccgaaauuuaucaggcgggaagcacacccuguaacgguguugagggcuucaauugcuacuuuccacugcagucuuacggguuccaaccuaccaacggagugggcuaucagcccuacagaguagucguguugucauuugaacuccugcacgccccagcaacuguuugcggucccaaaaagaguacgaauuuagugaaaaacaagugugucaauuucaacuuuaaugggcugacaggcaccggagugcuaacugagagcaacaaaaaguuccucccuuuccagcaguuuggcagggacaucgcugauaccacagacgccguacgggauccacaaacccuggagauacuugacauuacuccgugcuccuucgggggagugucuguuaucacacccgguacgaauaccucgaaccaggucgcuguguuguaucaggacgugaauuguacugaagucccuguugccauccacgcagaucagcugacaccaaccuggcgaguguacagcacaggcuccaacguguuucaaacucgcgccgggugccucauuggagcugagcauguaaacaauucauaugaaugugacauccccauuggcgcggguauaugcgcaaguuaccagacccagacgaacucuccuagaagggcccggagcgucgcuucccagucaaucauugccuauaccaugagccugggggcagaaaauucuguggccuacuccaacaauaguaucgcuaucccaacaaacuucacuauuagcguuaccacagaaauacuucccgugucuaugacuaagaccuccgucgauuguacgauguacaucugcggcgacucaacagaguguaguaaucuguugcuccaauauggaucuuuuugcacccagcugaaccgcgccuuaacuggcauugcaguggagcaggauaaaaauacacaggaaguuuucgcgcaagugaagcagaucuacaaaaccccgccuauuaaggacuuugggggauucaacuuuucgcagauccugccagaucccuccaaaccuucuaagagaaguuucauagaggaccuacucuuuaauaagguaacucuggcugaugccgguuucaucaaacaauauggcgacugucuuggggauauugcagccagggacuugaucugcgcucagaaguucaacggacugaccguccugcccccacucuuaacagaugaaaugauugcccaguacacgucagcacugcuugcuggcaccaucacuagcgguuggacauuuggggccggcgcggccuugcagauaccuuucgcuaugcaaauggcauaucguuuuaauggaauuggcgugacccagaacgugcucuacgagaaucagaaacugaucgccaaccaguucaacuccgcuauugggaagauccaagacucucuaagcuccacagccucagcacugggaaaacuccaggacgucguuaaucagaacgcgcaggcccugaauacucuugugaagcaauugagcaguaacuuuggcgcuauaucuuccguacugaaugauaucuuaagccggcucgacaagguggaagccgagguccagauugaucgacugaucaccgguagacuucagucgcugcaaacguaugugacacagcaguugauuagggcagcugagauccgcgccucagcaaaccucgccgcuaccaaaaugucugaaugcguucuggggcagaguaagcggguggacuucuguggaaaaggcuaccaccuaauguccuuuccccaaagcgcgccacauggugucguguuccugcacguuacuuacgugccggcccaggagaagaauuuuaccacagcuccugcaauaugccacgauggcaaagcccauuuccccagagaaggggucuuuguaucuaacggaacucacugguucgugacccagaggaauuuuuaugagccacagauuaucacaacggacaacaccuucguuagcggcaauugugauguggucaucgggauugugaacaauacuguauacgacccccuccaaccugagcuggauuccuucaaggaggaacuugacaaauauuuuaagaaccauacaucaccagauguggacuugggagauaucaguggcauuaaugccagcgucguuaacauacagaaggaaaucgaccgccugaaugagguggcuaaaaacuuaaacgaaucucucauugaccugcaggagcuugguaaguacgagcaguauaucaaauggcccugguacauuuggcugggguucaucgcaggacuaauagccaucgugauggucaccauuaugcucugcuguaugacuuccugcuguucaugccugaagggcuguugcaguugugguagcugcugcaaauuugaugaagacgauuccgagccuguguugaagggcguuaagcugcacuauacauga

SEQ ID NO: 12030 - RNA, 3804 nt, Artificial Sequence
  SARS-CoV-2/pangolin/Guangxi/P4L/2017__EPI_ISL_410538 spike protein CDS human (1-1267)
auguucguguuucuguucguccucccccuuguuagcucccagugcgugaaccugaccacaagaacuggcaucccuccaggguacacgaauagcucaaccaggggaguauauuacccggacaagguguuucggaguagcauuuugcacuuaacacaagaucuguuccuacccuuuuucuccaacgucacuugguuuaauaccauaaacuaucaggguggcuucaaaaaguuugacaauccugugcucccauucaacgaugggguuuacuuugccucuacagagaaaucgaauaucauucgcggauggaucuucggcaccacucuggacgcucgaacacagucacuucugauugugaacaaugcaaccaacgucgugaucaagguaugugaauuucaguucugcacggaucccuucuuggguguuuauuaccauaauaacaauaaaacuuggguggagaacgaauuucgugucuauagcagugccaauaacuguaccuucgaguacauaucccaaccuuuucucauggaccuggaagggaagcagggaaacuucaagaaucugagagaguuuguguucaaaaacguggauggcuacuuuaagaucuauucuaaacacacaccaauugaccucgucagggauuuaccccggggcuucgcggcucuggagccucuuguugacuugccaaucgggauuaauaucacucgcuuucagacccugcuagcccuccauagaagcuaccugacaccgggaaaccuugaauccgguuggaccacgggcgcagccgcuuauuacgugggguaucugcagcaaaggacuuucuugcucucauacaaucagaacggaacaauaaccgaugcaguagacugcagucuggaucccuuaagcgagacuaaguguacacugaaaucucucaccguggaaaagggcauuuaucagacguccaauuuucggguccagccuaccaucucaauugugcgcuucccaaacaucacaaaucuuugccccuuuggugagguuuucaacgccagcaaguucgcuaguguguacgccuggaaucgaaaaagaaucucuaacugugucgcggacuacuccgugcuguauaauagcacuucguuuucuaccuucaagugcuacgggguauccccuacaaaauugaacgaccuauguuuuacuaauguuuaugcagauucauucguggucaagggagacgaggugaggcaaauugccccaggccagaccggcgucauagcugauuacaacuauaaacugcccgacgauuuuacagggugcgugaucgccuggaacaguguuaagcaggacgcacucaccggagguaauuacggcuaucuguaccggcuuuuccguaaaagcaagcugaagccguuugaacgcgauauuuccacugagaucuaccaagcugggucuacgccuuguaacggacaggugggcuugaauugcuauuacccccucgaaagauaugguuuccacccaacaaccgggguaaacuaccagccuuuuagggucgugguucugagcuucgaguuacugaauggccccgccacugugugcggaccaaaacuaucaaccacacucgucaaggacaaaugugugaacuuuaauuucaacggccugaccgggacuggaguacuuacaacgaguaagaaacaguuuuugcccuuccaacaguucggucgggauauauccgacaccacugaugcggugcgagacccucagacacuggaaauucucgacaucaccccaugcagcuuuggcgggguuucugucaucacaccgggaacuaauaccucaaaccagguggccgugcuguaucaagaugucaauuguacggagguucccauggcaauucaugcugagcagcuuaccccugccuggcgcguguacagugcuggcgccaacguguuccagacaagagcagguugccugguaggggccgaacacgucaauaacagcuaugagugugacaucccagugggcgcuggaauuugcgcguccuaccacucuaugucgagcuugagguccguuaaucagcggucaauaaucgcauacacuaugagucucggcgccgaaaacucuguggcuuauagcaacaauuccauugccauccccaccaacuuuacaaucucagucacuaccgagauucugccugugagcaugacgaagacaucuguugauuguaccauguacauaugcggggacuccaucgaauguaguaauuuacugcuacaauauggaucuuucugcacucagcucaaccgcgcacugacagguauugccguggagcaggauaagaauacccaggagguauuugcucaagucaaacagaucuacaagacuccacccauuaaagacuucggcggguuuaacuucucucagauccuuccggauccuuccaagccaucaaaaagaaguuuuauagaagacuugcuguucaauaaggugacccucgccgaugcaggauuuaucaagcaauauggcgacugucugggugauauugcggcuagggacuuaaucugcgcccagaaauucaacgggcugacagugcuucccccuuugcucacggaugagaugauugcacaguacaccagcgcccugcuagcuggcacuaucacaucgggauggaccuucggcgccggggcagcucugcagauacccuuugccaugcaaauggcguaucguuucaauggaauuggcgucacacagaacguucucuacgaaaaucagaagcugaucgccaaccaguuuaauuccgcuauugguaaaauccaagacucucuuagcucaacugcaagugccuuggggaagcugcaggacgugguaaaccagaaugcucaggccuuaaacacccucgugaaacaacuguccucuaacuucggagcaauaagcuccguccuuaaugauauccugucacgguuggacaagguggaggcggaaguucagauugaucgacucaucacgggcagacugcagagccuacaaacauacgugacccagcagcugauuagggccgcugagauccgcgccagugcaaaccucgcugccacuaagaugucugagugcguccugggucaguccaaacggguggacuuuuguggcaagggguaucaucuuaugagcuucccacaaucggcaccucacggaguuguguuuuugcaugucaccuacguacccgcccaggagaaaaauuucacaacugcuccagcgauaugccacgagggcaaggcccacuuuccgagagaagggguguucguuucaaacggaacccauugguuuauuacacagaggaauuucuaugagccucagaucaucacgaccgauaacacuuuugugucuggcaguugugacgucgugauugguaucguaaauaacacaguguacgauccccugcaaccagaguuagacuccuucaaagaagaacucgauaaguauuucaaaaaucacaccagccccgacgucgaucugggggacauuucuggaauaaacgcaagcguugugaauauccagaaggaaauugaucgccuuaacgagguggcuaagaaucugaacgaauccccuaucgaccuacaggagcucggcaaauacgagcaguauauuaaguggccaugguacaucuggcuggguuuuauagccggcuugaucgccauuaucauggucacuauuaugcugugcuguaugacaucaugcuguaguugcuuaaaaggguguugcagcuguggaucuugcugcaaguucgacgaagaugacuccgagcccgugcucaaaggcguuaagcugcauuacaccuga

SEQ ID NO: 12031 - RNA, 3804 nt, Artificial Sequence
  SARS-CoV-2/pangolin/Guangxi/P5L/2017__EPI_ISL_410540 spike protein CDS human (1-1267)
auguucguguuucuguucguccucccccuuguuagcucccagugcgugaaccugaccacaagaacuggcaucccuccaggguacacgaauagcucaaccaggggaguauauuacccggacaagguguuucggaguagcauuuugcacuuaacacaagaucuguuccuacccuuuuucuccaacgucacuugguuuaauaccauaaacuaucaggguggcuucaaaaaguuugacaauccugugcucccauucaacgaugggguuuacuuugccucuacagagaaaucgaauaucauucgcggauggaucuucggcaccacucuggacgcucgaacacagucacuucugauugugaacaaugcaaccaacgucgugaucaagguaugugaauuucaguucugcacggaucccuucuuggguguuuauuaccauaauaacaauaaaacuuggguggagaacgaauuucgugucuauagcagugccaauaacuguaccuucgaguacauaucccaaccuuuucucauggaccuggaagggaagcagggaaacuucaagaaucugagagaguuuguguucaaaaacguggauggcuacuuuaagaucuauucuaaacacacaccaauugaccucgucagggauuuaccccggggcuucgcggcucuggagccucuuguugacuugccaaucgggauuaauaucacucgcuuucagacccugcuagcccuccauagaagcuaccugacaccgggaaaacuugaauccgguuggaccacgggcgcagccgcuuauuacgugggguaucugcagcaaaggacuuucuugcucucauacaaccagaauggaacaauaaccgaugcaguagacugcagucuggaucccuuaagcgagacuaaguguacacugaagucucucaccguggaaaagggcauuuaucagacguccaacuuucggguccagccuaccaucucaauugugcgcuucccaaauaucacaaaccuuugccccuuuggugagguuuucaaugccagcaaauucgcuaguguguacgccuggaaccgaaagagaaucucuaauugugucgcggacuacuccgugcuguauaacagcacuucguuuucuaccuucaaaugcuacgggguauccccuacaaaguugaaugaccuauguuuuacuaacguuuaugcagauucauucguggucaaaggagacgaggugaggcaaauugccccaggccagaccggcgucauagcugauuacaauuauaagcugcccgacgauuuuacagggugcgugaucgccuggaacaguguuaaacaggacgcacucaccggagguaacuacggcuaucuguaccggcuuuuccguaagagcaagcugaaaccguuugaacgcgauauuuccacugagaucuaccaagcugggucuacgccuuguaauggacaggugggcuugaacugcuauuacccccucgaaagauaugguuuccacccaacaaccgggguaaauuaccagccuuuuagggucgugguucugagcuucgaguuacugaacggccccgccacugugugcggaccaaagcuaucaaccacacucgucaaagacaagugugugaauuuuaacuucaauggccugaccgggacuggaguacuuacaacgaguaaaaagcaguuuuugcccuuccaacaguucggucgggauauauccgacaccacugaugcggugcgagacccucagacacuggaaauucucgacaucaccccaugcagcuuuggcgggguuucugucaucacaccgggaacuaacaccucaaaucagguggccgugcuguaucaagaugucaacuguacggagguucccauggcaauucaugcugagcagcuuaccccugccuggcgcguguacagugcuggcgccaauguguuccagacaagagcagguugccugguaggggccgaacacgucaacaauagcuaugagugugacaucccagugggcgcuggaauuugcgcguccuaccacucuaugucgagcuuuagguccguuaaccagcggucaauaaucgcauacacuaugaguuugggcgccgaaaauucuguggcuuauagcaacaacuccauugccauccccaccaauuucacaaucucagucacuaccgagauucucccugugagcaugacgaagacaucuguugauuguaccauguacauaugcggggacuccaucgaauguaguaaccuguuacugcaauauggaucuuuuugcacucagcuaaaucgcgcacucacagguauugccguggagcaggauaaaaacacccaggagguauucgcucaagucaagcagaucuacaaaacuccacccauuaaggacuuuggcggguucaauuuuucucagauccugccggauccuuccaaaccaucaaagagaaguuucauagaagaccuuuuguuuaacaaggugacccuggccgaugcaggauucaucaaacaauauggcgacugucucggugauauugcggcuagggaccugaucugcgcccagaaguucaauggguuaacagugcugcccccucuuuugacggaugagaugauugcacaguacaccagcgcccuccuggcuggcacuaucacaucgggauggaccuuuggcgccggggcagcucuacagauacccuucgccaugcaaauggcguaucguuuuaacggaauuggcgucacacagaauguucuguacgaaaaccagaaacucaucgccaaucaguucaacuccgcuauugguaagauccaagacucucugagcucaacugcaagugcccuugggaaauugcaggacgugguaaaucagaacgcucaggcccugaauaccuuagugaagcaacucuccucuaacuuuggagcaauaagcuccguccugaacgauauccuuucacggcuggacaagguggaggcggaaguucagauugaucgauugaucacgggcagacuccagagccugcaaacauacgugacccagcagcuaauuagggccgcugagauccgcgccagugcaaaucuggcugccacuaaaaugucugagugcguccucggucaguccaagcggguggacuucuguggcaaaggguaucaucugaugagcuuuccacaaucggcaccucacggaguuguguuccuucaugucaccuacguacccgcccaggaaaagaacuuuacaacugcuccagcgauaugccacgagggcaaagcccacuucccgagagaagggguguuuguuucaaauggaacccauugguucauuacacagaggaacuuuuaugagccucagaucaucacgaccgauaauacuuucgugucuggcaguugugacgucgugauugguaucguaaacaauacaguguacgaucccuugcaaccagagcuggacuccuucaaggaagaguuagauaaauauuuuaagaaccacaccagccccgacgucgaucucggggacauuucuggaauaaaugcaagcguugugaacauccagaaggaaauugaucgccugaaugagguggcuaaaaaccuuaaugaaucccugaucgaccuacaggagcucggcaaguacgagcaguauauuaaauggccuugguacaucuggcuggguuucauagccggcuugaucgccauuaucauggucacuauuaugcugugcuguaugacaucaugcuguaguugcuuaaagggguguugcagcuguggaucuugcugcaaauuugacgaagaugacuccgagccagugcucaagggcguuaagcugcauuacaccuga

SEQ ID NO: 12032 - RNA, 3804 nt, Artificial Sequence
  SARS-CoV-2/pangolin/Guangxi/P5E/2017__EPI_ISL_410541 spike protein CDS human (1-1267)
auguucguguuucuguucguccucccccuuguuagcucccagugcgugaaccugaccacaagaacuggcaucccuccaggguacacaaauucuucaaccaggggaguauauuacccggacaagguguuucggaguagcauuuugcacuuaacacaagaucuguuccuacccuuuuucuccaacgucacuugguuuaauaccauaacauaucaggguggcucuaaaaaguucgacaacccugugcucccauuuaaugaugggguuuacuucgccucgaccgagaaaucaaacaucauucgcggauggaucuuuggcacuacacuggacgcucgaacccagagccuucugauugugaauaacgcaacgaaugucgugaucaagguaugugaguuccaguuuugcacugaucccuucuuggguguuuauuaccauaacaauaacaaaaccuggguggaaaaugaguuccgugucuauaguuccgccaacaauuguacauuugaauacauaucucaaccuuuccucauggaccuggaagggaagcagggaaacuuuaagaaccugagagaguucguguuuaaaaauguggauggcuacuucaagaucuauagcaaacacacuccaauugaccucgucagggauuuaccccggggcuuugcggcucuggagccucuuguugacuugccaaucgggauuaacaucacccgcuuccagacacugcuagcccuccauagauccuaccugaccccgggaaaacuugaaucagguuggacgacuggcgcagccgcuuauuacgugggguaucugcagcaaaggacauuuuugcucaguuacaaucagaacggaaccauaacugaugcaguagacugcagccuggaucccuuaucugagacaaaguguacccugaagucccucacgguggaaaagggcauuuaucagaccucaaauuuccggguccagccuacaaucagcauugugcgcuuuccaaacaucacuaaucuuugccccuucggugagguuuuuaacgccaguaaauucgcuucuguguacgccuggaaucgaaagagaaucuccaacugugucgcggacuacagcgugcuguauaauucgaccucuuucuccacauuuaaaugcuacgggguaucaccuacuaaguugaacgaccuauguuucaccaauguuuaugcagauaguuuuguggucaaaggagacgaggugaggcaaauugccccaggccagacaggcgucauagcugauuacaacuauaagcugcccgacgauuucaccgggugcgugaucgccuggaauagcguuaaacaggacgcacucacuggagauaacuacgguuaucuguaccggcuuuuucguaaguccaagcugaaaccguucgaacgcgacauuucuacggagaucuaccaagcuggcagcacaccuuguaacggacaggugggguugaauugcuauuacccccucgaaagauauggcuuucacccaaccacugguguaaacuaccagccuuucagggucgugguucugucauuugaguuacugaaugggcccgccaccgugugcggcccaaagcuaaguacaacccucgucaaagauaagugugugaacuucaauuuuaacggacugacuggcacagggguacuuacgaccuccaaaaagcaguucuugcccuuucaacaguucggacgggacauaagcgauacuacagacgcggugcgagacccucagacccuggaaauucucgauaucacaccaugcucuuucgguggcguuucagucaucacuccggggaccaauacgaguaaccagguggccgugcuguaucaagacgucaauuguaccgagguucccauggcaauucaugcugagcagcuuacgccugccuggcgcguguacagcgcuggagccaacguguuucagacuagagcaggcugccugguaggugccgaacacgucaauaacuccuaugagugugauaucccagugggggcuggcauuugcgcgucuuaccacucgaugagcuccuucaggucaguuaaucagcggaguauaaucgcauacaccaugucuuugggagccgaaaacagcguggcuuauuccaauaacucaauugccauccccacaaacuuuacuaucagcgucaccacggagauucucccugugucuaugacaaagaccuccguugacuguacuauguacauaugcggcgauaguaucgaauguagcaaucuguuacugcaauaugggucuuucugcacacagcuaaaccgcgcacucaccggaauugccguggagcaggacaaaaauacucaggagguauuugcucaagucaagcagaucuacaaaaccccacccauuaaggauuucgguggcuuuaacuucucccagauccugccggacccuucaaaaccaaguaagaggagcuuuauagaagaucuuuuguucaauaaggugacacuggccgacgcaggguuuaucaaacaauauggagauugucucggcgacauugcggcuagagaucugaucugcgcccagaaguucaacgguuuaacggugcugcccccucuuuugaccgacgagaugauugcacaguacacuucggcccuccuggcugggacaaucaccuccggcuggacauucggagccggcgcagcucuacagauacccuuugccaugcaaauggcguaucguuucaaugggauuggagucacucagaacguucuguacgaaaaucagaaacucaucgccaaccaguuuaauucugcuauuggcaagauccaagacagccugucaaguaccgcauccgcccuugguaaauugcaggaugugguaaaccagaaugcucaggcccugaacacguuagugaagcaacucucuagcaauuucggggcaauauccucaguccugaacgacauccuuagccggcuggauaagguggaggcggaaguucagauugaccgauugaucacaggaagacuccagagucugcaaaccuacgugacucagcagcuaauuagggccgcugagauccgcgccucugcaaaccuggcugccaccaaaauguccgagugcguccucggccagagcaagcggguggauuuuugugguaaaggcuaucaucugaugucguucccacaaucagcaccucacgggguuguguuucuucaugucacauacguacccgcccaggaaaagaauuucacuaccgcuccagcgauaugccacgagggaaaagcccacuuuccgagagaaggcguguucguuucuaacgggacacauugguuuauuacgcagaggaauuucuaugagccucagaucaucaccacugacaacacauuugugaguggauccugugaugucgugauuggcaucguaaauaacaccguguacgaccccuugcaaccagagcuggauagcuucaaggaagaguuagacaaauauuucaagaaucacacuucucccgaugucgaccucggugauauuagcgggauaaacgcauccguugugaauauccagaaggaaauugaccgccugaacgagguggcuaaaaaucuuaacgaaucacugaucgaccuacaggagcucggaaaguacgagcaguauauuaaauggccuugguacaucuggcugggcuuuauagccgguuugaucgccauuaucauggucacaauuaugcugugcuguaugaccaguugcuguagcugcuuaaagggcuguugcucuuguggguccugcugcaaauucgaugaagacgauucagagccagugcucaagggaguuaagcugcauuacacguga

SEQ ID NO: 12033 - RNA, 3798 nt, Artificial Sequence
  SARS-CoV-2/pangolin/Guangxi/P1E/2017__EPI_ISL_410539 spike protein CDS human (1-1265)
auguucguguuucuguucguccucccccuuguuagcucccagugcgugaaccugaccacaagaacuggcauccaaccuggguacaccaauucuucaacgaggggaguauauuacccagacaagguguuucggaguagcauuuugcacuuaacacaggaucuguuccuaccguuuuucuccaacgucacuugguuuaauaccauaaacuaucaggguggcuucaagaaguuugacaaucccgugcucccuuucaacgaugggguuuacuuugccucuacagagaaaucgaauaucauucgcggauggaucuucggcaccacucuggacgcucgaacacagucacuucugauugugaacaaugcaaccaacgucgugaucaagguaugugaauuucaauucugcacggauccauucuuggguguuuauuaccauaauaacaauaaaacuuggguggagaacgaauuucgugucuauagcagugccaauaacuguaccuucgaguacauaucccagcccuuucucauggaccuggaagggaagcagggaaacuucaagaaucugagagaguuuguguucaaaaacguggauggcuacuuuaagaucuauucuaaacacacaccuauugaccucgucagggauuuaccacggggcuucgcggcucuggagccccuuguugacuugccuaucgggauuaauaucacucgcuuucagacccugcuagcccuccauagaagcuaccugacaccaggaaaacuugaauccgguuggaccacgggcgcagccgcuuauuacgugggguaucugcaacagaggacuuucuugcucucauacaaccagaauggaacaauaaccgaugcaguagacugcagucuggauccguuaagcgagacuaaguguacacugaagucucucaccguggaaaagggcauuuaucagacguccaacuuucggguccaacccaccaucucaauugugcgcuucccuaauaucacaaaccuuugcccauuuggugagguuuucaaugccagcaaauucgcuaguguguacgccuggaaccgaaagagaaucucuaauugugucgcggacuacuccgugcuguauaacagcacuucguuuucuaccuucaaaugcuacgggguaucccccacaaaguugaaugaccuauguuuuacuaacguuuaugcagauucauucguggucaaaggagacgaggugaggcagauugccccuggccagaccggcgucauagcugauuacaauuauaagcugccagacgauuuuacagggugcgugaucgccuggaacaguguuaaacaagacgcacucaccggagguaacuaccuguaucggcuuuuccguaagagcaagcugaaacccuuugaacgcgauauuuccacugagaucuaccaggcuggcucuacgccguguaauggacaggugggguugaacugcuacuauccucucgaaagauacggcuuccaccccacaaccgguguaaauuaucagccauuuagggucgugguucugagcuucgaguuacugaacgggccugccacugugugcggccccaagcuaucaaccacacucgucaaagacaagugugugaauuuuaacuucaauggacugaccggcacugggguacuuacaacgaguaaaaagcaauuuuugccauuccagcaguucggacgggauauauccgacaccacugaugcggugcgagacccccagacacuggaaauucucgacaucaccccuugcagcuuugguggcguuucugucaucacaccagggacuaacaccucaaaucaaguggccgugcuguaccaggaugucaacuguacggagguuccgauggcaauucaugcugagcagcuuacccccgccuggcgcguguauagugcuggagccaauguguuccagacaagagcaggcugccugguaggugccgaacacgucaacaauagcuacgagugugacaucccugugggggcuggcauuugcgcguccuaucacucuaugucgagcuugagguccguuaaccaacggucaauaaucgcauacacuaugagucucggagccgaaaauucuguggcuuacagcaacaacuccauugccaucccaaccaauuuuacaaucucagucacuaccgagauucugcccgugagcaugacgaagacaucuguugauuguaccauguauauaugcggcgacuccaucgaauguaguaacuuacugcuacaguacgggagcuucugcacucagcucaaucgcgcacugacaggaauugccguggagcaggauaaaaacacccaagagguauuugcucaggucaagcagaucuauaaaacuccuccaauuaaggacuucgguggcuuuaauuucucucaaauccuucccgauccguccaaaccuucaaagagaaguuuuauagaagacuugcuguucaacaaggugacccucgccgaugcaggguuuaucaaacaguacggagacugucugggcgauauugcggcuagggacuuaaucugcgcccagaaguucaauggucugacagugcuuccacccuugcucacggaugagaugauugcacaguauaccagcgcccugcuagcugggacuaucacaucgggcuggaccuucggagccggcgcagcucugcaaauaccuuuugccaugcagauggcguaccguuucaacgggauuggagucacacagaauguucucuaugaaaaccagaaacugaucgccaaucaauuuaacuccgcuauuggcaagauccaggacucucuuagcucaacugcaagugccuuggguaaacugcaggacgugguaaaucagaacgcucaagccuuaaauacccucgugaagcagcuguccucuaacuucggggcaauaagcuccguccuuaacgauauccugucacgguuggacaagguggaggcggaaguucagauugaucgacucaucacgggaagacugcaaagccuacagacauacgugacccagcagcugauuagggccgcugagauccgcgccagugcaaaucucgcugccacuaaaaugucugagugcguccugggccaauccaagcggguggacuuuugugguaaaggcuaccaucuuaugagcuucccccagucggcaccacacgggguuguguuuuugcaugucaccuauguaccugcccaggaaaagaacuucacaacugcucccgcgauaugccacgagggaaaagcccacuuuccaagagaaggcguguucguuucaaaugggacccauugguuuauuacacagaggaacuucuacgagccgcaaaucaucacgaccgauaauacuuuugugucuggaaguugugacgucgugauuggcaucguaaacaauacaguguaugauccucugcagcccgaguuagacuccuucaaggaggaacucgauaaauacuucaagaaccacaccagcccagacgucgaucugggugacauuucugggauaaaugcaagcguugugaacauccagaaggaaauugaucgccuuaaugagguggcuaaaaaccugaaugaaucccuaaucgaccuccaggagcugggaaaguaugagcaauacauuaaauggcccugguauaucugguugggcuuuauagccggucugaucgccauuaucauggucacuauuauguuaugcuguaugacaucaugcuguaguugccucaagggcuguugcagcugugggucuugcugcaaauucgacgaagaugacuccgagccugugcugaagggaguuaaacuucauuacaccuga

SEQ ID NO: 12034 - RNA, 3822 nt, Artificial Sequence
  SARS-CoV-2/Wuhan/WIV05/2019__EPI_ISL_402128 spike protein CDS gc mod (1-1273)
auguucguguuucuggugcugcugccccugguguccagccagugugugaaccugaccaccagaacacagcugccuccagccuacaccaacagcuucaccagaggcguguacuaccccgacaagguguucagauccagcgugcugcacucuacccaggaccuguuccugccuuucuucagcaacgugaccugguuccacgccauccacguguccggcaccaauggcaccaagagauucgacaaccccgugcugcccuucaacgacgggguguacuuugccagcaccgagaaguccaacaucaucagaggcuggaucuucggcaccacacuggacagcaagacccagagccugcugaucgugaacaacgccaccaacguggucaucaaagugugcgaguuccaguucugcaacgaccccuuccugggcgucuacuaccacaagaacaacaagagcuggauggaaagcgaguuccggguguacagcagcgccaacaacugcaccuucgaguacgugucccagccuuuccugauggaccuggaaggcaagcagggcaacuucaagaaccugcgcgaguucguguucaagaacaucgacggcuacuucaaaaucuacagcaagcacaccccuaucaaccucgugcgggaucugccucagggcuucucugcucuggaaccccugguggaucugcccaucggcaucaacaucacccgguuucagacacugcuggcccugcacagaagcuaccugacaccuggcgauagcagcagcggauggacagcuggugccgccgcuuacuaugugggcuaccugcagccuagaaccuuccugcugaaguacaacgagaacggcaccaucaccgacgccguggauugugcucuggauccucugagcgagacaaagugcacccugaaguccuucaccguggaaaagggcaucuaccagaccagcaacuuccgggugcagcccaccgaauccaucgugcgguuccccaauaucaccaaucugugccccuucggcgagguguucaaugccaccagauucgccucuguguacgccuggaaccggaagcggaucagcaauugcguggccgacuacuccgugcuguacaacuccgccagcuucagcaccuucaagugcuacggcguguccccuaccaagcugaacgaccugugcuucacaaacguguacgccgacagcuucgugauccggggagaugaagugcggcagauugccccuggacagacaggcaagaucgccgacuacaacuacaagcugcccgacgacuucaccggcugugugauugccuggaacagcaacaaccuggacuccaaagucggcggcaacuacaauuaccuguaccggcuguuccggaaguccaaucugaagcccuucgagcgggacaucagcaccgaaaucuaucaggccggcagcaccccuugcaacggcguggaaggcuucaacugcuacuucccacugcaguccuacggcuuucagcccacaaauggcgugggcuaucagcccuacagagugguggugcugagcuucgaacugcugcaugcuccugccacagugugcggcccuaagaaaagcaccaaucucgugaagaacaaaugcgugaacuucaacuucaacggccugaccggcaccggcgugcugacagagagcaacaagaaguuccugccauuccagcaguuuggccgggauaucgccgauaccacagacgccguuagagauccccagacacuggaaauccuggacaucaccccaugcagcuucggcggagugucugugaucaccccuggcaccaacaccagcaaucagguggcagugcuguaccaggacgugaacuguaccgaagugcccguggccauucacgccgaucagcugacaccuacauggcggguguacuccaccggcagcaauguguuucagaccagagccggcugucugaucggagccgagcacgugaacaauagcuacgagugcgacauccccaucggcgcuggcaucugugccagcuaccagacacagacaaacagccccagacgggcuagaagcguggccagccagagcaucauugccuacacaaugucucugggcgccgagaacagcguggccuacuccaacaacucuaucgcuauccccaccaacuucaccaucagcgugaccaccgagauccugccuguguccaugaccaagaccagcguggacugcaccauguacaucugcggcgauuccaccgagugcuccaaccugcugcugcaguacggcagcuucugcacccagcugaauagagcccugacagggaucgccguggaacaggacaagaacacccaagagguguucgcccaagugaagcaaaucuacaagaccccuccuaucaaggacuucggcggcuucaauuucagccagauucugcccgauccuagcaagcccagcaagcggagcuucaucgaggaccugcuguucaacaaagugacacuggccgacgccggcuucaucaagcaguauggcgauugucugggcgacauugccgccagggaucugauuugcgcccagaaguuuaacggacugacagugcugccuccucugcugaccgaugagaugaucgcccaguacacaucugcccugcuggccggcacaaucacaagcggcuggacauuuggagcuggcgccgcucugcagauccccuuugcuaugcagauggccuaccgguucaacggcaucggagugacccagaaugugcuguacgagaaccagaagcugaucgccaaccaguucaacagcgccaucggcaagauccaggacagccugagcagcacagcaagcgcccugggaaagcugcaggacguggucaaccagaaugcccaggcacugaacacccuggucaagcagcuguccuccaacuucggcgccaucagcucugugcugaacgauauccugagcagacuggacaaggucgaggccgaggugcagaucgacagacugaucacaggcagacugcagagccuccagacauacgugacccagcagcugaucagagccgccgagauuagagccucugccaaucuggccgccaccaagaugucugagugugugcugggccagagcaagagaguggacuuuugcggcaagggcuaccaccugaugagcuucccucagucugccccucacggcgugguguuucugcacgugacauaugugcccgcucaagagaagaauuucaccaccgcuccagccaucugccacgacggcaaagcccacuuuccuagagaaggcguguucguguccaacggcacccauugguucgugacacagcggaacuucuacgagccccagaucaucaccaccgacaacaccuucgugucuggcaacugcgacguugugaucggcauugugaacaauaccguguacgacccucugcagcccgagcuggacagcuucaaagaggaacuggacaaguacuuuaagaaccacacaagccccgacguggaccugggcgauaucagcggaaucaaugccagcgucgugaacauccagaaagagaucgaccggcugaacgagguggccaagaaucugaacgagagccugaucgaccugcaagaacuggggaaguacgagcaguacaucaaguggcccugguacaucuggcugggcuuuaucgccggacugauugccaucgugauggucacaaucaugcuguguugcaugaccagcugcuguagcugccugaagggcuguuguagcuguggcagcugcugcaaguucgacgaggacgauucugagcccgugcugaagggcgugaaacugcacuacaccuga

SEQ ID NO: 12035 - RNA, 3822 nt, Artificial Sequence; identical to SEQ ID NO: 146
  SARS-CoV-2/Wuhan/WIV05/2019__EPI_ISL_402128 spike protein CDS gc mod (1-1273)(K986P_V987P)

SEQ ID NO: 12036 - RNA, 3822 nt, Artificial Sequence
  SARS-CoV-2/Wuhan/WIV05/2019__EPI_ISL_402128 spike protein CDS gc mod (1-1273)(K986P_V987P_T887WN_A1020W)
auguucguguuucuggugcugcugccccugguguccagccagugugugaaccugaccaccagaacacagcugccuccagccuacaccaacagcuucaccagaggcguguacuaccccgacaagguguucagauccagcgugcugcacucuacccaggaccuguuccugccuuucuucagcaacgugaccugguuccacgccauccacguguccggcaccaauggcaccaagagauucgacaaccccgugcugcccuucaacgacgggguguacuuugccagcaccgagaaguccaacaucaucagaggcuggaucuucggcaccacacuggacagcaagacccagagccugcugaucgugaacaacgccaccaacguggucaucaaagugugcgaguuccaguucugcaacgaccccuuccugggcgucuacuaccacaagaacaacaagagcuggauggaaagcgaguuccggguguacagcagcgccaacaacugcaccuucgaguacgugucccagccuuuccugauggaccuggaaggcaagcagggcaacuucaagaaccugcgcgaguucguguucaagaacaucgacggcuacuucaaaaucuacagcaagcacaccccuaucaaccucgugcgggaucugccucagggcuucucugcucuggaaccccugguggaucugcccaucggcaucaacaucacccgguuucagacacugcuggcccugcacagaagcuaccugacaccuggcgauagcagcagcggauggacagcuggugccgccgcuuacuaugugggcuaccugcagccuagaaccuuccugcugaaguacaacgagaacggcaccaucaccgacgccguggauugugcucuggauccucugagcgagacaaagugcacccugaaguccuucaccguggaaaagggcaucuaccagaccagcaacuuccgggugcagcccaccgaauccaucgugcgguuccccaauaucaccaaucugugccccuucggcgagguguucaaugccaccagauucgccucuguguacgccuggaaccggaagcggaucagcaauugcguggccgacuacuccgugcuguacaacuccgccagcuucagcaccuucaagugcuacggcguguccccuaccaagcugaacgaccugugcuucacaaacguguacgccgacagcuucgugauccggggagaugaagugcggcagauugccccuggacagacaggcaagaucgccgacuacaacuacaagcugcccgacgacuucaccggcugugugauugccuggaacagcaacaaccuggacuccaaagucggcggcaacuacaauuaccuguaccggcuguuccggaaguccaaucugaagcccuucgagcgggacaucagcaccgaaaucuaucaggccggcagcaccccuugcaacggcguggaaggcuucaacugcuacuucccacugcaguccuacggcuuucagcccacaaauggcgugggcuaucagcccuacagagugguggugcugagcuucgaacugcugcaugcuccugccacagugugcggcccuaagaaaagcaccaaucucgugaagaacaaaugcgugaacuucaacuucaacggccugaccggcaccggcgugcugacagagagcaacaagaaguuccugccauuccagcaguuuggccgggauaucgccgauaccacagacgccguuagagauccccagacacuggaaauccuggacaucaccccaugcagcuucggcggagugucugugaucaccccuggcaccaacaccagcaaucagguggcagugcuguaccaggacgugaacuguaccgaagugcccguggccauucacgccgaucagcugacaccuacauggcggguguacuccaccggcagcaauguguuucagaccagagccggcugucugaucggagccgagcacgugaacaauagcuacgagugcgacauccccaucggcgcuggcaucugugccagcuaccagacacagacaaacagccccagacgggcuagaagcguggccagccagagcaucauugccuacacaaugucucugggcgccgagaacagcguggccuacuccaacaacucuaucgcuauccccaccaacuucaccaucagcgugaccaccgagauccugccuguguccaugaccaagaccagcguggacugcaccauguacaucugcggcgauuccaccgagugcuccaaccugcugcugcaguacggcagcuucugcacccagcugaauagagcccugacagggaucgccguggaacaggacaagaacacccaagagguguucgcccaagugaagcaaaucuacaagaccccuccuaucaaggacuucggcggcuucaauuucagccagauucugcccgauccuagcaagcccagcaagcggagcuucaucgaggaccugcuguucaacaaagugacacuggccgacgccggcuucaucaagcaguauggcgauugucugggcgacauugccgccagggaucugauuugcgcccagaaguuuaacggacugacagugcugccuccucugcugaccgaugagaugaucgcccaguacacaucugcccugcuggccggcacaaucacaagcggcuggugguuuggagcuggcgccgcucugcagauccccuuugcuaugcagauggccuaccgguucaacggcaucggagugacccagaaugugcuguacgagaaccagaagcugaucgccaaccaguucaacagcgccaucggcaagauccaggacagccugagcagcacagcaagcgcccugggaaagcugcaggacguggucaaccagaaugcccaggcacugaacacccuggucaagcagcuguccuccaacuucggcgccaucagcucugugcugaacgauauccugagcagacuggacccuccugaggccgaggugcagaucgacagacugaucacaggcagacugcagagccuccagacauacgugacccagcagcugaucagagccgccgagauuagauggucugccaaucuggccgccaccaagaugucugagugugugcugggccagagcaagagaguggacuuuugcggcaagggcuaccaccugaugagcuucccucagucugccccucacggcgugguguuucugcacgugacauaugugcccgcucaagagaagaauuucaccaccgcuccagccaucugccacgacggcaaagcccacuuuccuagagaaggcguguucguguccaacggcacccauugguucgugacacagcggaacuucuacgagccccagaucaucaccaccgacaacaccuucgugucuggcaacugcgacguugugaucggcauugugaacaauaccguguacgacccucugcagcccgagcuggacagcuucaaagaggaacuggacaaguacuuuaagaaccacacaagccccgacguggaccugggcgauaucagcggaaucaaugccagcgucgugaacauccagaaagagaucgaccggcugaacgagguggccaagaaucugaacgagagccugaucgaccugcaagaacuggggaaguacgagcaguacaucaaguggcccugguacaucuggcugggcuuuaucgccggacugauugccaucgugauggucacaaucaugcuguguugcaugaccagcugcuguagcugccugaagggcuguuguagcuguggcagcugcugcaaguucgacgaggacgauucugagcccgugcugaagggcgugaaacugcacuacaccuga

SEQ ID NO: 12037 - RNA, 3822 nt, Artificial Sequence
  SARS-CoV-2/Wuhan/WIV05/2019__EPI_ISL_402128 spike protein CDS gc mod (1-1273)(K986P_V987P_P1069F)
auguucguguuucuggugcugcugccccugguguccagccagugugugaaccugaccaccagaacacagcugccuccagccuacaccaacagcuucaccagaggcguguacuaccccgacaagguguucagauccagcgugcugcacucuacccaggaccuguuccugccuuucuucagcaacgugaccugguuccacgccauccacguguccggcaccaauggcaccaagagauucgacaaccccgugcugcccuucaacgacgggguguacuuugccagcaccgagaaguccaacaucaucagaggcuggaucuucggcaccacacuggacagcaagacccagagccugcugaucgugaacaacgccaccaacguggucaucaaagugugcgaguuccaguucugcaacgaccccuuccugggcgucuacuaccacaagaacaacaagagcuggauggaaagcgaguuccggguguacagcagcgccaacaacugcaccuucgaguacgugucccagccuuuccugauggaccuggaaggcaagcagggcaacuucaagaaccugcgcgaguucguguucaagaacaucgacggcuacuucaaaaucuacagcaagcacaccccuaucaaccucgugcgggaucugccucagggcuucucugcucuggaaccccugguggaucugcccaucggcaucaacaucacccgguuucagacacugcuggcccugcacagaagcuaccugacaccuggcgauagcagcagcggauggacagcuggugccgccgcuuacuaugugggcuaccugcagccuagaaccuuccugcugaaguacaacgagaacggcaccaucaccgacgccguggauugugcucuggauccucugagcgagacaaagugcacccugaaguccuucaccguggaaaagggcaucuaccagaccagcaacuuccgggugcagcccaccgaauccaucgugcgguuccccaauaucaccaaucugugccccuucggcgagguguucaaugccaccagauucgccucuguguacgccuggaaccggaagcggaucagcaauugcguggccgacuacuccgugcuguacaacuccgccagcuucagcaccuucaagugcuacggcguguccccuaccaagcugaacgaccugugcuucacaaacguguacgccgacagcuucgugauccggggagaugaagugcggcagauugccccuggacagacaggcaagaucgccgacuacaacuacaagcugcccgacgacuucaccggcugugugauugccuggaacagcaacaaccuggacuccaaagucggcggcaacuacaauuaccuguaccggcuguuccggaaguccaaucugaagcccuucgagcgggacaucagcaccgaaaucuaucaggccggcagcaccccuugcaacggcguggaaggcuucaacugcuacuucccacugcaguccuacggcuuucagcccacaaauggcgugggcuaucagcccuacagagugguggugcugagcuucgaacugcugcaugcuccugccacagugugcggcccuaagaaaagcaccaaucucgugaagaacaaaugcgugaacuucaacuucaacggccugaccggcaccggcgugcugacagagagcaacaagaaguuccugccauuccagcaguuuggccgggauaucgccgauaccacagacgccguuagagauccccagacacuggaaauccuggacaucaccccaugcagcuucggcggagugucugugaucaccccuggcaccaacaccagcaaucagguggcagugcuguaccaggacgugaacuguaccgaagugcccguggccauucacgccgaucagcugacaccuacauggcggguguacuccaccggcagcaauguguuucagaccagagccggcugucugaucggagccgagcacgugaacaauagcuacgagugcgacauccccaucggcgcuggcaucugugccagcuaccagacacagacaaacagccccagacgggcuagaagcguggccagccagagcaucauugccuacacaaugucucugggcgccgagaacagcguggccuacuccaacaacucuaucgcuauccccaccaacuucaccaucagcgugaccaccgagauccugccuguguccaugaccaagaccagcguggacugcaccauguacaucugcggcgauuccaccgagugcuccaaccugcugcugcaguacggcagcuucugcacccagcugaauagagcccugacagggaucgccguggaacaggacaagaacacccaagagguguucgcccaagugaagcaaaucuacaagaccccuccuaucaaggacuucggcggcuucaauuucagccagauucugcccgauccuagcaagcccagcaagcggagcuucaucgaggaccugcuguucaacaaagugacacuggccgacgccggcuucaucaagcaguauggcgauugucugggcgacauugccgccagggaucugauuugcgcccagaaguuuaacggacugacagugcugccuccucugcugaccgaugagaugaucgcccaguacacaucugcccugcuggccggcacaaucacaagcggcuggacauuuggagcuggcgccgcucugcagauccccuuugcuaugcagauggccuaccgguucaacggcaucggagugacccagaaugugcuguacgagaaccagaagcugaucgccaaccaguucaacagcgccaucggcaagauccaggacagccugagcagcacagcaagcgcccugggaaagcugcaggacguggucaaccagaaugcccaggcacugaacacccuggucaagcagcuguccuccaacuucggcgccaucagcucugugcugaacgauauccugagcagacuggacccuccugaggccgaggugcagaucgacagacugaucacaggcagacugcagagccuccagacauacgugacccagcagcugaucagagccgccgagauuagagccucugccaaucuggccgccaccaagaugucugagugugugcugggccagagcaagagaguggacuuuugcggcaagggcuaccaccugaugagcuucccucagucugccccucacggcgugguguuucugcacgugacauauguguucgcucaagagaagaauuucaccaccgcuccagccaucugccacgacggcaaagcccacuuuccuagagaaggcguguucguguccaacggcacccauugguucgugacacagcggaacuucuacgagccccagaucaucaccaccgacaacaccuucgugucuggcaacugcgacguugugaucggcauugugaacaauaccguguacgacccucugcagcccgagcuggacagcuucaaagaggaacuggacaaguacuuuaagaaccacacaagccccgacguggaccugggcgauaucagcggaaucaaugccagcgucgugaacauccagaaagagaucgaccggcugaacgagguggccaagaaucugaacgagagccugaucgaccugcaagaacuggggaaguacgagcaguacaucaaguggcccugguacaucuggcugggcuuuaucgccggacugauugccaucgugauggucacaaucaugcuguguugcaugaccagcugcuguagcugccugaagggcuguuguagcuguggcagcugcugcaaguucgacgaggacgauucugagcccgugcugaagggcgugaaacugcacuacaccuga

SEQ ID NO: 12038 - RNA, 3822 nt, Artificial Sequence
  SARS-CoV-2/Wuhan/WIV05/2019__EPI_ISL_402128 spike protein CDS gc mod (1-1273)(K986P_V987P_ H1048Q_H1064N_ H1083N_H1101N)
auguucguguuucuggugcugcugccccugguguccagccagugugugaaccugaccaccagaacacagcugccuccagccuacaccaacagcuucaccagaggcguguacuaccccgacaagguguucagauccagcgugcugcacucuacccaggaccuguuccugccuuucuucagcaacgugaccugguuccacgccauccacguguccggcaccaauggcaccaagagauucgacaaccccgugcugcccuucaacgacgggguguacuuugccagcaccgagaaguccaacaucaucagaggcuggaucuucggcaccacacuggacagcaagacccagagccugcugaucgugaacaacgccaccaacguggucaucaaagugugcgaguuccaguucugcaacgaccccuuccugggcgucuacuaccacaagaacaacaagagcuggauggaaagcgaguuccggguguacagcagcgccaacaacugcaccuucgaguacgugucccagccuuuccugauggaccuggaaggcaagcagggcaacuucaagaaccugcgcgaguucguguucaagaacaucgacggcuacuucaaaaucuacagcaagcacaccccuaucaaccucgugcgggaucugccucagggcuucucugcucuggaaccccugguggaucugcccaucggcaucaacaucacccgguuucagacacugcuggcccugcacagaagcuaccugacaccuggcgauagcagcagcggauggacagcuggugccgccgcuuacuaugugggcuaccugcagccuagaaccuuccugcugaaguacaacgagaacggcaccaucaccgacgccguggauugugcucuggauccucugagcgagacaaagugcacccugaaguccuucaccguggaaaagggcaucuaccagaccagcaacuuccgggugcagcccaccgaauccaucgugcgguuccccaauaucaccaaucugugccccuucggcgagguguucaaugccaccagauucgccucuguguacgccuggaaccggaagcggaucagcaauugcguggccgacuacuccgugcuguacaacuccgccagcuucagcaccuucaagugcuacggcguguccccuaccaagcugaacgaccugugcuucacaaacguguacgccgacagcuucgugauccggggagaugaagugcggcagauugccccuggacagacaggcaagaucgccgacuacaacuacaagcugcccgacgacuucaccggcugugugauugccuggaacagcaacaaccuggacuccaaagucggcggcaacuacaauuaccuguaccggcuguuccggaaguccaaucugaagcccuucgagcgggacaucagcaccgaaaucuaucaggccggcagcaccccuugcaacggcguggaaggcuucaacugcuacuucccacugcaguccuacggcuuucagcccacaaauggcgugggcuaucagcccuacagagugguggugcugagcuucgaacugcugcaugcuccugccacagugugcggcccuaagaaaagcaccaaucucgugaagaacaaaugcgugaacuucaacuucaacggccugaccggcaccggcgugcugacagagagcaacaagaaguuccugccauuccagcaguuuggccgggauaucgccgauaccacagacgccguuagagauccccagacacuggaaauccuggacaucaccccaugcagcuucggcggagugucugugaucaccccuggcaccaacaccagcaaucagguggcagugcuguaccaggacgugaacuguaccgaagugcccguggccauucacgccgaucagcugacaccuacauggcggguguacuccaccggcagcaauguguuucagaccagagccggcugucugaucggagccgagcacgugaacaauagcuacgagugcgacauccccaucggcgcuggcaucugugccagcuaccagacacagacaaacagccccagacgggcuagaagcguggccagccagagcaucauugccuacacaaugucucugggcgccgagaacagcguggccuacuccaacaacucuaucgcuauccccaccaacuucaccaucagcgugaccaccgagauccugccuguguccaugaccaagaccagcguggacugcaccauguacaucugcggcgauuccaccgagugcuccaaccugcugcugcaguacggcagcuucugcacccagcugaauagagcccugacagggaucgccguggaacaggacaagaacacccaagagguguucgcccaagugaagcaaaucuacaagaccccuccuaucaaggacuucggcggcuucaauuucagccagauucugcccgauccuagcaagcccagcaagcggagcuucaucgaggaccugcuguucaacaaagugacacuggccgacgccggcuucaucaagcaguauggcgauugucugggcgacauugccgccagggaucugauuugcgcccagaaguuuaacggacugacagugcugccuccucugcugaccgaugagaugaucgcccaguacacaucugcccugcuggccggcacaaucacaagcggcuggacauuuggagcuggcgccgcucugcagauccccuuugcuaugcagauggccuaccgguucaacggcaucggagugacccagaaugugcuguacgagaaccagaagcugaucgccaaccaguucaacagcgccaucggcaagauccaggacagccugagcagcacagcaagcgcccugggaaagcugcaggacguggucaaccagaaugcccaggcacugaacacccuggucaagcagcuguccuccaacuucggcgccaucagcucugugcugaacgauauccugagcagacuggacccuccugaggccgaggugcagaucgacagacugaucacaggcagacugcagagccuccagacauacgugacccagcagcugaucagagccgccgagauuagagccucugccaaucuggccgccaccaagaugucugagugugugcugggccagagcaagagaguggacuuuugcggcaagggcuaccagcugaugagcuucccucagucugccccucacggcgugguguuucugaacgugacauaugugcccgcucaagagaagaauuucaccaccgcuccagccaucugcaacgacggcaaagcccacuuuccuagagaaggcguguucguguccaacggcaccaacugguucgugacacagcggaacuucuacgagccccagaucaucaccaccgacaacaccuucgugucuggcaacugcgacguugugaucggcauugugaacaauaccguguacgacccucugcagcccgagcuggacagcuucaaagaggaacuggacaaguacuuuaagaaccacacaagccccgacguggaccugggcgauaucagcggaaucaaugccagcgucgugaacauccagaaagagaucgaccggcugaacgagguggccaagaaucugaacgagagccugaucgaccugcaagaacuggggaaguacgagcaguacaucaaguggcccugguacaucuggcugggcuuuaucgccggacugauugccaucgugauggucacaaucaugcuguguugcaugaccagcugcuguagcugccugaagggcuguuguagcuguggcagcugcugcaaguucgacgaggacgauucugagcccgugcugaagggcgugaaacugcacuacaccuga

SEQ ID NO: 12039 - RNA, 3822 nt, Artificial Sequence
  SARS-CoV-2/Wuhan/WIV05/2019__EPI_ISL_402128 spike protein CDS gc mod (1-1273)(I712C_T1077C)
auguucguguuucuggugcugcugccccugguguccagccagugugugaaccugaccaccagaacacagcugccuccagccuacaccaacagcuucaccagaggcguguacuaccccgacaagguguucagauccagcgugcugcacucuacccaggaccuguuccugccuuucuucagcaacgugaccugguuccacgccauccacguguccggcaccaauggcaccaagagauucgacaaccccgugcugcccuucaacgacgggguguacuuugccagcaccgagaaguccaacaucaucagaggcuggaucuucggcaccacacuggacagcaagacccagagccugcugaucgugaacaacgccaccaacguggucaucaaagugugcgaguuccaguucugcaacgaccccuuccugggcgucuacuaccacaagaacaacaagagcuggauggaaagcgaguuccggguguacagcagcgccaacaacugcaccuucgaguacgugucccagccuuuccugauggaccuggaaggcaagcagggcaacuucaagaaccugcgcgaguucguguucaagaacaucgacggcuacuucaaaaucuacagcaagcacaccccuaucaaccucgugcgggaucugccucagggcuucucugcucuggaaccccugguggaucugcccaucggcaucaacaucacccgguuucagacacugcuggcccugcacagaagcuaccugacaccuggcgauagcagcagcggauggacagcuggugccgccgcuuacuaugugggcuaccugcagccuagaaccuuccugcugaaguacaacgagaacggcaccaucaccgacgccguggauugugcucuggauccucugagcgagacaaagugcacccugaaguccuucaccguggaaaagggcaucuaccagaccagcaacuuccgggugcagcccaccgaauccaucgugcgguuccccaauaucaccaaucugugccccuucggcgagguguucaaugccaccagauucgccucuguguacgccuggaaccggaagcggaucagcaauugcguggccgacuacuccgugcuguacaacuccgccagcuucagcaccuucaagugcuacggcguguccccuaccaagcugaacgaccugugcuucacaaacguguacgccgacagcuucgugauccggggagaugaagugcggcagauugccccuggacagacaggcaagaucgccgacuacaacuacaagcugcccgacgacuucaccggcugugugauugccuggaacagcaacaaccuggacuccaaagucggcggcaacuacaauuaccuguaccggcuguuccggaaguccaaucugaagcccuucgagcgggacaucagcaccgaaaucuaucaggccggcagcaccccuugcaacggcguggaaggcuucaacugcuacuucccacugcaguccuacggcuuucagcccacaaauggcgugggcuaucagcccuacagagugguggugcugagcuucgaacugcugcaugcuccugccacagugugcggcccuaagaaaagcaccaaucucgugaagaacaaaugcgugaacuucaacuucaacggccugaccggcaccggcgugcugacagagagcaacaagaaguuccugccauuccagcaguuuggccgggauaucgccgauaccacagacgccguuagagauccccagacacuggaaauccuggacaucaccccaugcagcuucggcggagugucugugaucaccccuggcaccaacaccagcaaucagguggcagugcuguaccaggacgugaacuguaccgaagugcccguggccauucacgccgaucagcugacaccuacauggcggguguacuccaccggcagcaauguguuucagaccagagccggcugucugaucggagccgagcacgugaacaauagcuacgagugcgacauccccaucggcgcuggcaucugugccagcuaccagacacagacaaacagccccagacgggcuagaagcguggccagccagagcaucauugccuacacaaugucucugggcgccgagaacagcguggccuacuccaacaacucuugcgcuauccccaccaacuucaccaucagcgugaccaccgagauccugccuguguccaugaccaagaccagcguggacugcaccauguacaucugcggcgauuccaccgagugcuccaaccugcugcugcaguacggcagcuucugcacccagcugaauagagcccugacagggaucgccguggaacaggacaagaacacccaagagguguucgcccaagugaagcaaaucuacaagaccccuccuaucaaggacuucggcggcuucaauuucagccagauucugcccgauccuagcaagcccagcaagcggagcuucaucgaggaccugcuguucaacaaagugacacuggccgacgccggcuucaucaagcaguauggcgauugucugggcgacauugccgccagggaucugauuugcgcccagaaguuuaacggacugacagugcugccuccucugcugaccgaugagaugaucgcccaguacacaucugcccugcuggccggcacaaucacaagcggcuggacauuuggagcuggcgccgcucugcagauccccuuugcuaugcagauggccuaccgguucaacggcaucggagugacccagaaugugcuguacgagaaccagaagcugaucgccaaccaguucaacagcgccaucggcaagauccaggacagccugagcagcacagcaagcgcccugggaaagcugcaggacguggucaaccagaaugcccaggcacugaacacccuggucaagcagcuguccuccaacuucggcgccaucagcucugugcugaacgauauccugagcagacuggacaaggucgaggccgaggugcagaucgacagacugaucacaggcagacugcagagccuccagacauacgugacccagcagcugaucagagccgccgagauuagagccucugccaaucuggccgccaccaagaugucugagugugugcugggccagagcaagagaguggacuuuugcggcaagggcuaccaccugaugagcuucccucagucugccccucacggcgugguguuucugcacgugacauaugugcccgcucaagagaagaauuucaccugugcuccagccaucugccacgacggcaaagcccacuuuccuagagaaggcguguucguguccaacggcacccauugguucgugacacagcggaacuucuacgagccccagaucaucaccaccgacaacaccuucgugucuggcaacugcgacguugugaucggcauugugaacaauaccguguacgacccucugcagcccgagcuggacagcuucaaagaggaacuggacaaguacuuuaagaaccacacaagccccgacguggaccugggcgauaucagcggaaucaaugccagcgucgugaacauccagaaagagaucgaccggcugaacgagguggccaagaaucugaacgagagccugaucgaccugcaagaacuggggaaguacgagcaguacaucaaguggcccugguacaucuggcugggcuuuaucgccggacugauugccaucgugauggucacaaucaugcuguguugcaugaccagcugcuguagcugccugaagggcuguuguagcuguggcagcugcugcaaguucgacgaggacgauucugagcccgugcugaagggcgugaaacugcacuacaccuga

SEQ ID NO: 12040 - RNA, 3822 nt, Artificial Sequence
  SARS-CoV-2/Wuhan/WIV05/2019__EPI_ISL_402128 spike protein CDS gc mod (1-1273)(I714C_Y1110C)
auguucguguuucuggugcugcugccccugguguccagccagugugugaaccugaccaccagaacacagcugccuccagccuacaccaacagcuucaccagaggcguguacuaccccgacaagguguucagauccagcgugcugcacucuacccaggaccuguuccugccuuucuucagcaacgugaccugguuccacgccauccacguguccggcaccaauggcaccaagagauucgacaaccccgugcugcccuucaacgacgggguguacuuugccagcaccgagaaguccaacaucaucagaggcuggaucuucggcaccacacuggacagcaagacccagagccugcugaucgugaacaacgccaccaacguggucaucaaagugugcgaguuccaguucugcaacgaccccuuccugggcgucuacuaccacaagaacaacaagagcuggauggaaagcgaguuccggguguacagcagcgccaacaacugcaccuucgaguacgugucccagccuuuccugauggaccuggaaggcaagcagggcaacuucaagaaccugcgcgaguucguguucaagaacaucgacggcuacuucaaaaucuacagcaagcacaccccuaucaaccucgugcgggaucugccucagggcuucucugcucuggaaccccugguggaucugcccaucggcaucaacaucacccgguuucagacacugcuggcccugcacagaagcuaccugacaccuggcgauagcagcagcggauggacagcuggugccgccgcuuacuaugugggcuaccugcagccuagaaccuuccugcugaaguacaacgagaacggcaccaucaccgacgccguggauugugcucuggauccucugagcgagacaaagugcacccugaaguccuucaccguggaaaagggcaucuaccagaccagcaacuuccgggugcagcccaccgaauccaucgugcgguuccccaauaucaccaaucugugccccuucggcgagguguucaaugccaccagauucgccucuguguacgccuggaaccggaagcggaucagcaauugcguggccgacuacuccgugcuguacaacuccgccagcuucagcaccuucaagugcuacggcguguccccuaccaagcugaacgaccugugcuucacaaacguguacgccgacagcuucgugauccggggagaugaagugcggcagauugccccuggacagacaggcaagaucgccgacuacaacuacaagcugcccgacgacuucaccggcugugugauugccuggaacagcaacaaccuggacuccaaagucggcggcaacuacaauuaccuguaccggcuguuccggaaguccaaucugaagcccuucgagcgggacaucagcaccgaaaucuaucaggccggcagcaccccuugcaacggcguggaaggcuucaacugcuacuucccacugcaguccuacggcuuucagcccacaaauggcgugggcuaucagcccuacagagugguggugcugagcuucgaacugcugcaugcuccugccacagugugcggcccuaagaaaagcaccaaucucgugaagaacaaaugcgugaacuucaacuucaacggccugaccggcaccggcgugcugacagagagcaacaagaaguuccugccauuccagcaguuuggccgggauaucgccgauaccacagacgccguuagagauccccagacacuggaaauccuggacaucaccccaugcagcuucggcggagugucugugaucaccccuggcaccaacaccagcaaucagguggcagugcuguaccaggacgugaacuguaccgaagugcccguggccauucacgccgaucagcugacaccuacauggcggguguacuccaccggcagcaauguguuucagaccagagccggcugucugaucggagccgagcacgugaacaauagcuacgagugcgacauccccaucggcgcuggcaucugugccagcuaccagacacagacaaacagccccagacgggcuagaagcguggccagccagagcaucauugccuacacaaugucucugggcgccgagaacagcguggccuacuccaacaacucuaucgcuugccccaccaacuucaccaucagcgugaccaccgagauccugccuguguccaugaccaagaccagcguggacugcaccauguacaucugcggcgauuccaccgagugcuccaaccugcugcugcaguacggcagcuucugcacccagcugaauagagcccugacagggaucgccguggaacaggacaagaacacccaagagguguucgcccaagugaagcaaaucuacaagaccccuccuaucaaggacuucggcggcuucaauuucagccagauucugcccgauccuagcaagcccagcaagcggagcuucaucgaggaccugcuguucaacaaagugacacuggccgacgccggcuucaucaagcaguauggcgauugucugggcgacauugccgccagggaucugauuugcgcccagaaguuuaacggacugacagugcugccuccucugcugaccgaugagaugaucgcccaguacacaucugcccugcuggccggcacaaucacaagcggcuggacauuuggagcuggcgccgcucugcagauccccuuugcuaugcagauggccuaccgguucaacggcaucggagugacccagaaugugcuguacgagaaccagaagcugaucgccaaccaguucaacagcgccaucggcaagauccaggacagccugagcagcacagcaagcgcccugggaaagcugcaggacguggucaaccagaaugcccaggcacugaacacccuggucaagcagcuguccuccaacuucggcgccaucagcucugugcugaacgauauccugagcagacuggacaaggucgaggccgaggugcagaucgacagacugaucacaggcagacugcagagccuccagacauacgugacccagcagcugaucagagccgccgagauuagagccucugccaaucuggccgccaccaagaugucugagugugugcugggccagagcaagagaguggacuuuugcggcaagggcuaccaccugaugagcuucccucagucugccccucacggcgugguguuucugcacgugacauaugugcccgcucaagagaagaauuucaccaccgcuccagccaucugccacgacggcaaagcccacuuuccuagagaaggcguguucguguccaacggcacccauugguucgugacacagcggaacuucugugagccccagaucaucaccaccgacaacaccuucgugucuggcaacugcgacguugugaucggcauugugaacaauaccguguacgacccucugcagcccgagcuggacagcuucaaagaggaacuggacaaguacuuuaagaaccacacaagccccgacguggaccugggcgauaucagcggaaucaaugccagcgucgugaacauccagaaagagaucgaccggcugaacgagguggccaagaaucugaacgagagccugaucgaccugcaagaacuggggaaguacgagcaguacaucaaguggcccugguacaucuggcugggcuuuaucgccggacugauugccaucgugauggucacaaucaugcuguguugcaugaccagcugcuguagcugccugaagggcuguuguagcuguggcagcugcugcaaguucgacgaggacgauucugagcccgugcugaagggcgugaaacugcacuacaccuga

SEQ ID NO: 12041 - RNA, 3822 nt, Artificial Sequence
  SARS-CoV-2/Wuhan/WIV05/2019__EPI_ISL_402128 spike protein CDS gc mod (1-1273)(P715C_P1069C)
auguucguguuucuggugcugcugccccugguguccagccagugugugaaccugaccaccagaacacagcugccuccagccuacaccaacagcuucaccagaggcguguacuaccccgacaagguguucagauccagcgugcugcacucuacccaggaccuguuccugccuuucuucagcaacgugaccugguuccacgccauccacguguccggcaccaauggcaccaagagauucgacaaccccgugcugcccuucaacgacgggguguacuuugccagcaccgagaaguccaacaucaucagaggcuggaucuucggcaccacacuggacagcaagacccagagccugcugaucgugaacaacgccaccaacguggucaucaaagugugcgaguuccaguucugcaacgaccccuuccugggcgucuacuaccacaagaacaacaagagcuggauggaaagcgaguuccggguguacagcagcgccaacaacugcaccuucgaguacgugucccagccuuuccugauggaccuggaaggcaagcagggcaacuucaagaaccugcgcgaguucguguucaagaacaucgacggcuacuucaaaaucuacagcaagcacaccccuaucaaccucgugcgggaucugccucagggcuucucugcucuggaaccccugguggaucugcccaucggcaucaacaucacccgguuucagacacugcuggcccugcacagaagcuaccugacaccuggcgauagcagcagcggauggacagcuggugccgccgcuuacuaugugggcuaccugcagccuagaaccuuccugcugaaguacaacgagaacggcaccaucaccgacgccguggauugugcucuggauccucugagcgagacaaagugcacccugaaguccuucaccguggaaaagggcaucuaccagaccagcaacuuccgggugcagcccaccgaauccaucgugcgguuccccaauaucaccaaucugugccccuucggcgagguguucaaugccaccagauucgccucuguguacgccuggaaccggaagcggaucagcaauugcguggccgacuacuccgugcuguacaacuccgccagcuucagcaccuucaagugcuacggcguguccccuaccaagcugaacgaccugugcuucacaaacguguacgccgacagcuucgugauccggggagaugaagugcggcagauugccccuggacagacaggcaagaucgccgacuacaacuacaagcugcccgacgacuucaccggcugugugauugccuggaacagcaacaaccuggacuccaaagucggcggcaacuacaauuaccuguaccggcuguuccggaaguccaaucugaagcccuucgagcgggacaucagcaccgaaaucuaucaggccggcagcaccccuugcaacggcguggaaggcuucaacugcuacuucccacugcaguccuacggcuuucagcccacaaauggcgugggcuaucagcccuacagagugguggugcugagcuucgaacugcugcaugcuccugccacagugugcggcccuaagaaaagcaccaaucucgugaagaacaaaugcgugaacuucaacuucaacggccugaccggcaccggcgugcugacagagagcaacaagaaguuccugccauuccagcaguuuggccgggauaucgccgauaccacagacgccguuagagauccccagacacuggaaauccuggacaucaccccaugcagcuucggcggagugucugugaucaccccuggcaccaacaccagcaaucagguggcagugcuguaccaggacgugaacuguaccgaagugcccguggccauucacgccgaucagcugacaccuacauggcggguguacuccaccggcagcaauguguuucagaccagagccggcugucugaucggagccgagcacgugaacaauagcuacgagugcgacauccccaucggcgcuggcaucugugccagcuaccagacacagacaaacagccccagacgggcuagaagcguggccagccagagcaucauugccuacacaaugucucugggcgccgagaacagcguggccuacuccaacaacucuaucgcuaucugcaccaacuucaccaucagcgugaccaccgagauccugccuguguccaugaccaagaccagcguggacugcaccauguacaucugcggcgauuccaccgagugcuccaaccugcugcugcaguacggcagcuucugcacccagcugaauagagcccugacagggaucgccguggaacaggacaagaacacccaagagguguucgcccaagugaagcaaaucuacaagaccccuccuaucaaggacuucggcggcuucaauuucagccagauucugcccgauccuagcaagcccagcaagcggagcuucaucgaggaccugcuguucaacaaagugacacuggccgacgccggcuucaucaagcaguauggcgauugucugggcgacauugccgccagggaucugauuugcgcccagaaguuuaacggacugacagugcugccuccucugcugaccgaugagaugaucgcccaguacacaucugcccugcuggccggcacaaucacaagcggcuggacauuuggagcuggcgccgcucugcagauccccuuugcuaugcagauggccuaccgguucaacggcaucggagugacccagaaugugcuguacgagaaccagaagcugaucgccaaccaguucaacagcgccaucggcaagauccaggacagccugagcagcacagcaagcgcccugggaaagcugcaggacguggucaaccagaaugcccaggcacugaacacccuggucaagcagcuguccuccaacuucggcgccaucagcucugugcugaacgauauccugagcagacuggacaaggucgaggccgaggugcagaucgacagacugaucacaggcagacugcagagccuccagacauacgugacccagcagcugaucagagccgccgagauuagagccucugccaaucuggccgccaccaagaugucugagugugugcugggccagagcaagagaguggacuuuugcggcaagggcuaccaccugaugagcuucccucagucugccccucacggcgugguguuucugcacgugacauaugugugugcucaagagaagaauuucaccaccgcuccagccaucugccacgacggcaaagcccacuuuccuagagaaggcguguucguguccaacggcacccauugguucgugacacagcggaacuucuacgagccccagaucaucaccaccgacaacaccuucgugucuggcaacugcgacguugugaucggcauugugaacaauaccguguacgacccucugcagcccgagcuggacagcuucaaagaggaacuggacaaguacuuuaagaaccacacaagccccgacguggaccugggcgauaucagcggaaucaaugccagcgucgugaacauccagaaagagaucgaccggcugaacgagguggccaagaaucugaacgagagccugaucgaccugcaagaacuggggaaguacgagcaguacaucaaguggcccugguacaucuggcugggcuuuaucgccggacugauugccaucgugauggucacaaucaugcuguguugcaugaccagcugcuguagcugccugaagggcuguuguagcuguggcagcugcugcaaguucgacgaggacgauucugagcccgugcugaagggcgugaaacugcacuacaccuga

SEQ ID NO: 12042 - RNA, 3822 nt, Artificial Sequence
  SARS-CoV-2/Wuhan/WIV05/2019__EPI_ISL_402128 spike protein CDS gc mod (1-1273)(G889C_L1034C)
auguucguguuucuggugcugcugccccugguguccagccagugugugaaccugaccaccagaacacagcugccuccagccuacaccaacagcuucaccagaggcguguacuaccccgacaagguguucagauccagcgugcugcacucuacccaggaccuguuccugccuuucuucagcaacgugaccugguuccacgccauccacguguccggcaccaauggcaccaagagauucgacaaccccgugcugcccuucaacgacgggguguacuuugccagcaccgagaaguccaacaucaucagaggcuggaucuucggcaccacacuggacagcaagacccagagccugcugaucgugaacaacgccaccaacguggucaucaaagugugcgaguuccaguucugcaacgaccccuuccugggcgucuacuaccacaagaacaacaagagcuggauggaaagcgaguuccggguguacagcagcgccaacaacugcaccuucgaguacgugucccagccuuuccugauggaccuggaaggcaagcagggcaacuucaagaaccugcgcgaguucguguucaagaacaucgacggcuacuucaaaaucuacagcaagcacaccccuaucaaccucgugcgggaucugccucagggcuucucugcucuggaaccccugguggaucugcccaucggcaucaacaucacccgguuucagacacugcuggcccugcacagaagcuaccugacaccuggcgauagcagcagcggauggacagcuggugccgccgcuuacuaugugggcuaccugcagccuagaaccuuccugcugaaguacaacgagaacggcaccaucaccgacgccguggauugugcucuggauccucugagcgagacaaagugcacccugaaguccuucaccguggaaaagggcaucuaccagaccagcaacuuccgggugcagcccaccgaauccaucgugcgguuccccaauaucaccaaucugugccccuucggcgagguguucaaugccaccagauucgccucuguguacgccuggaaccggaagcggaucagcaauugcguggccgacuacuccgugcuguacaacuccgccagcuucagcaccuucaagugcuacggcguguccccuaccaagcugaacgaccugugcuucacaaacguguacgccgacagcuucgugauccggggagaugaagugcggcagauugccccuggacagacaggcaagaucgccgacuacaacuacaagcugcccgacgacuucaccggcugugugauugccuggaacagcaacaaccuggacuccaaagucggcggcaacuacaauuaccuguaccggcuguuccggaaguccaaucugaagcccuucgagcgggacaucagcaccgaaaucuaucaggccggcagcaccccuugcaacggcguggaaggcuucaacugcuacuucccacugcaguccuacggcuuucagcccacaaauggcgugggcuaucagcccuacagagugguggugcugagcuucgaacugcugcaugcuccugccacagugugcggcccuaagaaaagcaccaaucucgugaagaacaaaugcgugaacuucaacuucaacggccugaccggcaccggcgugcugacagagagcaacaagaaguuccugccauuccagcaguuuggccgggauaucgccgauaccacagacgccguuagagauccccagacacuggaaauccuggacaucaccccaugcagcuucggcggagugucugugaucaccccuggcaccaacaccagcaaucagguggcagugcuguaccaggacgugaacuguaccgaagugcccguggccauucacgccgaucagcugacaccuacauggcggguguacuccaccggcagcaauguguuucagaccagagccggcugucugaucggagccgagcacgugaacaauagcuacgagugcgacauccccaucggcgcuggcaucugugccagcuaccagacacagacaaacagccccagacgggcuagaagcguggccagccagagcaucauugccuacacaaugucucugggcgccgagaacagcguggccuacuccaacaacucuaucgcuauccccaccaacuucaccaucagcgugaccaccgagauccugccuguguccaugaccaagaccagcguggacugcaccauguacaucugcggcgauuccaccgagugcuccaaccugcugcugcaguacggcagcuucugcacccagcugaauagagcccugacagggaucgccguggaacaggacaagaacacccaagagguguucgcccaagugaagcaaaucuacaagaccccuccuaucaaggacuucggcggcuucaauuucagccagauucugcccgauccuagcaagcccagcaagcggagcuucaucgaggaccugcuguucaacaaagugacacuggccgacgccggcuucaucaagcaguauggcgauugucugggcgacauugccgccagggaucugauuugcgcccagaaguuuaacggacugacagugcugccuccucugcugaccgaugagaugaucgcccaguacacaucugcccugcuggccggcacaaucacaagcggcuggacauuuugcgcuggcgccgcucugcagauccccuuugcuaugcagauggccuaccgguucaacggcaucggagugacccagaaugugcuguacgagaaccagaagcugaucgccaaccaguucaacagcgccaucggcaagauccaggacagccugagcagcacagcaagcgcccugggaaagcugcaggacguggucaaccagaaugcccaggcacugaacacccuggucaagcagcuguccuccaacuucggcgccaucagcucugugcugaacgauauccugagcagacuggacaaggucgaggccgaggugcagaucgacagacugaucacaggcagacugcagagccuccagacauacgugacccagcagcugaucagagccgccgagauuagagccucugccaaucuggccgccaccaagaugucugaguguguguguggccagagcaagagaguggacuuuugcggcaagggcuaccaccugaugagcuucccucagucugccccucacggcgugguguuucugcacgugacauaugugcccgcucaagagaagaauuucaccaccgcuccagccaucugccacgacggcaaagcccacuuuccuagagaaggcguguucguguccaacggcacccauugguucgugacacagcggaacuucuacgagccccagaucaucaccaccgacaacaccuucgugucuggcaacugcgacguugugaucggcauugugaacaauaccguguacgacccucugcagcccgagcuggacagcuucaaagaggaacuggacaaguacuuuaagaaccacacaagccccgacguggaccugggcgauaucagcggaaucaaugccagcgucgugaacauccagaaagagaucgaccggcugaacgagguggccaagaaucugaacgagagccugaucgaccugcaagaacuggggaaguacgagcaguacaucaaguggcccugguacaucuggcugggcuuuaucgccggacugauugccaucgugauggucacaaucaugcuguguugcaugaccagcugcuguagcugccugaagggcuguuguagcuguggcagcugcugcaaguucgacgaggacgauucugagcccgugcugaagggcgugaaacugcacuacaccuga

SEQ ID NO: 12043 - RNA, 3822 nt, Artificial Sequence
  SARS-CoV-2/Wuhan/WIV05/2019__EPI_ISL_402128 spike protein CDS gc mod (1-1273)(I909C_Y1047C)
auguucguguuucuggugcugcugccccugguguccagccagugugugaaccugaccaccagaacacagcugccuccagccuacaccaacagcuucaccagaggcguguacuaccccgacaagguguucagauccagcgugcugcacucuacccaggaccuguuccugccuuucuucagcaacgugaccugguuccacgccauccacguguccggcaccaauggcaccaagagauucgacaaccccgugcugcccuucaacgacgggguguacuuugccagcaccgagaaguccaacaucaucagaggcuggaucuucggcaccacacuggacagcaagacccagagccugcugaucgugaacaacgccaccaacguggucaucaaagugugcgaguuccaguucugcaacgaccccuuccugggcgucuacuaccacaagaacaacaagagcuggauggaaagcgaguuccggguguacagcagcgccaacaacugcaccuucgaguacgugucccagccuuuccugauggaccuggaaggcaagcagggcaacuucaagaaccugcgcgaguucguguucaagaacaucgacggcuacuucaaaaucuacagcaagcacaccccuaucaaccucgugcgggaucugccucagggcuucucugcucuggaaccccugguggaucugcccaucggcaucaacaucacccgguuucagacacugcuggcccugcacagaagcuaccugacaccuggcgauagcagcagcggauggacagcuggugccgccgcuuacuaugugggcuaccugcagccuagaaccuuccugcugaaguacaacgagaacggcaccaucaccgacgccguggauugugcucuggauccucugagcgagacaaagugcacccugaaguccuucaccguggaaaagggcaucuaccagaccagcaacuuccgggugcagcccaccgaauccaucgugcgguuccccaauaucaccaaucugugccccuucggcgagguguucaaugccaccagauucgccucuguguacgccuggaaccggaagcggaucagcaauugcguggccgacuacuccgugcuguacaacuccgccagcuucagcaccuucaagugcuacggcguguccccuaccaagcugaacgaccugugcuucacaaacguguacgccgacagcuucgugauccggggagaugaagugcggcagauugccccuggacagacaggcaagaucgccgacuacaacuacaagcugcccgacgacuucaccggcugugugauugccuggaacagcaacaaccuggacuccaaagucggcggcaacuacaauuaccuguaccggcuguuccggaaguccaaucugaagcccuucgagcgggacaucagcaccgaaaucuaucaggccggcagcaccccuugcaacggcguggaaggcuucaacugcuacuucccacugcaguccuacggcuuucagcccacaaauggcgugggcuaucagcccuacagagugguggugcugagcuucgaacugcugcaugcuccugccacagugugcggcccuaagaaaagcaccaaucucgugaagaacaaaugcgugaacuucaacuucaacggccugaccggcaccggcgugcugacagagagcaacaagaaguuccugccauuccagcaguuuggccgggauaucgccgauaccacagacgccguuagagauccccagacacuggaaauccuggacaucaccccaugcagcuucggcggagugucugugaucaccccuggcaccaacaccagcaaucagguggcagugcuguaccaggacgugaacuguaccgaagugcccguggccauucacgccgaucagcugacaccuacauggcggguguacuccaccggcagcaauguguuucagaccagagccggcugucugaucggagccgagcacgugaacaauagcuacgagugcgacauccccaucggcgcuggcaucugugccagcuaccagacacagacaaacagccccagacgggcuagaagcguggccagccagagcaucauugccuacacaaugucucugggcgccgagaacagcguggccuacuccaacaacucuaucgcuauccccaccaacuucaccaucagcgugaccaccgagauccugccuguguccaugaccaagaccagcguggacugcaccauguacaucugcggcgauuccaccgagugcuccaaccugcugcugcaguacggcagcuucugcacccagcugaauagagcccugacagggaucgccguggaacaggacaagaacacccaagagguguucgcccaagugaagcaaaucuacaagaccccuccuaucaaggacuucggcggcuucaauuucagccagauucugcccgauccuagcaagcccagcaagcggagcuucaucgaggaccugcuguucaacaaagugacacuggccgacgccggcuucaucaagcaguauggcgauugucugggcgacauugccgccagggaucugauuugcgcccagaaguuuaacggacugacagugcugccuccucugcugaccgaugagaugaucgcccaguacacaucugcccugcuggccggcacaaucacaagcggcuggacauuuggagcuggcgccgcucugcagauccccuuugcuaugcagauggccuaccgguucaacggcugcggagugacccagaaugugcuguacgagaaccagaagcugaucgccaaccaguucaacagcgccaucggcaagauccaggacagccugagcagcacagcaagcgcccugggaaagcugcaggacguggucaaccagaaugcccaggcacugaacacccuggucaagcagcuguccuccaacuucggcgccaucagcucugugcugaacgauauccugagcagacuggacaaggucgaggccgaggugcagaucgacagacugaucacaggcagacugcagagccuccagacauacgugacccagcagcugaucagagccgccgagauuagagccucugccaaucuggccgccaccaagaugucugagugugugcugggccagagcaagagaguggacuuuugcggcaagggcugucaccugaugagcuucccucagucugccccucacggcgugguguuucugcacgugacauaugugcccgcucaagagaagaauuucaccaccgcuccagccaucugccacgacggcaaagcccacuuuccuagagaaggcguguucguguccaacggcacccauugguucgugacacagcggaacuucuacgagccccagaucaucaccaccgacaacaccuucgugucuggcaacugcgacguugugaucggcauugugaacaauaccguguacgacccucugcagcccgagcuggacagcuucaaagaggaacuggacaaguacuuuaagaaccacacaagccccgacguggaccugggcgauaucagcggaaucaaugccagcgucgugaacauccagaaagagaucgaccggcugaacgagguggccaagaaucugaacgagagccugaucgaccugcaagaacuggggaaguacgagcaguacaucaaguggcccugguacaucuggcugggcuuuaucgccggacugauugccaucgugauggucacaaucaugcuguguugcaugaccagcugcuguagcugccugaagggcuguuguagcuguggcagcugcugcaaguucgacgaggacgauucugagcccgugcugaagggcgugaaacugcacuacaccuga

SEQ ID NO: 12044 - RNA, 3822 nt, Artificial Sequence
  SARS-CoV-2/Wuhan/WIV05/2019__EPI_ISL_402128 spike protein CDS gc mod (1-1273)(Q965C_S1003C)
auguucguguuucuggugcugcugccccugguguccagccagugugugaaccugaccaccagaacacagcugccuccagccuacaccaacagcuucaccagaggcguguacuaccccgacaagguguucagauccagcgugcugcacucuacccaggaccuguuccugccuuucuucagcaacgugaccugguuccacgccauccacguguccggcaccaauggcaccaagagauucgacaaccccgugcugcccuucaacgacgggguguacuuugccagcaccgagaaguccaacaucaucagaggcuggaucuucggcaccacacuggacagcaagacccagagccugcugaucgugaacaacgccaccaacguggucaucaaagugugcgaguuccaguucugcaacgaccccuuccugggcgucuacuaccacaagaacaacaagagcuggauggaaagcgaguuccggguguacagcagcgccaacaacugcaccuucgaguacgugucccagccuuuccugauggaccuggaaggcaagcagggcaacuucaagaaccugcgcgaguucguguucaagaacaucgacggcuacuucaaaaucuacagcaagcacaccccuaucaaccucgugcgggaucugccucagggcuucucugcucuggaaccccugguggaucugcccaucggcaucaacaucacccgguuucagacacugcuggcccugcacagaagcuaccugacaccuggcgauagcagcagcggauggacagcuggugccgccgcuuacuaugugggcuaccugcagccuagaaccuuccugcugaaguacaacgagaacggcaccaucaccgacgccguggauugugcucuggauccucugagcgagacaaagugcacccugaaguccuucaccguggaaaagggcaucuaccagaccagcaacuuccgggugcagcccaccgaauccaucgugcgguuccccaauaucaccaaucugugccccuucggcgagguguucaaugccaccagauucgccucuguguacgccuggaaccggaagcggaucagcaauugcguggccgacuacuccgugcuguacaacuccgccagcuucagcaccuucaagugcuacggcguguccccuaccaagcugaacgaccugugcuucacaaacguguacgccgacagcuucgugauccggggagaugaagugcggcagauugccccuggacagacaggcaagaucgccgacuacaacuacaagcugcccgacgacuucaccggcugugugauugccuggaacagcaacaaccuggacuccaaagucggcggcaacuacaauuaccuguaccggcuguuccggaaguccaaucugaagcccuucgagcgggacaucagcaccgaaaucuaucaggccggcagcaccccuugcaacggcguggaaggcuucaacugcuacuucccacugcaguccuacggcuuucagcccacaaauggcgugggcuaucagcccuacagagugguggugcugagcuucgaacugcugcaugcuccugccacagugugcggcccuaagaaaagcaccaaucucgugaagaacaaaugcgugaacuucaacuucaacggccugaccggcaccggcgugcugacagagagcaacaagaaguuccugccauuccagcaguuuggccgggauaucgccgauaccacagacgccguuagagauccccagacacuggaaauccuggacaucaccccaugcagcuucggcggagugucugugaucaccccuggcaccaacaccagcaaucagguggcagugcuguaccaggacgugaacuguaccgaagugcccguggccauucacgccgaucagcugacaccuacauggcggguguacuccaccggcagcaauguguuucagaccagagccggcugucugaucggagccgagcacgugaacaauagcuacgagugcgacauccccaucggcgcuggcaucugugccagcuaccagacacagacaaacagccccagacgggcuagaagcguggccagccagagcaucauugccuacacaaugucucugggcgccgagaacagcguggccuacuccaacaacucuaucgcuauccccaccaacuucaccaucagcgugaccaccgagauccugccuguguccaugaccaagaccagcguggacugcaccauguacaucugcggcgauuccaccgagugcuccaaccugcugcugcaguacggcagcuucugcacccagcugaauagagcccugacagggaucgccguggaacaggacaagaacacccaagagguguucgcccaagugaagcaaaucuacaagaccccuccuaucaaggacuucggcggcuucaauuucagccagauucugcccgauccuagcaagcccagcaagcggagcuucaucgaggaccugcuguucaacaaagugacacuggccgacgccggcuucaucaagcaguauggcgauugucugggcgacauugccgccagggaucugauuugcgcccagaaguuuaacggacugacagugcugccuccucugcugaccgaugagaugaucgcccaguacacaucugcccugcuggccggcacaaucacaagcggcuggacauuuggagcuggcgccgcucugcagauccccuuugcuaugcagauggccuaccgguucaacggcaucggagugacccagaaugugcuguacgagaaccagaagcugaucgccaaccaguucaacagcgccaucggcaagauccaggacagccugagcagcacagcaagcgcccugggaaagcugcaggacguggucaaccagaaugcccaggcacugaacacccuggucaagugccuguccuccaacuucggcgccaucagcucugugcugaacgauauccugagcagacuggacaaggucgaggccgaggugcagaucgacagacugaucacaggcagacugcagugucuccagacauacgugacccagcagcugaucagagccgccgagauuagagccucugccaaucuggccgccaccaagaugucugagugugugcugggccagagcaagagaguggacuuuugcggcaagggcuaccaccugaugagcuucccucagucugccccucacggcgugguguuucugcacgugacauaugugcccgcucaagagaagaauuucaccaccgcuccagccaucugccacgacggcaaagcccacuuuccuagagaaggcguguucguguccaacggcacccauugguucgugacacagcggaacuucuacgagccccagaucaucaccaccgacaacaccuucgugucuggcaacugcgacguugugaucggcauugugaacaauaccguguacgacccucugcagcccgagcuggacagcuucaaagaggaacuggacaaguacuuuaagaaccacacaagccccgacguggaccugggcgauaucagcggaaucaaugccagcgucgugaacauccagaaagagaucgaccggcugaacgagguggccaagaaucugaacgagagccugaucgaccugcaagaacuggggaaguacgagcaguacaucaaguggcccugguacaucuggcugggcuuuaucgccggacugauugccaucgugauggucacaaucaugcuguguugcaugaccagcugcuguagcugccugaagggcuguuguagcuguggcagcugcugcaaguucgacgaggacgauucugagcccgugcugaagggcgugaaacugcacuacaccuga

SEQ ID NO: 12045 - RNA, 3822 nt, Artificial Sequence
  SARS-CoV-2/Wuhan/WIV05/2019__EPI_ISL_402128 spike protein CDS gc mod (1-1273)(F970C_G999C)
auguucguguuucuggugcugcugccccugguguccagccagugugugaaccugaccaccagaacacagcugccuccagccuacaccaacagcuucaccagaggcguguacuaccccgacaagguguucagauccagcgugcugcacucuacccaggaccuguuccugccuuucuucagcaacgugaccugguuccacgccauccacguguccggcaccaauggcaccaagagauucgacaaccccgugcugcccuucaacgacgggguguacuuugccagcaccgagaaguccaacaucaucagaggcuggaucuucggcaccacacuggacagcaagacccagagccugcugaucgugaacaacgccaccaacguggucaucaaagugugcgaguuccaguucugcaacgaccccuuccugggcgucuacuaccacaagaacaacaagagcuggauggaaagcgaguuccggguguacagcagcgccaacaacugcaccuucgaguacgugucccagccuuuccugauggaccuggaaggcaagcagggcaacuucaagaaccugcgcgaguucguguucaagaacaucgacggcuacuucaaaaucuacagcaagcacaccccuaucaaccucgugcgggaucugccucagggcuucucugcucuggaaccccugguggaucugcccaucggcaucaacaucacccgguuucagacacugcuggcccugcacagaagcuaccugacaccuggcgauagcagcagcggauggacagcuggugccgccgcuuacuaugugggcuaccugcagccuagaaccuuccugcugaaguacaacgagaacggcaccaucaccgacgccguggauugugcucuggauccucugagcgagacaaagugcacccugaaguccuucaccguggaaaagggcaucuaccagaccagcaacuuccgggugcagcccaccgaauccaucgugcgguuccccaauaucaccaaucugugccccuucggcgagguguucaaugccaccagauucgccucuguguacgccuggaaccggaagcggaucagcaauugcguggccgacuacuccgugcuguacaacuccgccagcuucagcaccuucaagugcuacggcguguccccuaccaagcugaacgaccugugcuucacaaacguguacgccgacagcuucgugauccggggagaugaagugcggcagauugccccuggacagacaggcaagaucgccgacuacaacuacaagcugcccgacgacuucaccggcugugugauugccuggaacagcaacaaccuggacuccaaagucggcggcaacuacaauuaccuguaccggcuguuccggaaguccaaucugaagcccuucgagcgggacaucagcaccgaaaucuaucaggccggcagcaccccuugcaacggcguggaaggcuucaacugcuacuucccacugcaguccuacggcuuucagcccacaaauggcgugggcuaucagcccuacagagugguggugcugagcuucgaacugcugcaugcuccugccacagugugcggcccuaagaaaagcaccaaucucgugaagaacaaaugcgugaacuucaacuucaacggccugaccggcaccggcgugcugacagagagcaacaagaaguuccugccauuccagcaguuuggccgggauaucgccgauaccacagacgccguuagagauccccagacacuggaaauccuggacaucaccccaugcagcuucggcggagugucugugaucaccccuggcaccaacaccagcaaucagguggcagugcuguaccaggacgugaacuguaccgaagugcccguggccauucacgccgaucagcugacaccuacauggcggguguacuccaccggcagcaauguguuucagaccagagccggcugucugaucggagccgagcacgugaacaauagcuacgagugcgacauccccaucggcgcuggcaucugugccagcuaccagacacagacaaacagccccagacgggcuagaagcguggccagccagagcaucauugccuacacaaugucucugggcgccgagaacagcguggccuacuccaacaacucuaucgcuauccccaccaacuucaccaucagcgugaccaccgagauccugccuguguccaugaccaagaccagcguggacugcaccauguacaucugcggcgauuccaccgagugcuccaaccugcugcugcaguacggcagcuucugcacccagcugaauagagcccugacagggaucgccguggaacaggacaagaacacccaagagguguucgcccaagugaagcaaaucuacaagaccccuccuaucaaggacuucggcggcuucaauuucagccagauucugcccgauccuagcaagcccagcaagcggagcuucaucgaggaccugcuguucaacaaagugacacuggccgacgccggcuucaucaagcaguauggcgauugucugggcgacauugccgccagggaucugauuugcgcccagaaguuuaacggacugacagugcugccuccucugcugaccgaugagaugaucgcccaguacacaucugcccugcuggccggcacaaucacaagcggcuggacauuuggagcuggcgccgcucugcagauccccuuugcuaugcagauggccuaccgguucaacggcaucggagugacccagaaugugcuguacgagaaccagaagcugaucgccaaccaguucaacagcgccaucggcaagauccaggacagccugagcagcacagcaagcgcccugggaaagcugcaggacguggucaaccagaaugcccaggcacugaacacccuggucaagcagcuguccuccaacugcggcgccaucagcucugugcugaacgauauccugagcagacuggacaaggucgaggccgaggugcagaucgacagacugaucacauguagacugcagagccuccagacauacgugacccagcagcugaucagagccgccgagauuagagccucugccaaucuggccgccaccaagaugucugagugugugcugggccagagcaagagaguggacuuuugcggcaagggcuaccaccugaugagcuucccucagucugccccucacggcgugguguuucugcacgugacauaugugcccgcucaagagaagaauuucaccaccgcuccagccaucugccacgacggcaaagcccacuuuccuagagaaggcguguucguguccaacggcacccauugguucgugacacagcggaacuucuacgagccccagaucaucaccaccgacaacaccuucgugucuggcaacugcgacguugugaucggcauugugaacaauaccguguacgacccucugcagcccgagcuggacagcuucaaagaggaacuggacaaguacuuuaagaaccacacaagccccgacguggaccugggcgauaucagcggaaucaaugccagcgucgugaacauccagaaagagaucgaccggcugaacgagguggccaagaaucugaacgagagccugaucgaccugcaagaacuggggaaguacgagcaguacaucaaguggcccugguacaucuggcugggcuuuaucgccggacugauugccaucgugauggucacaaucaugcuguguugcaugaccagcugcuguagcugccugaagggcuguuguagcuguggcagcugcugcaaguucgacgaggacgauucugagcccgugcugaagggcgugaaacugcacuacaccuga

SEQ ID NO: 12046 - RNA, 3822 nt, Artificial Sequence
  SARS-CoV-2/Wuhan/WIV05/2019__EPI_ISL_402128 spike protein CDS gc mod (1-1273)(A972C_R995C)
auguucguguuucuggugcugcugccccugguguccagccagugugugaaccugaccaccagaacacagcugccuccagccuacaccaacagcuucaccagaggcguguacuaccccgacaagguguucagauccagcgugcugcacucuacccaggaccuguuccugccuuucuucagcaacgugaccugguuccacgccauccacguguccggcaccaauggcaccaagagauucgacaaccccgugcugcccuucaacgacgggguguacuuugccagcaccgagaaguccaacaucaucagaggcuggaucuucggcaccacacuggacagcaagacccagagccugcugaucgugaacaacgccaccaacguggucaucaaagugugcgaguuccaguucugcaacgaccccuuccugggcgucuacuaccacaagaacaacaagagcuggauggaaagcgaguuccggguguacagcagcgccaacaacugcaccuucgaguacgugucccagccuuuccugauggaccuggaaggcaagcagggcaacuucaagaaccugcgcgaguucguguucaagaacaucgacggcuacuucaaaaucuacagcaagcacaccccuaucaaccucgugcgggaucugccucagggcuucucugcucuggaaccccugguggaucugcccaucggcaucaacaucacccgguuucagacacugcuggcccugcacagaagcuaccugacaccuggcgauagcagcagcggauggacagcuggugccgccgcuuacuaugugggcuaccugcagccuagaaccuuccugcugaaguacaacgagaacggcaccaucaccgacgccguggauugugcucuggauccucugagcgagacaaagugcacccugaaguccuucaccguggaaaagggcaucuaccagaccagcaacuuccgggugcagcccaccgaauccaucgugcgguuccccaauaucaccaaucugugccccuucggcgagguguucaaugccaccagauucgccucuguguacgccuggaaccggaagcggaucagcaauugcguggccgacuacuccgugcuguacaacuccgccagcuucagcaccuucaagugcuacggcguguccccuaccaagcugaacgaccugugcuucacaaacguguacgccgacagcuucgugauccggggagaugaagugcggcagauugccccuggacagacaggcaagaucgccgacuacaacuacaagcugcccgacgacuucaccggcugugugauugccuggaacagcaacaaccuggacuccaaagucggcggcaacuacaauuaccuguaccggcuguuccggaaguccaaucugaagcccuucgagcgggacaucagcaccgaaaucuaucaggccggcagcaccccuugcaacggcguggaaggcuucaacugcuacuucccacugcaguccuacggcuuucagcccacaaauggcgugggcuaucagcccuacagagugguggugcugagcuucgaacugcugcaugcuccugccacagugugcggcccuaagaaaagcaccaaucucgugaagaacaaaugcgugaacuucaacuucaacggccugaccggcaccggcgugcugacagagagcaacaagaaguuccugccauuccagcaguuuggccgggauaucgccgauaccacagacgccguuagagauccccagacacuggaaauccuggacaucaccccaugcagcuucggcggagugucugugaucaccccuggcaccaacaccagcaaucagguggcagugcuguaccaggacgugaacuguaccgaagugcccguggccauucacgccgaucagcugacaccuacauggcggguguacuccaccggcagcaauguguuucagaccagagccggcugucugaucggagccgagcacgugaacaauagcuacgagugcgacauccccaucggcgcuggcaucugugccagcuaccagacacagacaaacagccccagacgggcuagaagcguggccagccagagcaucauugccuacacaaugucucugggcgccgagaacagcguggccuacuccaacaacucuaucgcuauccccaccaacuucaccaucagcgugaccaccgagauccugccuguguccaugaccaagaccagcguggacugcaccauguacaucugcggcgauuccaccgagugcuccaaccugcugcugcaguacggcagcuucugcacccagcugaauagagcccugacagggaucgccguggaacaggacaagaacacccaagagguguucgcccaagugaagcaaaucuacaagaccccuccuaucaaggacuucggcggcuucaauuucagccagauucugcccgauccuagcaagcccagcaagcggagcuucaucgaggaccugcuguucaacaaagugacacuggccgacgccggcuucaucaagcaguauggcgauugucugggcgacauugccgccagggaucugauuugcgcccagaaguuuaacggacugacagugcugccuccucugcugaccgaugagaugaucgcccaguacacaucugcccugcuggccggcacaaucacaagcggcuggacauuuggagcuggcgccgcucugcagauccccuuugcuaugcagauggccuaccgguucaacggcaucggagugacccagaaugugcuguacgagaaccagaagcugaucgccaaccaguucaacagcgccaucggcaagauccaggacagccugagcagcacagcaagcgcccugggaaagcugcaggacguggucaaccagaaugcccaggcacugaacacccuggucaagcagcuguccuccaacuucggcugcaucagcucugugcugaacgauauccugagcagacuggacaaggucgaggccgaggugcagaucgacugucugaucacaggcagacugcagagccuccagacauacgugacccagcagcugaucagagccgccgagauuagagccucugccaaucuggccgccaccaagaugucugagugugugcugggccagagcaagagaguggacuuuugcggcaagggcuaccaccugaugagcuucccucagucugccccucacggcgugguguuucugcacgugacauaugugcccgcucaagagaagaauuucaccaccgcuccagccaucugccacgacggcaaagcccacuuuccuagagaaggcguguucguguccaacggcacccauugguucgugacacagcggaacuucuacgagccccagaucaucaccaccgacaacaccuucgugucuggcaacugcgacguugugaucggcauugugaacaauaccguguacgacccucugcagcccgagcuggacagcuucaaagaggaacuggacaaguacuuuaagaaccacacaagccccgacguggaccugggcgauaucagcggaaucaaugccagcgucgugaacauccagaaagagaucgaccggcugaacgagguggccaagaaucugaacgagagccugaucgaccugcaagaacuggggaaguacgagcaguacaucaaguggcccugguacaucuggcugggcuuuaucgccggacugauugccaucgugauggucacaaucaugcuguguugcaugaccagcugcuguagcugccugaagggcuguuguagcuguggcagcugcugcaaguucgacgaggacgauucugagcccgugcugaagggcgugaaacugcacuacaccuga

SEQ ID NO: 12047 - RNA, 3822 nt, Artificial Sequence
  SARS-CoV-2/Wuhan/WIV05/2019__EPI_ISL_402128 spike protein CDS gc mod (1-1273)(A890C_V1040C)
auguucguguuucuggugcugcugccccugguguccagccagugugugaaccugaccaccagaacacagcugccuccagccuacaccaacagcuucaccagaggcguguacuaccccgacaagguguucagauccagcgugcugcacucuacccaggaccuguuccugccuuucuucagcaacgugaccugguuccacgccauccacguguccggcaccaauggcaccaagagauucgacaaccccgugcugcccuucaacgacgggguguacuuugccagcaccgagaaguccaacaucaucagaggcuggaucuucggcaccacacuggacagcaagacccagagccugcugaucgugaacaacgccaccaacguggucaucaaagugugcgaguuccaguucugcaacgaccccuuccugggcgucuacuaccacaagaacaacaagagcuggauggaaagcgaguuccggguguacagcagcgccaacaacugcaccuucgaguacgugucccagccuuuccugauggaccuggaaggcaagcagggcaacuucaagaaccugcgcgaguucguguucaagaacaucgacggcuacuucaaaaucuacagcaagcacaccccuaucaaccucgugcgggaucugccucagggcuucucugcucuggaaccccugguggaucugcccaucggcaucaacaucacccgguuucagacacugcuggcccugcacagaagcuaccugacaccuggcgauagcagcagcggauggacagcuggugccgccgcuuacuaugugggcuaccugcagccuagaaccuuccugcugaaguacaacgagaacggcaccaucaccgacgccguggauugugcucuggauccucugagcgagacaaagugcacccugaaguccuucaccguggaaaagggcaucuaccagaccagcaacuuccgggugcagcccaccgaauccaucgugcgguuccccaauaucaccaaucugugccccuucggcgagguguucaaugccaccagauucgccucuguguacgccuggaaccggaagcggaucagcaauugcguggccgacuacuccgugcuguacaacuccgccagcuucagcaccuucaagugcuacggcguguccccuaccaagcugaacgaccugugcuucacaaacguguacgccgacagcuucgugauccggggagaugaagugcggcagauugccccuggacagacaggcaagaucgccgacuacaacuacaagcugcccgacgacuucaccggcugugugauugccuggaacagcaacaaccuggacuccaaagucggcggcaacuacaauuaccuguaccggcuguuccggaaguccaaucugaagcccuucgagcgggacaucagcaccgaaaucuaucaggccggcagcaccccuugcaacggcguggaaggcuucaacugcuacuucccacugcaguccuacggcuuucagcccacaaauggcgugggcuaucagcccuacagagugguggugcugagcuucgaacugcugcaugcuccugccacagugugcggcccuaagaaaagcaccaaucucgugaagaacaaaugcgugaacuucaacuucaacggccugaccggcaccggcgugcugacagagagcaacaagaaguuccugccauuccagcaguuuggccgggauaucgccgauaccacagacgccguuagagauccccagacacuggaaauccuggacaucaccccaugcagcuucggcggagugucugugaucaccccuggcaccaacaccagcaaucagguggcagugcuguaccaggacgugaacuguaccgaagugcccguggccauucacgccgaucagcugacaccuacauggcggguguacuccaccggcagcaauguguuucagaccagagccggcugucugaucggagccgagcacgugaacaauagcuacgagugcgacauccccaucggcgcuggcaucugugccagcuaccagacacagacaaacagccccagacgggcuagaagcguggccagccagagcaucauugccuacacaaugucucugggcgccgagaacagcguggccuacuccaacaacucuaucgcuauccccaccaacuucaccaucagcgugaccaccgagauccugccuguguccaugaccaagaccagcguggacugcaccauguacaucugcggcgauuccaccgagugcuccaaccugcugcugcaguacggcagcuucugcacccagcugaauagagcccugacagggaucgccguggaacaggacaagaacacccaagagguguucgcccaagugaagcaaaucuacaagaccccuccuaucaaggacuucggcggcuucaauuucagccagauucugcccgauccuagcaagcccagcaagcggagcuucaucgaggaccugcuguucaacaaagugacacuggccgacgccggcuucaucaagcaguauggcgauugucugggcgacauugccgccagggaucugauuugcgcccagaaguuuaacggacugacagugcugccuccucugcugaccgaugagaugaucgcccaguacacaucugcccugcuggccggcacaaucacaagcggcuggacauuuggaugcggcgccgcucugcagauccccuuugcuaugcagauggccuaccgguucaacggcaucggagugacccagaaugugcuguacgagaaccagaagcugaucgccaaccaguucaacagcgccaucggcaagauccaggacagccugagcagcacagcaagcgcccugggaaagcugcaggacguggucaaccagaaugcccaggcacugaacacccuggucaagcagcuguccuccaacuucggcgccaucagcucugugcugaacgauauccugagcagacuggacaaggucgaggccgaggugcagaucgacagacugaucacaggcagacugcagagccuccagacauacgugacccagcagcugaucagagccgccgagauuagagccucugccaaucuggccgccaccaagaugucugagugugugcugggccagagcaagagaugugacuuuugcggcaagggcuaccaccugaugagcuucccucagucugccccucacggcgugguguuucugcacgugacauaugugcccgcucaagagaagaauuucaccaccgcuccagccaucugccacgacggcaaagcccacuuuccuagagaaggcguguucguguccaacggcacccauugguucgugacacagcggaacuucuacgagccccagaucaucaccaccgacaacaccuucgugucuggcaacugcgacguugugaucggcauugugaacaauaccguguacgacccucugcagcccgagcuggacagcuucaaagaggaacuggacaaguacuuuaagaaccacacaagccccgacguggaccugggcgauaucagcggaaucaaugccagcgucgugaacauccagaaagagaucgaccggcugaacgagguggccaagaaucugaacgagagccugaucgaccugcaagaacuggggaaguacgagcaguacaucaaguggcccugguacaucuggcugggcuuuaucgccggacugauugccaucgugauggucacaaucaugcuguguugcaugaccagcugcuguagcugccugaagggcuguuguagcuguggcagcugcugcaaguucgacgaggacgauucugagcccgugcugaagggcgugaaacugcacuacaccuga

SEQ ID NO: 12048 - RNA, 3822 nt, Artificial Sequence
  SARS-CoV-2/Wuhan/WIV05/2019__EPI_ISL_402128 spike protein CDS gc mod (1-1273)(T874C_S1055C)
auguucguguuucuggugcugcugccccugguguccagccagugugugaaccugaccaccagaacacagcugccuccagccuacaccaacagcuucaccagaggcguguacuaccccgacaagguguucagauccagcgugcugcacucuacccaggaccuguuccugccuuucuucagcaacgugaccugguuccacgccauccacguguccggcaccaauggcaccaagagauucgacaaccccgugcugcccuucaacgacgggguguacuuugccagcaccgagaaguccaacaucaucagaggcuggaucuucggcaccacacuggacagcaagacccagagccugcugaucgugaacaacgccaccaacguggucaucaaagugugcgaguuccaguucugcaacgaccccuuccugggcgucuacuaccacaagaacaacaagagcuggauggaaagcgaguuccggguguacagcagcgccaacaacugcaccuucgaguacgugucccagccuuuccugauggaccuggaaggcaagcagggcaacuucaagaaccugcgcgaguucguguucaagaacaucgacggcuacuucaaaaucuacagcaagcacaccccuaucaaccucgugcgggaucugccucagggcuucucugcucuggaaccccugguggaucugcccaucggcaucaacaucacccgguuucagacacugcuggcccugcacagaagcuaccugacaccuggcgauagcagcagcggauggacagcuggugccgccgcuuacuaugugggcuaccugcagccuagaaccuuccugcugaaguacaacgagaacggcaccaucaccgacgccguggauugugcucuggauccucugagcgagacaaagugcacccugaaguccuucaccguggaaaagggcaucuaccagaccagcaacuuccgggugcagcccaccgaauccaucgugcgguuccccaauaucaccaaucugugccccuucggcgagguguucaaugccaccagauucgccucuguguacgccuggaaccggaagcggaucagcaauugcguggccgacuacuccgugcuguacaacuccgccagcuucagcaccuucaagugcuacggcguguccccuaccaagcugaacgaccugugcuucacaaacguguacgccgacagcuucgugauccggggagaugaagugcggcagauugccccuggacagacaggcaagaucgccgacuacaacuacaagcugcccgacgacuucaccggcugugugauugccuggaacagcaacaaccuggacuccaaagucggcggcaacuacaauuaccuguaccggcuguuccggaaguccaaucugaagcccuucgagcgggacaucagcaccgaaaucuaucaggccggcagcaccccuugcaacggcguggaaggcuucaacugcuacuucccacugcaguccuacggcuuucagcccacaaauggcgugggcuaucagcccuacagagugguggugcugagcuucgaacugcugcaugcuccugccacagugugcggcccuaagaaaagcaccaaucucgugaagaacaaaugcgugaacuucaacuucaacggccugaccggcaccggcgugcugacagagagcaacaagaaguuccugccauuccagcaguuuggccgggauaucgccgauaccacagacgccguuagagauccccagacacuggaaauccuggacaucaccccaugcagcuucggcggagugucugugaucaccccuggcaccaacaccagcaaucagguggcagugcuguaccaggacgugaacuguaccgaagugcccguggccauucacgccgaucagcugacaccuacauggcggguguacuccaccggcagcaauguguuucagaccagagccggcugucugaucggagccgagcacgugaacaauagcuacgagugcgacauccccaucggcgcuggcaucugugccagcuaccagacacagacaaacagccccagacgggcuagaagcguggccagccagagcaucauugccuacacaaugucucugggcgccgagaacagcguggccuacuccaacaacucuaucgcuauccccaccaacuucaccaucagcgugaccaccgagauccugccuguguccaugaccaagaccagcguggacugcaccauguacaucugcggcgauuccaccgagugcuccaaccugcugcugcaguacggcagcuucugcacccagcugaauagagcccugacagggaucgccguggaacaggacaagaacacccaagagguguucgcccaagugaagcaaaucuacaagaccccuccuaucaaggacuucggcggcuucaauuucagccagauucugcccgauccuagcaagcccagcaagcggagcuucaucgaggaccugcuguucaacaaagugacacuggccgacgccggcuucaucaagcaguauggcgauugucugggcgacauugccgccagggaucugauuugcgcccagaaguuuaacggacugacagugcugccuccucugcugaccgaugagaugaucgcccaguacugcucugcccugcuggccggcacaaucacaagcggcuggacauuuggagcuggcgccgcucugcagauccccuuugcuaugcagauggccuaccgguucaacggcaucggagugacccagaaugugcuguacgagaaccagaagcugaucgccaaccaguucaacagcgccaucggcaagauccaggacagccugagcagcacagcaagcgcccugggaaagcugcaggacguggucaaccagaaugcccaggcacugaacacccuggucaagcagcuguccuccaacuucggcgccaucagcucugugcugaacgauauccugagcagacuggacaaggucgaggccgaggugcagaucgacagacugaucacaggcagacugcagagccuccagacauacgugacccagcagcugaucagagccgccgagauuagagccucugccaaucuggccgccaccaagaugucugagugugugcugggccagagcaagagaguggacuuuugcggcaagggcuaccaccugaugagcuucccucagugcgccccucacggcgugguguuucugcacgugacauaugugcccgcucaagagaagaauuucaccaccgcuccagccaucugccacgacggcaaagcccacuuuccuagagaaggcguguucguguccaacggcacccauugguucgugacacagcggaacuucuacgagccccagaucaucaccaccgacaacaccuucgugucuggcaacugcgacguugugaucggcauugugaacaauaccguguacgacccucugcagcccgagcuggacagcuucaaagaggaacuggacaaguacuuuaagaaccacacaagccccgacguggaccugggcgauaucagcggaaucaaugccagcgucgugaacauccagaaagagaucgaccggcugaacgagguggccaagaaucugaacgagagccugaucgaccugcaagaacuggggaaguacgagcaguacaucaaguggcccugguacaucuggcugggcuuuaucgccggacugauugccaucgugauggucacaaucaugcuguguugcaugaccagcugcuguagcugccugaagggcuguuguagcuguggcagcugcugcaaguucgacgaggacgauucugagcccgugcugaagggcgugaaacugcacuacaccuga

SEQ ID NO: 12049 - RNA, 2046 nt, Artificial Sequence; identical to SEQ ID NO: 147
  SARS-CoV-2/Wuhan/WIV05/2019__EPI_ISL_402128 spike protein CDS gc mod (1-681)

SEQ ID NO: 12050 - RNA, 1776 nt, Artificial Sequence
  SARS-CoV-2/Wuhan/WIV05/2019__EPI_ISL_402128 spike protein CDS gc mod (682-1273)
agacgggcuagaagcguggccagccagagcaucauugccuacacaaugucucugggcgccgagaacagcguggccuacuccaacaacucuaucgcuauccccaccaacuucaccaucagcgugaccaccgagauccugccuguguccaugaccaagaccagcguggacugcaccauguacaucugcggcgauuccaccgagugcuccaaccugcugcugcaguacggcagcuucugcacccagcugaauagagcccugacagggaucgccguggaacaggacaagaacacccaagagguguucgcccaagugaagcaaaucuacaagaccccuccuaucaaggacuucggcggcuucaauuucagccagauucugcccgauccuagcaagcccagcaagcggagcuucaucgaggaccugcuguucaacaaagugacacuggccgacgccggcuucaucaagcaguauggcgauugucugggcgacauugccgccagggaucugauuugcgcccagaaguuuaacggacugacagugcugccuccucugcugaccgaugagaugaucgcccaguacacaucugcccugcuggccggcacaaucacaagcggcuggacauuuggagcuggcgccgcucugcagauccccuuugcuaugcagauggccuaccgguucaacggcaucggagugacccagaaugugcuguacgagaaccagaagcugaucgccaaccaguucaacagcgccaucggcaagauccaggacagccugagcagcacagcaagcgcccugggaaagcugcaggacguggucaaccagaaugcccaggcacugaacacccuggucaagcagcuguccuccaacuucggcgccaucagcucugugcugaacgauauccugagcagacuggacaaggucgaggccgaggugcagaucgacagacugaucacaggcagacugcagagccuccagacauacgugacccagcagcugaucagagccgccgagauuagagccucugccaaucuggccgccaccaagaugucugagugugugcugggccagagcaagagaguggacuuuugcggcaagggcuaccaccugaugagcuucccucagucugccccucacggcgugguguuucugcacgugacauaugugcccgcucaagagaagaauuucaccaccgcuccagccaucugccacgacggcaaagcccacuuuccuagagaaggcguguucguguccaacggcacccauugguucgugacacagcggaacuucuacgagccccagaucaucaccaccgacaacaccuucgugucuggcaacugcgacguugugaucggcauugugaacaauaccguguacgacccucugcagcccgagcuggacagcuucaaagaggaacuggacaaguacuuuaagaaccacacaagccccgacguggaccugggcgauaucagcggaaucaaugccagcgucgugaacauccagaaagagaucgaccggcugaacgagguggccaagaaucugaacgagagccugaucgaccugcaagaacuggggaaguacgagcaguacaucaaguggcccugguacaucuggcugggcuuuaucgccggacugauugccaucgugauggucacaaucaugcuguguugcaugaccagcugcuguagcugccugaagggcuguuguagcuguggcagcugcugcaaguucgacgaggacgauucugagcccgugcugaagggcgugaaacugcacuacacc

SEQ ID NO: 12051 - RNA, 45 nt, Artificial Sequence
  SARS-CoV-2/Wuhan/WIV05/2019__EPI_ISL_402128 spike protein CDS gc mod (1-15)
auguucguguuucuggugcugcugccccugguguccagccagugu

SEQ ID NO: 12052 - RNA, 1998 nt, Artificial Sequence
  SARS-CoV-2/Wuhan/WIV05/2019__EPI_ISL_402128 spike protein CDS gc mod (16-681)
gugaaccugaccaccagaacacagcugccuccagccuacaccaacagcuucaccagaggcguguacuaccccgacaagguguucagauccagcgugcugcacucuacccaggaccuguuccugccuuucuucagcaacgugaccugguuccacgccauccacguguccggcaccaauggcaccaagagauucgacaaccccgugcugcccuucaacgacgggguguacuuugccagcaccgagaaguccaacaucaucagaggcuggaucuucggcaccacacuggacagcaagacccagagccugcugaucgugaacaacgccaccaacguggucaucaaagugugcgaguuccaguucugcaacgaccccuuccugggcgucuacuaccacaagaacaacaagagcuggauggaaagcgaguuccggguguacagcagcgccaacaacugcaccuucgaguacgugucccagccuuuccugauggaccuggaaggcaagcagggcaacuucaagaaccugcgcgaguucguguucaagaacaucgacggcuacuucaaaaucuacagcaagcacaccccuaucaaccucgugcgggaucugccucagggcuucucugcucuggaaccccugguggaucugcccaucggcaucaacaucacccgguuucagacacugcuggcccugcacagaagcuaccugacaccuggcgauagcagcagcggauggacagcuggugccgccgcuuacuaugugggcuaccugcagccuagaaccuuccugcugaaguacaacgagaacggcaccaucaccgacgccguggauugugcucuggauccucugagcgagacaaagugcacccugaaguccuucaccguggaaaagggcaucuaccagaccagcaacuuccgggugcagcccaccgaauccaucgugcgguuccccaauaucaccaaucugugccccuucggcgagguguucaaugccaccagauucgccucuguguacgccuggaaccggaagcggaucagcaauugcguggccgacuacuccgugcuguacaacuccgccagcuucagcaccuucaagugcuacggcguguccccuaccaagcugaacgaccugugcuucacaaacguguacgccgacagcuucgugauccggggagaugaagugcggcagauugccccuggacagacaggcaagaucgccgacuacaacuacaagcugcccgacgacuucaccggcugugugauugccuggaacagcaacaaccuggacuccaaagucggcggcaacuacaauuaccuguaccggcuguuccggaaguccaaucugaagcccuucgagcgggacaucagcaccgaaaucuaucaggccggcagcaccccuugcaacggcguggaaggcuucaacugcuacuucccacugcaguccuacggcuuucagcccacaaauggcgugggcuaucagcccuacagagugguggugcugagcuucgaacugcugcaugcuccugccacagugugcggcccuaagaaaagcaccaaucucgugaagaacaaaugcgugaacuucaacuucaacggccugaccggcaccggcgugcugacagagagcaacaagaaguuccugccauuccagcaguuuggccgggauaucgccgauaccacagacgccguuagagauccccagacacuggaaauccuggacaucaccccaugcagcuucggcggagugucugugaucaccccuggcaccaacaccagcaaucagguggcagugcuguaccaggacgugaacuguaccgaagugcccguggccauucacgccgaucagcugacaccuacauggcggguguacuccaccggcagcaauguguuucagaccagagccggcugucugaucggagccgagcacgugaacaauagcuacgagugcgacauccccaucggcgcuggcaucugugccagcuaccagacacagacaaacagcccc

SEQ ID NO: 12053 - RNA, 189 nt, Artificial Sequence
  SARS-CoV-2/Wuhan/WIV05/2019__EPI_ISL_402128 spike protein CDS gc mod (1212-1273)
uggcccugguacaucuggcugggcuuuaucgccggacugauugccaucgugauggucacaaucaugcuguguugcaugaccagcugcuguagcugccugaagggcuguuguagcuguggcagcugcugcaaguucgacgaggacgauucugagcccgugcugaagggcgugaaacugcacuacaccuga

SEQ ID NO: 12054 - RNA, 3633 nt, Artificial Sequence
  SARS-CoV-2/Wuhan/WIV05/2019__EPI_ISL_402128 spike protein CDS gc mod (1-1211)
auguucguguuucuggugcugcugccccugguguccagccagugugugaaccugaccaccagaacacagcugccuccagccuacaccaacagcuucaccagaggcguguacuaccccgacaagguguucagauccagcgugcugcacucuacccaggaccuguuccugccuuucuucagcaacgugaccugguuccacgccauccacguguccggcaccaauggcaccaagagauucgacaaccccgugcugcccuucaacgacgggguguacuuugccagcaccgagaaguccaacaucaucagaggcuggaucuucggcaccacacuggacagcaagacccagagccugcugaucgugaacaacgccaccaacguggucaucaaagugugcgaguuccaguucugcaacgaccccuuccugggcgucuacuaccacaagaacaacaagagcuggauggaaagcgaguuccggguguacagcagcgccaacaacugcaccuucgaguacgugucccagccuuuccugauggaccuggaaggcaagcagggcaacuucaagaaccugcgcgaguucguguucaagaacaucgacggcuacuucaaaaucuacagcaagcacaccccuaucaaccucgugcgggaucugccucagggcuucucugcucuggaaccccugguggaucugcccaucggcaucaacaucacccgguuucagacacugcuggcccugcacagaagcuaccugacaccuggcgauagcagcagcggauggacagcuggugccgccgcuuacuaugugggcuaccugcagccuagaaccuuccugcugaaguacaacgagaacggcaccaucaccgacgccguggauugugcucuggauccucugagcgagacaaagugcacccugaaguccuucaccguggaaaagggcaucuaccagaccagcaacuuccgggugcagcccaccgaauccaucgugcgguuccccaauaucaccaaucugugccccuucggcgagguguucaaugccaccagauucgccucuguguacgccuggaaccggaagcggaucagcaauugcguggccgacuacuccgugcuguacaacuccgccagcuucagcaccuucaagugcuacggcguguccccuaccaagcugaacgaccugugcuucacaaacguguacgccgacagcuucgugauccggggagaugaagugcggcagauugccccuggacagacaggcaagaucgccgacuacaacuacaagcugcccgacgacuucaccggcugugugauugccuggaacagcaacaaccuggacuccaaagucggcggcaacuacaauuaccuguaccggcuguuccggaaguccaaucugaagcccuucgagcgggacaucagcaccgaaaucuaucaggccggcagcaccccuugcaacggcguggaaggcuucaacugcuacuucccacugcaguccuacggcuuucagcccacaaauggcgugggcuaucagcccuacagagugguggugcugagcuucgaacugcugcaugcuccugccacagugugcggcccuaagaaaagcaccaaucucgugaagaacaaaugcgugaacuucaacuucaacggccugaccggcaccggcgugcugacagagagcaacaagaaguuccugccauuccagcaguuuggccgggauaucgccgauaccacagacgccguuagagauccccagacacuggaaauccuggacaucaccccaugcagcuucggcggagugucugugaucaccccuggcaccaacaccagcaaucagguggcagugcuguaccaggacgugaacuguaccgaagugcccguggccauucacgccgaucagcugacaccuacauggcggguguacuccaccggcagcaauguguuucagaccagagccggcugucugaucggagccgagcacgugaacaauagcuacgagugcgacauccccaucggcgcuggcaucugugccagcuaccagacacagacaaacagccccagacgggcuagaagcguggccagccagagcaucauugccuacacaaugucucugggcgccgagaacagcguggccuacuccaacaacucuaucgcuauccccaccaacuucaccaucagcgugaccaccgagauccugccuguguccaugaccaagaccagcguggacugcaccauguacaucugcggcgauuccaccgagugcuccaaccugcugcugcaguacggcagcuucugcacccagcugaauagagcccugacagggaucgccguggaacaggacaagaacacccaagagguguucgcccaagugaagcaaaucuacaagaccccuccuaucaaggacuucggcggcuucaauuucagccagauucugcccgauccuagcaagcccagcaagcggagcuucaucgaggaccugcuguucaacaaagugacacuggccgacgccggcuucaucaagcaguauggcgauugucugggcgacauugccgccagggaucugauuugcgcccagaaguuuaacggacugacagugcugccuccucugcugaccgaugagaugaucgcccaguacacaucugcccugcuggccggcacaaucacaagcggcuggacauuuggagcuggcgccgcucugcagauccccuuugcuaugcagauggccuaccgguucaacggcaucggagugacccagaaugugcuguacgagaaccagaagcugaucgccaaccaguucaacagcgccaucggcaagauccaggacagccugagcagcacagcaagcgcccugggaaagcugcaggacguggucaaccagaaugcccaggcacugaacacccuggucaagcagcuguccuccaacuucggcgccaucagcucugugcugaacgauauccugagcagacuggacaaggucgaggccgaggugcagaucgacagacugaucacaggcagacugcagagccuccagacauacgugacccagcagcugaucagagccgccgagauuagagccucugccaaucuggccgccaccaagaugucugagugugugcugggccagagcaagagaguggacuuuugcggcaagggcuaccaccugaugagcuucccucagucugccccucacggcgugguguuucugcacgugacauaugugcccgcucaagagaagaauuucaccaccgcuccagccaucugccacgacggcaaagcccacuuuccuagagaaggcguguucguguccaacggcacccauugguucgugacacagcggaacuucuacgagccccagaucaucaccaccgacaacaccuucgugucuggcaacugcgacguugugaucggcauugugaacaauaccguguacgacccucugcagcccgagcuggacagcuucaaagaggaacuggacaaguacuuuaagaaccacacaagccccgacguggaccugggcgauaucagcggaaucaaugccagcgucgugaacauccagaaagagaucgaccggcugaacgagguggccaagaaucugaacgagagccugaucgaccugcaagaacuggggaaguacgagcaguacaucaag

SEQ ID NO: 12055 - RNA, 3633 nt, Artificial Sequence
  SARS-CoV-2/Wuhan/WIV05/2019__EPI_ISL_402128 spike protein CDS gc mod (1-1211)(K986P_V987P)
auguucguguuucuggugcugcugccccugguguccagccagugugugaaccugaccaccagaacacagcugccuccagccuacaccaacagcuucaccagaggcguguacuaccccgacaagguguucagauccagcgugcugcacucuacccaggaccuguuccugccuuucuucagcaacgugaccugguuccacgccauccacguguccggcaccaauggcaccaagagauucgacaaccccgugcugcccuucaacgacgggguguacuuugccagcaccgagaaguccaacaucaucagaggcuggaucuucggcaccacacuggacagcaagacccagagccugcugaucgugaacaacgccaccaacguggucaucaaagugugcgaguuccaguucugcaacgaccccuuccugggcgucuacuaccacaagaacaacaagagcuggauggaaagcgaguuccggguguacagcagcgccaacaacugcaccuucgaguacgugucccagccuuuccugauggaccuggaaggcaagcagggcaacuucaagaaccugcgcgaguucguguucaagaacaucgacggcuacuucaaaaucuacagcaagcacaccccuaucaaccucgugcgggaucugccucagggcuucucugcucuggaaccccugguggaucugcccaucggcaucaacaucacccgguuucagacacugcuggcccugcacagaagcuaccugacaccuggcgauagcagcagcggauggacagcuggugccgccgcuuacuaugugggcuaccugcagccuagaaccuuccugcugaaguacaacgagaacggcaccaucaccgacgccguggauugugcucuggauccucugagcgagacaaagugcacccugaaguccuucaccguggaaaagggcaucuaccagaccagcaacuuccgggugcagcccaccgaauccaucgugcgguuccccaauaucaccaaucugugccccuucggcgagguguucaaugccaccagauucgccucuguguacgccuggaaccggaagcggaucagcaauugcguggccgacuacuccgugcuguacaacuccgccagcuucagcaccuucaagugcuacggcguguccccuaccaagcugaacgaccugugcuucacaaacguguacgccgacagcuucgugauccggggagaugaagugcggcagauugccccuggacagacaggcaagaucgccgacuacaacuacaagcugcccgacgacuucaccggcugugugauugccuggaacagcaacaaccuggacuccaaagucggcggcaacuacaauuaccuguaccggcuguuccggaaguccaaucugaagcccuucgagcgggacaucagcaccgaaaucuaucaggccggcagcaccccuugcaacggcguggaaggcuucaacugcuacuucccacugcaguccuacggcuuucagcccacaaauggcgugggcuaucagcccuacagagugguggugcugagcuucgaacugcugcaugcuccugccacagugugcggcccuaagaaaagcaccaaucucgugaagaacaaaugcgugaacuucaacuucaacggccugaccggcaccggcgugcugacagagagcaacaagaaguuccugccauuccagcaguuuggccgggauaucgccgauaccacagacgccguuagagauccccagacacuggaaauccuggacaucaccccaugcagcuucggcggagugucugugaucaccccuggcaccaacaccagcaaucagguggcagugcuguaccaggacgugaacuguaccgaagugcccguggccauucacgccgaucagcugacaccuacauggcggguguacuccaccggcagcaauguguuucagaccagagccggcugucugaucggagccgagcacgugaacaauagcuacgagugcgacauccccaucggcgcuggcaucugugccagcuaccagacacagacaaacagccccagacgggcuagaagcguggccagccagagcaucauugccuacacaaugucucugggcgccgagaacagcguggccuacuccaacaacucuaucgcuauccccaccaacuucaccaucagcgugaccaccgagauccugccuguguccaugaccaagaccagcguggacugcaccauguacaucugcggcgauuccaccgagugcuccaaccugcugcugcaguacggcagcuucugcacccagcugaauagagcccugacagggaucgccguggaacaggacaagaacacccaagagguguucgcccaagugaagcaaaucuacaagaccccuccuaucaaggacuucggcggcuucaauuucagccagauucugcccgauccuagcaagcccagcaagcggagcuucaucgaggaccugcuguucaacaaagugacacuggccgacgccggcuucaucaagcaguauggcgauugucugggcgacauugccgccagggaucugauuugcgcccagaaguuuaacggacugacagugcugccuccucugcugaccgaugagaugaucgcccaguacacaucugcccugcuggccggcacaaucacaagcggcuggacauuuggagcuggcgccgcucugcagauccccuuugcuaugcagauggccuaccgguucaacggcaucggagugacccagaaugugcuguacgagaaccagaagcugaucgccaaccaguucaacagcgccaucggcaagauccaggacagccugagcagcacagcaagcgcccugggaaagcugcaggacguggucaaccagaaugcccaggcacugaacacccuggucaagcagcuguccuccaacuucggcgccaucagcucugugcugaacgauauccugagcagacuggacccuccugaggccgaggugcagaucgacagacugaucacaggcagacugcagagccuccagacauacgugacccagcagcugaucagagccgccgagauuagagccucugccaaucuggccgccaccaagaugucugagugugugcugggccagagcaagagaguggacuuuugcggcaagggcuaccaccugaugagcuucccucagucugccccucacggcgugguguuucugcacgugacauaugugcccgcucaagagaagaauuucaccaccgcuccagccaucugccacgacggcaaagcccacuuuccuagagaaggcguguucguguccaacggcacccauugguucgugacacagcggaacuucuacgagccccagaucaucaccaccgacaacaccuucgugucuggcaacugcgacguugugaucggcauugugaacaauaccguguacgacccucugcagcccgagcuggacagcuucaaagaggaacuggacaaguacuuuaagaaccacacaagccccgacguggaccugggcgauaucagcggaaucaaugccagcgucgugaacauccagaaagagaucgaccggcugaacgagguggccaagaaucugaacgagagccugaucgaccugcaagaacuggggaaguacgagcaguacaucaag

SEQ ID NO: 12056 - RNA, 3633 nt, Artificial Sequence
  SARS-CoV-2/Wuhan/WIV05/2019__EPI_ISL_402128 spike protein CDS gc mod (1-1211)(K986P_V987P_T887WN_A1020W)
auguucguguuucuggugcugcugccccugguguccagccagugugugaaccugaccaccagaacacagcugccuccagccuacaccaacagcuucaccagaggcguguacuaccccgacaagguguucagauccagcgugcugcacucuacccaggaccuguuccugccuuucuucagcaacgugaccugguuccacgccauccacguguccggcaccaauggcaccaagagauucgacaaccccgugcugcccuucaacgacgggguguacuuugccagcaccgagaaguccaacaucaucagaggcuggaucuucggcaccacacuggacagcaagacccagagccugcugaucgugaacaacgccaccaacguggucaucaaagugugcgaguuccaguucugcaacgaccccuuccugggcgucuacuaccacaagaacaacaagagcuggauggaaagcgaguuccggguguacagcagcgccaacaacugcaccuucgaguacgugucccagccuuuccugauggaccuggaaggcaagcagggcaacuucaagaaccugcgcgaguucguguucaagaacaucgacggcuacuucaaaaucuacagcaagcacaccccuaucaaccucgugcgggaucugccucagggcuucucugcucuggaaccccugguggaucugcccaucggcaucaacaucacccgguuucagacacugcuggcccugcacagaagcuaccugacaccuggcgauagcagcagcggauggacagcuggugccgccgcuuacuaugugggcuaccugcagccuagaaccuuccugcugaaguacaacgagaacggcaccaucaccgacgccguggauugugcucuggauccucugagcgagacaaagugcacccugaaguccuucaccguggaaaagggcaucuaccagaccagcaacuuccgggugcagcccaccgaauccaucgugcgguuccccaauaucaccaaucugugccccuucggcgagguguucaaugccaccagauucgccucuguguacgccuggaaccggaagcggaucagcaauugcguggccgacuacuccgugcuguacaacuccgccagcuucagcaccuucaagugcuacggcguguccccuaccaagcugaacgaccugugcuucacaaacguguacgccgacagcuucgugauccggggagaugaagugcggcagauugccccuggacagacaggcaagaucgccgacuacaacuacaagcugcccgacgacuucaccggcugugugauugccuggaacagcaacaaccuggacuccaaagucggcggcaacuacaauuaccuguaccggcuguuccggaaguccaaucugaagcccuucgagcgggacaucagcaccgaaaucuaucaggccggcagcaccccuugcaacggcguggaaggcuucaacugcuacuucccacugcaguccuacggcuuucagcccacaaauggcgugggcuaucagcccuacagagugguggugcugagcuucgaacugcugcaugcuccugccacagugugcggcccuaagaaaagcaccaaucucgugaagaacaaaugcgugaacuucaacuucaacggccugaccggcaccggcgugcugacagagagcaacaagaaguuccugccauuccagcaguuuggccgggauaucgccgauaccacagacgccguuagagauccccagacacuggaaauccuggacaucaccccaugcagcuucggcggagugucugugaucaccccuggcaccaacaccagcaaucagguggcagugcuguaccaggacgugaacuguaccgaagugcccguggccauucacgccgaucagcugacaccuacauggcggguguacuccaccggcagcaauguguuucagaccagagccggcugucugaucggagccgagcacgugaacaauagcuacgagugcgacauccccaucggcgcuggcaucugugccagcuaccagacacagacaaacagccccagacgggcuagaagcguggccagccagagcaucauugccuacacaaugucucugggcgccgagaacagcguggccuacuccaacaacucuaucgcuauccccaccaacuucaccaucagcgugaccaccgagauccugccuguguccaugaccaagaccagcguggacugcaccauguacaucugcggcgauuccaccgagugcuccaaccugcugcugcaguacggcagcuucugcacccagcugaauagagcccugacagggaucgccguggaacaggacaagaacacccaagagguguucgcccaagugaagcaaaucuacaagaccccuccuaucaaggacuucggcggcuucaauuucagccagauucugcccgauccuagcaagcccagcaagcggagcuucaucgaggaccugcuguucaacaaagugacacuggccgacgccggcuucaucaagcaguauggcgauugucugggcgacauugccgccagggaucugauuugcgcccagaaguuuaacggacugacagugcugccuccucugcugaccgaugagaugaucgcccaguacacaucugcccugcuggccggcacaaucacaagcggcuggugguuuggagcuggcgccgcucugcagauccccuuugcuaugcagauggccuaccgguucaacggcaucggagugacccagaaugugcuguacgagaaccagaagcugaucgccaaccaguucaacagcgccaucggcaagauccaggacagccugagcagcacagcaagcgcccugggaaagcugcaggacguggucaaccagaaugcccaggcacugaacacccuggucaagcagcuguccuccaacuucggcgccaucagcucugugcugaacgauauccugagcagacuggacccuccugaggccgaggugcagaucgacagacugaucacaggcagacugcagagccuccagacauacgugacccagcagcugaucagagccgccgagauuagauggucugccaaucuggccgccaccaagaugucugagugugugcugggccagagcaagagaguggacuuuugcggcaagggcuaccaccugaugagcuucccucagucugccccucacggcgugguguuucugcacgugacauaugugcccgcucaagagaagaauuucaccaccgcuccagccaucugccacgacggcaaagcccacuuuccuagagaaggcguguucguguccaacggcacccauugguucgugacacagcggaacuucuacgagccccagaucaucaccaccgacaacaccuucgugucuggcaacugcgacguugugaucggcauugugaacaauaccguguacgacccucugcagcccgagcuggacagcuucaaagaggaacuggacaaguacuuuaagaaccacacaagccccgacguggaccugggcgauaucagcggaaucaaugccagcgucgugaacauccagaaagagaucgaccggcugaacgagguggccaagaaucugaacgagagccugaucgaccugcaagaacuggggaaguacgagcaguacaucaag

SEQ ID NO: 12057 - RNA, 3633 nt, Artificial Sequence
  SARS-CoV-2/Wuhan/WIV05/2019__EPI_ISL_402128 spike protein CDS gc mod (1-1211)(K986P_V987P_P1069F)
auguucguguuucuggugcugcugccccugguguccagccagugugugaaccugaccaccagaacacagcugccuccagccuacaccaacagcuucaccagaggcguguacuaccccgacaagguguucagauccagcgugcugcacucuacccaggaccuguuccugccuuucuucagcaacgugaccugguuccacgccauccacguguccggcaccaauggcaccaagagauucgacaaccccgugcugcccuucaacgacgggguguacuuugccagcaccgagaaguccaacaucaucagaggcuggaucuucggcaccacacuggacagcaagacccagagccugcugaucgugaacaacgccaccaacguggucaucaaagugugcgaguuccaguucugcaacgaccccuuccugggcgucuacuaccacaagaacaacaagagcuggauggaaagcgaguuccggguguacagcagcgccaacaacugcaccuucgaguacgugucccagccuuuccugauggaccuggaaggcaagcagggcaacuucaagaaccugcgcgaguucguguucaagaacaucgacggcuacuucaaaaucuacagcaagcacaccccuaucaaccucgugcgggaucugccucagggcuucucugcucuggaaccccugguggaucugcccaucggcaucaacaucacccgguuucagacacugcuggcccugcacagaagcuaccugacaccuggcgauagcagcagcggauggacagcuggugccgccgcuuacuaugugggcuaccugcagccuagaaccuuccugcugaaguacaacgagaacggcaccaucaccgacgccguggauugugcucuggauccucugagcgagacaaagugcacccugaaguccuucaccguggaaaagggcaucuaccagaccagcaacuuccgggugcagcccaccgaauccaucgugcgguuccccaauaucaccaaucugugccccuucggcgagguguucaaugccaccagauucgccucuguguacgccuggaaccggaagcggaucagcaauugcguggccgacuacuccgugcuguacaacuccgccagcuucagcaccuucaagugcuacggcguguccccuaccaagcugaacgaccugugcuucacaaacguguacgccgacagcuucgugauccggggagaugaagugcggcagauugccccuggacagacaggcaagaucgccgacuacaacuacaagcugcccgacgacuucaccggcugugugauugccuggaacagcaacaaccuggacuccaaagucggcggcaacuacaauuaccuguaccggcuguuccggaaguccaaucugaagcccuucgagcgggacaucagcaccgaaaucuaucaggccggcagcaccccuugcaacggcguggaaggcuucaacugcuacuucccacugcaguccuacggcuuucagcccacaaauggcgugggcuaucagcccuacagagugguggugcugagcuucgaacugcugcaugcuccugccacagugugcggcccuaagaaaagcaccaaucucgugaagaacaaaugcgugaacuucaacuucaacggccugaccggcaccggcgugcugacagagagcaacaagaaguuccugccauuccagcaguuuggccgggauaucgccgauaccacagacgccguuagagauccccagacacuggaaauccuggacaucaccccaugcagcuucggcggagugucugugaucaccccuggcaccaacaccagcaaucagguggcagugcuguaccaggacgugaacuguaccgaagugcccguggccauucacgccgaucagcugacaccuacauggcggguguacuccaccggcagcaauguguuucagaccagagccggcugucugaucggagccgagcacgugaacaauagcuacgagugcgacauccccaucggcgcuggcaucugugccagcuaccagacacagacaaacagccccagacgggcuagaagcguggccagccagagcaucauugccuacacaaugucucugggcgccgagaacagcguggccuacuccaacaacucuaucgcuauccccaccaacuucaccaucagcgugaccaccgagauccugccuguguccaugaccaagaccagcguggacugcaccauguacaucugcggcgauuccaccgagugcuccaaccugcugcugcaguacggcagcuucugcacccagcugaauagagcccugacagggaucgccguggaacaggacaagaacacccaagagguguucgcccaagugaagcaaaucuacaagaccccuccuaucaaggacuucggcggcuucaauuucagccagauucugcccgauccuagcaagcccagcaagcggagcuucaucgaggaccugcuguucaacaaagugacacuggccgacgccggcuucaucaagcaguauggcgauugucugggcgacauugccgccagggaucugauuugcgcccagaaguuuaacggacugacagugcugccuccucugcugaccgaugagaugaucgcccaguacacaucugcccugcuggccggcacaaucacaagcggcuggacauuuggagcuggcgccgcucugcagauccccuuugcuaugcagauggccuaccgguucaacggcaucggagugacccagaaugugcuguacgagaaccagaagcugaucgccaaccaguucaacagcgccaucggcaagauccaggacagccugagcagcacagcaagcgcccugggaaagcugcaggacguggucaaccagaaugcccaggcacugaacacccuggucaagcagcuguccuccaacuucggcgccaucagcucugugcugaacgauauccugagcagacuggacccuccugaggccgaggugcagaucgacagacugaucacaggcagacugcagagccuccagacauacgugacccagcagcugaucagagccgccgagauuagagccucugccaaucuggccgccaccaagaugucugagugugugcugggccagagcaagagaguggacuuuugcggcaagggcuaccaccugaugagcuucccucagucugccccucacggcgugguguuucugcacgugacauauguguucgcucaagagaagaauuucaccaccgcuccagccaucugccacgacggcaaagcccacuuuccuagagaaggcguguucguguccaacggcacccauugguucgugacacagcggaacuucuacgagccccagaucaucaccaccgacaacaccuucgugucuggcaacugcgacguugugaucggcauugugaacaauaccguguacgacccucugcagcccgagcuggacagcuucaaagaggaacuggacaaguacuuuaagaaccacacaagccccgacguggaccugggcgauaucagcggaaucaaugccagcgucgugaacauccagaaagagaucgaccggcugaacgagguggccaagaaucugaacgagagccugaucgaccugcaagaacuggggaaguacgagcaguacaucaag

SEQ ID NO: 12058 - RNA, 3633 nt, Artificial Sequence
  SARS-CoV-2/Wuhan/WIV05/2019__EPI_ISL_402128 spike protein CDS gc mod (1-1211)(K986P_V987P_ H1048Q_H1064N_ H1083N_H1101N)
auguucguguuucuggugcugcugccccugguguccagccagugugugaaccugaccaccagaacacagcugccuccagccuacaccaacagcuucaccagaggcguguacuaccccgacaagguguucagauccagcgugcugcacucuacccaggaccuguuccugccuuucuucagcaacgugaccugguuccacgccauccacguguccggcaccaauggcaccaagagauucgacaaccccgugcugcccuucaacgacgggguguacuuugccagcaccgagaaguccaacaucaucagaggcuggaucuucggcaccacacuggacagcaagacccagagccugcugaucgugaacaacgccaccaacguggucaucaaagugugcgaguuccaguucugcaacgaccccuuccugggcgucuacuaccacaagaacaacaagagcuggauggaaagcgaguuccggguguacagcagcgccaacaacugcaccuucgaguacgugucccagccuuuccugauggaccuggaaggcaagcagggcaacuucaagaaccugcgcgaguucguguucaagaacaucgacggcuacuucaaaaucuacagcaagcacaccccuaucaaccucgugcgggaucugccucagggcuucucugcucuggaaccccugguggaucugcccaucggcaucaacaucacccgguuucagacacugcuggcccugcacagaagcuaccugacaccuggcgauagcagcagcggauggacagcuggugccgccgcuuacuaugugggcuaccugcagccuagaaccuuccugcugaaguacaacgagaacggcaccaucaccgacgccguggauugugcucuggauccucugagcgagacaaagugcacccugaaguccuucaccguggaaaagggcaucuaccagaccagcaacuuccgggugcagcccaccgaauccaucgugcgguuccccaauaucaccaaucugugccccuucggcgagguguucaaugccaccagauucgccucuguguacgccuggaaccggaagcggaucagcaauugcguggccgacuacuccgugcuguacaacuccgccagcuucagcaccuucaagugcuacggcguguccccuaccaagcugaacgaccugugcuucacaaacguguacgccgacagcuucgugauccggggagaugaagugcggcagauugccccuggacagacaggcaagaucgccgacuacaacuacaagcugcccgacgacuucaccggcugugugauugccuggaacagcaacaaccuggacuccaaagucggcggcaacuacaauuaccuguaccggcuguuccggaaguccaaucugaagcccuucgagcgggacaucagcaccgaaaucuaucaggccggcagcaccccuugcaacggcguggaaggcuucaacugcuacuucccacugcaguccuacggcuuucagcccacaaauggcgugggcuaucagcccuacagagugguggugcugagcuucgaacugcugcaugcuccugccacagugugcggcccuaagaaaagcaccaaucucgugaagaacaaaugcgugaacuucaacuucaacggccugaccggcaccggcgugcugacagagagcaacaagaaguuccugccauuccagcaguuuggccgggauaucgccgauaccacagacgccguuagagauccccagacacuggaaauccuggacaucaccccaugcagcuucggcggagugucugugaucaccccuggcaccaacaccagcaaucagguggcagugcuguaccaggacgugaacuguaccgaagugcccguggccauucacgccgaucagcugacaccuacauggcggguguacuccaccggcagcaauguguuucagaccagagccggcugucugaucggagccgagcacgugaacaauagcuacgagugcgacauccccaucggcgcuggcaucugugccagcuaccagacacagacaaacagccccagacgggcuagaagcguggccagccagagcaucauugccuacacaaugucucugggcgccgagaacagcguggccuacuccaacaacucuaucgcuauccccaccaacuucaccaucagcgugaccaccgagauccugccuguguccaugaccaagaccagcguggacugcaccauguacaucugcggcgauuccaccgagugcuccaaccugcugcugcaguacggcagcuucugcacccagcugaauagagcccugacagggaucgccguggaacaggacaagaacacccaagagguguucgcccaagugaagcaaaucuacaagaccccuccuaucaaggacuucggcggcuucaauuucagccagauucugcccgauccuagcaagcccagcaagcggagcuucaucgaggaccugcuguucaacaaagugacacuggccgacgccggcuucaucaagcaguauggcgauugucugggcgacauugccgccagggaucugauuugcgcccagaaguuuaacggacugacagugcugccuccucugcugaccgaugagaugaucgcccaguacacaucugcccugcuggccggcacaaucacaagcggcuggacauuuggagcuggcgccgcucugcagauccccuuugcuaugcagauggccuaccgguucaacggcaucggagugacccagaaugugcuguacgagaaccagaagcugaucgccaaccaguucaacagcgccaucggcaagauccaggacagccugagcagcacagcaagcgcccugggaaagcugcaggacguggucaaccagaaugcccaggcacugaacacccuggucaagcagcuguccuccaacuucggcgccaucagcucugugcugaacgauauccugagcagacuggacccuccugaggccgaggugcagaucgacagacugaucacaggcagacugcagagccuccagacauacgugacccagcagcugaucagagccgccgagauuagagccucugccaaucuggccgccaccaagaugucugagugugugcugggccagagcaagagaguggacuuuugcggcaagggcuaccagcugaugagcuucccucagucugccccucacggcgugguguuucugaacgugacauaugugcccgcucaagagaagaauuucaccaccgcuccagccaucugcaacgacggcaaagcccacuuuccuagagaaggcguguucguguccaacggcaccaacugguucgugacacagcggaacuucuacgagccccagaucaucaccaccgacaacaccuucgugucuggcaacugcgacguugugaucggcauugugaacaauaccguguacgacccucugcagcccgagcuggacagcuucaaagaggaacuggacaaguacuuuaagaaccacacaagccccgacguggaccugggcgauaucagcggaaucaaugccagcgucgugaacauccagaaagagaucgaccggcugaacgagguggccaagaaucugaacgagagccugaucgaccugcaagaacuggggaaguacgagcaguacaucaag

SEQ ID NO: 12059 - RNA, 3633 nt, Artificial Sequence
  SARS-CoV-2/Wuhan/WIV05/2019__EPI_ISL_402128 spike protein CDS gc mod (1-1211)(I712C_T1077C)
auguucguguuucuggugcugcugccccugguguccagccagugugugaaccugaccaccagaacacagcugccuccagccuacaccaacagcuucaccagaggcguguacuaccccgacaagguguucagauccagcgugcugcacucuacccaggaccuguuccugccuuucuucagcaacgugaccugguuccacgccauccacguguccggcaccaauggcaccaagagauucgacaaccccgugcugcccuucaacgacgggguguacuuugccagcaccgagaaguccaacaucaucagaggcuggaucuucggcaccacacuggacagcaagacccagagccugcugaucgugaacaacgccaccaacguggucaucaaagugugcgaguuccaguucugcaacgaccccuuccugggcgucuacuaccacaagaacaacaagagcuggauggaaagcgaguuccggguguacagcagcgccaacaacugcaccuucgaguacgugucccagccuuuccugauggaccuggaaggcaagcagggcaacuucaagaaccugcgcgaguucguguucaagaacaucgacggcuacuucaaaaucuacagcaagcacaccccuaucaaccucgugcgggaucugccucagggcuucucugcucuggaaccccugguggaucugcccaucggcaucaacaucacccgguuucagacacugcuggcccugcacagaagcuaccugacaccuggcgauagcagcagcggauggacagcuggugccgccgcuuacuaugugggcuaccugcagccuagaaccuuccugcugaaguacaacgagaacggcaccaucaccgacgccguggauugugcucuggauccucugagcgagacaaagugcacccugaaguccuucaccguggaaaagggcaucuaccagaccagcaacuuccgggugcagcccaccgaauccaucgugcgguuccccaauaucaccaaucugugccccuucggcgagguguucaaugccaccagauucgccucuguguacgccuggaaccggaagcggaucagcaauugcguggccgacuacuccgugcuguacaacuccgccagcuucagcaccuucaagugcuacggcguguccccuaccaagcugaacgaccugugcuucacaaacguguacgccgacagcuucgugauccggggagaugaagugcggcagauugccccuggacagacaggcaagaucgccgacuacaacuacaagcugcccgacgacuucaccggcugugugauugccuggaacagcaacaaccuggacuccaaagucggcggcaacuacaauuaccuguaccggcuguuccggaaguccaaucugaagcccuucgagcgggacaucagcaccgaaaucuaucaggccggcagcaccccuugcaacggcguggaaggcuucaacugcuacuucccacugcaguccuacggcuuucagcccacaaauggcgugggcuaucagcccuacagagugguggugcugagcuucgaacugcugcaugcuccugccacagugugcggcccuaagaaaagcaccaaucucgugaagaacaaaugcgugaacuucaacuucaacggccugaccggcaccggcgugcugacagagagcaacaagaaguuccugccauuccagcaguuuggccgggauaucgccgauaccacagacgccguuagagauccccagacacuggaaauccuggacaucaccccaugcagcuucggcggagugucugugaucaccccuggcaccaacaccagcaaucagguggcagugcuguaccaggacgugaacuguaccgaagugcccguggccauucacgccgaucagcugacaccuacauggcggguguacuccaccggcagcaauguguuucagaccagagccggcugucugaucggagccgagcacgugaacaauagcuacgagugcgacauccccaucggcgcuggcaucugugccagcuaccagacacagacaaacagccccagacgggcuagaagcguggccagccagagcaucauugccuacacaaugucucugggcgccgagaacagcguggccuacuccaacaacucuugcgcuauccccaccaacuucaccaucagcgugaccaccgagauccugccuguguccaugaccaagaccagcguggacugcaccauguacaucugcggcgauuccaccgagugcuccaaccugcugcugcaguacggcagcuucugcacccagcugaauagagcccugacagggaucgccguggaacaggacaagaacacccaagagguguucgcccaagugaagcaaaucuacaagaccccuccuaucaaggacuucggcggcuucaauuucagccagauucugcccgauccuagcaagcccagcaagcggagcuucaucgaggaccugcuguucaacaaagugacacuggccgacgccggcuucaucaagcaguauggcgauugucugggcgacauugccgccagggaucugauuugcgcccagaaguuuaacggacugacagugcugccuccucugcugaccgaugagaugaucgcccaguacacaucugcccugcuggccggcacaaucacaagcggcuggacauuuggagcuggcgccgcucugcagauccccuuugcuaugcagauggccuaccgguucaacggcaucggagugacccagaaugugcuguacgagaaccagaagcugaucgccaaccaguucaacagcgccaucggcaagauccaggacagccugagcagcacagcaagcgcccugggaaagcugcaggacguggucaaccagaaugcccaggcacugaacacccuggucaagcagcuguccuccaacuucggcgccaucagcucugugcugaacgauauccugagcagacuggacaaggucgaggccgaggugcagaucgacagacugaucacaggcagacugcagagccuccagacauacgugacccagcagcugaucagagccgccgagauuagagccucugccaaucuggccgccaccaagaugucugagugugugcugggccagagcaagagaguggacuuuugcggcaagggcuaccaccugaugagcuucccucagucugccccucacggcgugguguuucugcacgugacauaugugcccgcucaagagaagaauuucaccugugcuccagccaucugccacgacggcaaagcccacuuuccuagagaaggcguguucguguccaacggcacccauugguucgugacacagcggaacuucuacgagccccagaucaucaccaccgacaacaccuucgugucuggcaacugcgacguugugaucggcauugugaacaauaccguguacgacccucugcagcccgagcuggacagcuucaaagaggaacuggacaaguacuuuaagaaccacacaagccccgacguggaccugggcgauaucagcggaaucaaugccagcgucgugaacauccagaaagagaucgaccggcugaacgagguggccaagaaucugaacgagagccugaucgaccugcaagaacuggggaaguacgagcaguacaucaag

SEQ ID NO: 12060 - RNA, 3633 nt, Artificial Sequence
  SARS-CoV-2/Wuhan/WIV05/2019__EPI_ISL_402128 spike protein CDS gc mod (1-1211)(I714C_Y1110C)
auguucguguuucuggugcugcugccccugguguccagccagugugugaaccugaccaccagaacacagcugccuccagccuacaccaacagcuucaccagaggcguguacuaccccgacaagguguucagauccagcgugcugcacucuacccaggaccuguuccugccuuucuucagcaacgugaccugguuccacgccauccacguguccggcaccaauggcaccaagagauucgacaaccccgugcugcccuucaacgacgggguguacuuugccagcaccgagaaguccaacaucaucagaggcuggaucuucggcaccacacuggacagcaagacccagagccugcugaucgugaacaacgccaccaacguggucaucaaagugugcgaguuccaguucugcaacgaccccuuccugggcgucuacuaccacaagaacaacaagagcuggauggaaagcgaguuccggguguacagcagcgccaacaacugcaccuucgaguacgugucccagccuuuccugauggaccuggaaggcaagcagggcaacuucaagaaccugcgcgaguucguguucaagaacaucgacggcuacuucaaaaucuacagcaagcacaccccuaucaaccucgugcgggaucugccucagggcuucucugcucuggaaccccugguggaucugcccaucggcaucaacaucacccgguuucagacacugcuggcccugcacagaagcuaccugacaccuggcgauagcagcagcggauggacagcuggugccgccgcuuacuaugugggcuaccugcagccuagaaccuuccugcugaaguacaacgagaacggcaccaucaccgacgccguggauugugcucuggauccucugagcgagacaaagugcacccugaaguccuucaccguggaaaagggcaucuaccagaccagcaacuuccgggugcagcccaccgaauccaucgugcgguuccccaauaucaccaaucugugccccuucggcgagguguucaaugccaccagauucgccucuguguacgccuggaaccggaagcggaucagcaauugcguggccgacuacuccgugcuguacaacuccgccagcuucagcaccuucaagugcuacggcguguccccuaccaagcugaacgaccugugcuucacaaacguguacgccgacagcuucgugauccggggagaugaagugcggcagauugccccuggacagacaggcaagaucgccgacuacaacuacaagcugcccgacgacuucaccggcugugugauugccuggaacagcaacaaccuggacuccaaagucggcggcaacuacaauuaccuguaccggcuguuccggaaguccaaucugaagcccuucgagcgggacaucagcaccgaaaucuaucaggccggcagcaccccuugcaacggcguggaaggcuucaacugcuacuucccacugcaguccuacggcuuucagcccacaaauggcgugggcuaucagcccuacagagugguggugcugagcuucgaacugcugcaugcuccugccacagugugcggcccuaagaaaagcaccaaucucgugaagaacaaaugcgugaacuucaacuucaacggccugaccggcaccggcgugcugacagagagcaacaagaaguuccugccauuccagcaguuuggccgggauaucgccgauaccacagacgccguuagagauccccagacacuggaaauccuggacaucaccccaugcagcuucggcggagugucugugaucaccccuggcaccaacaccagcaaucagguggcagugcuguaccaggacgugaacuguaccgaagugcccguggccauucacgccgaucagcugacaccuacauggcggguguacuccaccggcagcaauguguuucagaccagagccggcugucugaucggagccgagcacgugaacaauagcuacgagugcgacauccccaucggcgcuggcaucugugccagcuaccagacacagacaaacagccccagacgggcuagaagcguggccagccagagcaucauugccuacacaaugucucugggcgccgagaacagcguggccuacuccaacaacucuaucgcuugccccaccaacuucaccaucagcgugaccaccgagauccugccuguguccaugaccaagaccagcguggacugcaccauguacaucugcggcgauuccaccgagugcuccaaccugcugcugcaguacggcagcuucugcacccagcugaauagagcccugacagggaucgccguggaacaggacaagaacacccaagagguguucgcccaagugaagcaaaucuacaagaccccuccuaucaaggacuucggcggcuucaauuucagccagauucugcccgauccuagcaagcccagcaagcggagcuucaucgaggaccugcuguucaacaaagugacacuggccgacgccggcuucaucaagcaguauggcgauugucugggcgacauugccgccagggaucugauuugcgcccagaaguuuaacggacugacagugcugccuccucugcugaccgaugagaugaucgcccaguacacaucugcccugcuggccggcacaaucacaagcggcuggacauuuggagcuggcgccgcucugcagauccccuuugcuaugcagauggccuaccgguucaacggcaucggagugacccagaaugugcuguacgagaaccagaagcugaucgccaaccaguucaacagcgccaucggcaagauccaggacagccugagcagcacagcaagcgcccugggaaagcugcaggacguggucaaccagaaugcccaggcacugaacacccuggucaagcagcuguccuccaacuucggcgccaucagcucugugcugaacgauauccugagcagacuggacaaggucgaggccgaggugcagaucgacagacugaucacaggcagacugcagagccuccagacauacgugacccagcagcugaucagagccgccgagauuagagccucugccaaucuggccgccaccaagaugucugagugugugcugggccagagcaagagaguggacuuuugcggcaagggcuaccaccugaugagcuucccucagucugccccucacggcgugguguuucugcacgugacauaugugcccgcucaagagaagaauuucaccaccgcuccagccaucugccacgacggcaaagcccacuuuccuagagaaggcguguucguguccaacggcacccauugguucgugacacagcggaacuucugugagccccagaucaucaccaccgacaacaccuucgugucuggcaacugcgacguugugaucggcauugugaacaauaccguguacgacccucugcagcccgagcuggacagcuucaaagaggaacuggacaaguacuuuaagaaccacacaagccccgacguggaccugggcgauaucagcggaaucaaugccagcgucgugaacauccagaaagagaucgaccggcugaacgagguggccaagaaucugaacgagagccugaucgaccugcaagaacuggggaaguacgagcaguacaucaag

SEQ ID NO: 12061 - RNA, 3633 nt, Artificial Sequence
  SARS-CoV-2/Wuhan/WIV05/2019__EPI_ISL_402128 spike protein CDS gc mod (1-1211)(P715C_P1069C)
auguucguguuucuggugcugcugccccugguguccagccagugugugaaccugaccaccagaacacagcugccuccagccuacaccaacagcuucaccagaggcguguacuaccccgacaagguguucagauccagcgugcugcacucuacccaggaccuguuccugccuuucuucagcaacgugaccugguuccacgccauccacguguccggcaccaauggcaccaagagauucgacaaccccgugcugcccuucaacgacgggguguacuuugccagcaccgagaaguccaacaucaucagaggcuggaucuucggcaccacacuggacagcaagacccagagccugcugaucgugaacaacgccaccaacguggucaucaaagugugcgaguuccaguucugcaacgaccccuuccugggcgucuacuaccacaagaacaacaagagcuggauggaaagcgaguuccggguguacagcagcgccaacaacugcaccuucgaguacgugucccagccuuuccugauggaccuggaaggcaagcagggcaacuucaagaaccugcgcgaguucguguucaagaacaucgacggcuacuucaaaaucuacagcaagcacaccccuaucaaccucgugcgggaucugccucagggcuucucugcucuggaaccccugguggaucugcccaucggcaucaacaucacccgguuucagacacugcuggcccugcacagaagcuaccugacaccuggcgauagcagcagcggauggacagcuggugccgccgcuuacuaugugggcuaccugcagccuagaaccuuccugcugaaguacaacgagaacggcaccaucaccgacgccguggauugugcucuggauccucugagcgagacaaagugcacccugaaguccuucaccguggaaaagggcaucuaccagaccagcaacuuccgggugcagcccaccgaauccaucgugcgguuccccaauaucaccaaucugugccccuucggcgagguguucaaugccaccagauucgccucuguguacgccuggaaccggaagcggaucagcaauugcguggccgacuacuccgugcuguacaacuccgccagcuucagcaccuucaagugcuacggcguguccccuaccaagcugaacgaccugugcuucacaaacguguacgccgacagcuucgugauccggggagaugaagugcggcagauugccccuggacagacaggcaagaucgccgacuacaacuacaagcugcccgacgacuucaccggcugugugauugccuggaacagcaacaaccuggacuccaaagucggcggcaacuacaauuaccuguaccggcuguuccggaaguccaaucugaagcccuucgagcgggacaucagcaccgaaaucuaucaggccggcagcaccccuugcaacggcguggaaggcuucaacugcuacuucccacugcaguccuacggcuuucagcccacaaauggcgugggcuaucagcccuacagagugguggugcugagcuucgaacugcugcaugcuccugccacagugugcggcccuaagaaaagcaccaaucucgugaagaacaaaugcgugaacuucaacuucaacggccugaccggcaccggcgugcugacagagagcaacaagaaguuccugccauuccagcaguuuggccgggauaucgccgauaccacagacgccguuagagauccccagacacuggaaauccuggacaucaccccaugcagcuucggcggagugucugugaucaccccuggcaccaacaccagcaaucagguggcagugcuguaccaggacgugaacuguaccgaagugcccguggccauucacgccgaucagcugacaccuacauggcggguguacuccaccggcagcaauguguuucagaccagagccggcugucugaucggagccgagcacgugaacaauagcuacgagugcgacauccccaucggcgcuggcaucugugccagcuaccagacacagacaaacagccccagacgggcuagaagcguggccagccagagcaucauugccuacacaaugucucugggcgccgagaacagcguggccuacuccaacaacucuaucgcuaucugcaccaacuucaccaucagcgugaccaccgagauccugccuguguccaugaccaagaccagcguggacugcaccauguacaucugcggcgauuccaccgagugcuccaaccugcugcugcaguacggcagcuucugcacccagcugaauagagcccugacagggaucgccguggaacaggacaagaacacccaagagguguucgcccaagugaagcaaaucuacaagaccccuccuaucaaggacuucggcggcuucaauuucagccagauucugcccgauccuagcaagcccagcaagcggagcuucaucgaggaccugcuguucaacaaagugacacuggccgacgccggcuucaucaagcaguauggcgauugucugggcgacauugccgccagggaucugauuugcgcccagaaguuuaacggacugacagugcugccuccucugcugaccgaugagaugaucgcccaguacacaucugcccugcuggccggcacaaucacaagcggcuggacauuuggagcuggcgccgcucugcagauccccuuugcuaugcagauggccuaccgguucaacggcaucggagugacccagaaugugcuguacgagaaccagaagcugaucgccaaccaguucaacagcgccaucggcaagauccaggacagccugagcagcacagcaagcgcccugggaaagcugcaggacguggucaaccagaaugcccaggcacugaacacccuggucaagcagcuguccuccaacuucggcgccaucagcucugugcugaacgauauccugagcagacuggacaaggucgaggccgaggugcagaucgacagacugaucacaggcagacugcagagccuccagacauacgugacccagcagcugaucagagccgccgagauuagagccucugccaaucuggccgccaccaagaugucugagugugugcugggccagagcaagagaguggacuuuugcggcaagggcuaccaccugaugagcuucccucagucugccccucacggcgugguguuucugcacgugacauaugugugugcucaagagaagaauuucaccaccgcuccagccaucugccacgacggcaaagcccacuuuccuagagaaggcguguucguguccaacggcacccauugguucgugacacagcggaacuucuacgagccccagaucaucaccaccgacaacaccuucgugucuggcaacugcgacguugugaucggcauugugaacaauaccguguacgacccucugcagcccgagcuggacagcuucaaagaggaacuggacaaguacuuuaagaaccacacaagccccgacguggaccugggcgauaucagcggaaucaaugccagcgucgugaacauccagaaagagaucgaccggcugaacgagguggccaagaaucugaacgagagccugaucgaccugcaagaacuggggaaguacgagcaguacaucaag

SEQ ID NO: 12062 - RNA, 3633 nt, Artificial Sequence
  SARS-CoV-2/Wuhan/WIV05/2019__EPI_ISL_402128 spike protein CDS gc mod (1-1211)(G889C_L1034C)
auguucguguuucuggugcugcugccccugguguccagccagugugugaaccugaccaccagaacacagcugccuccagccuacaccaacagcuucaccagaggcguguacuaccccgacaagguguucagauccagcgugcugcacucuacccaggaccuguuccugccuuucuucagcaacgugaccugguuccacgccauccacguguccggcaccaauggcaccaagagauucgacaaccccgugcugcccuucaacgacgggguguacuuugccagcaccgagaaguccaacaucaucagaggcuggaucuucggcaccacacuggacagcaagacccagagccugcugaucgugaacaacgccaccaacguggucaucaaagugugcgaguuccaguucugcaacgaccccuuccugggcgucuacuaccacaagaacaacaagagcuggauggaaagcgaguuccggguguacagcagcgccaacaacugcaccuucgaguacgugucccagccuuuccugauggaccuggaaggcaagcagggcaacuucaagaaccugcgcgaguucguguucaagaacaucgacggcuacuucaaaaucuacagcaagcacaccccuaucaaccucgugcgggaucugccucagggcuucucugcucuggaaccccugguggaucugcccaucggcaucaacaucacccgguuucagacacugcuggcccugcacagaagcuaccugacaccuggcgauagcagcagcggauggacagcuggugccgccgcuuacuaugugggcuaccugcagccuagaaccuuccugcugaaguacaacgagaacggcaccaucaccgacgccguggauugugcucuggauccucugagcgagacaaagugcacccugaaguccuucaccguggaaaagggcaucuaccagaccagcaacuuccgggugcagcccaccgaauccaucgugcgguuccccaauaucaccaaucugugccccuucggcgagguguucaaugccaccagauucgccucuguguacgccuggaaccggaagcggaucagcaauugcguggccgacuacuccgugcuguacaacuccgccagcuucagcaccuucaagugcuacggcguguccccuaccaagcugaacgaccugugcuucacaaacguguacgccgacagcuucgugauccggggagaugaagugcggcagauugccccuggacagacaggcaagaucgccgacuacaacuacaagcugcccgacgacuucaccggcugugugauugccuggaacagcaacaaccuggacuccaaagucggcggcaacuacaauuaccuguaccggcuguuccggaaguccaaucugaagcccuucgagcgggacaucagcaccgaaaucuaucaggccggcagcaccccuugcaacggcguggaaggcuucaacugcuacuucccacugcaguccuacggcuuucagcccacaaauggcgugggcuaucagcccuacagagugguggugcugagcuucgaacugcugcaugcuccugccacagugugcggcccuaagaaaagcaccaaucucgugaagaacaaaugcgugaacuucaacuucaacggccugaccggcaccggcgugcugacagagagcaacaagaaguuccugccauuccagcaguuuggccgggauaucgccgauaccacagacgccguuagagauccccagacacuggaaauccuggacaucaccccaugcagcuucggcggagugucugugaucaccccuggcaccaacaccagcaaucagguggcagugcuguaccaggacgugaacuguaccgaagugcccguggccauucacgccgaucagcugacaccuacauggcggguguacuccaccggcagcaauguguuucagaccagagccggcugucugaucggagccgagcacgugaacaauagcuacgagugcgacauccccaucggcgcuggcaucugugccagcuaccagacacagacaaacagccccagacgggcuagaagcguggccagccagagcaucauugccuacacaaugucucugggcgccgagaacagcguggccuacuccaacaacucuaucgcuauccccaccaacuucaccaucagcgugaccaccgagauccugccuguguccaugaccaagaccagcguggacugcaccauguacaucugcggcgauuccaccgagugcuccaaccugcugcugcaguacggcagcuucugcacccagcugaauagagcccugacagggaucgccguggaacaggacaagaacacccaagagguguucgcccaagugaagcaaaucuacaagaccccuccuaucaaggacuucggcggcuucaauuucagccagauucugcccgauccuagcaagcccagcaagcggagcuucaucgaggaccugcuguucaacaaagugacacuggccgacgccggcuucaucaagcaguauggcgauugucugggcgacauugccgccagggaucugauuugcgcccagaaguuuaacggacugacagugcugccuccucugcugaccgaugagaugaucgcccaguacacaucugcccugcuggccggcacaaucacaagcggcuggacauuuugcgcuggcgccgcucugcagauccccuuugcuaugcagauggccuaccgguucaacggcaucggagugacccagaaugugcuguacgagaaccagaagcugaucgccaaccaguucaacagcgccaucggcaagauccaggacagccugagcagcacagcaagcgcccugggaaagcugcaggacguggucaaccagaaugcccaggcacugaacacccuggucaagcagcuguccuccaacuucggcgccaucagcucugugcugaacgauauccugagcagacuggacaaggucgaggccgaggugcagaucgacagacugaucacaggcagacugcagagccuccagacauacgugacccagcagcugaucagagccgccgagauuagagccucugccaaucuggccgccaccaagaugucugaguguguguguggccagagcaagagaguggacuuuugcggcaagggcuaccaccugaugagcuucccucagucugccccucacggcgugguguuucugcacgugacauaugugcccgcucaagagaagaauuucaccaccgcuccagccaucugccacgacggcaaagcccacuuuccuagagaaggcguguucguguccaacggcacccauugguucgugacacagcggaacuucuacgagccccagaucaucaccaccgacaacaccuucgugucuggcaacugcgacguugugaucggcauugugaacaauaccguguacgacccucugcagcccgagcuggacagcuucaaagaggaacuggacaaguacuuuaagaaccacacaagccccgacguggaccugggcgauaucagcggaaucaaugccagcgucgugaacauccagaaagagaucgaccggcugaacgagguggccaagaaucugaacgagagccugaucgaccugcaagaacuggggaaguacgagcaguacaucaag

SEQ ID NO: 12063 - RNA, 3633 nt, Artificial Sequence
  SARS-CoV-2/Wuhan/WIV05/2019__EPI_ISL_402128 spike protein CDS gc mod (1-1211)(I909C_Y1047C)
auguucguguuucuggugcugcugccccugguguccagccagugugugaaccugaccaccagaacacagcugccuccagccuacaccaacagcuucaccagaggcguguacuaccccgacaagguguucagauccagcgugcugcacucuacccaggaccuguuccugccuuucuucagcaacgugaccugguuccacgccauccacguguccggcaccaauggcaccaagagauucgacaaccccgugcugcccuucaacgacgggguguacuuugccagcaccgagaaguccaacaucaucagaggcuggaucuucggcaccacacuggacagcaagacccagagccugcugaucgugaacaacgccaccaacguggucaucaaagugugcgaguuccaguucugcaacgaccccuuccugggcgucuacuaccacaagaacaacaagagcuggauggaaagcgaguuccggguguacagcagcgccaacaacugcaccuucgaguacgugucccagccuuuccugauggaccuggaaggcaagcagggcaacuucaagaaccugcgcgaguucguguucaagaacaucgacggcuacuucaaaaucuacagcaagcacaccccuaucaaccucgugcgggaucugccucagggcuucucugcucuggaaccccugguggaucugcccaucggcaucaacaucacccgguuucagacacugcuggcccugcacagaagcuaccugacaccuggcgauagcagcagcggauggacagcuggugccgccgcuuacuaugugggcuaccugcagccuagaaccuuccugcugaaguacaacgagaacggcaccaucaccgacgccguggauugugcucuggauccucugagcgagacaaagugcacccugaaguccuucaccguggaaaagggcaucuaccagaccagcaacuuccgggugcagcccaccgaauccaucgugcgguuccccaauaucaccaaucugugccccuucggcgagguguucaaugccaccagauucgccucuguguacgccuggaaccggaagcggaucagcaauugcguggccgacuacuccgugcuguacaacuccgccagcuucagcaccuucaagugcuacggcguguccccuaccaagcugaacgaccugugcuucacaaacguguacgccgacagcuucgugauccggggagaugaagugcggcagauugccccuggacagacaggcaagaucgccgacuacaacuacaagcugcccgacgacuucaccggcugugugauugccuggaacagcaacaaccuggacuccaaagucggcggcaacuacaauuaccuguaccggcuguuccggaaguccaaucugaagcccuucgagcgggacaucagcaccgaaaucuaucaggccggcagcaccccuugcaacggcguggaaggcuucaacugcuacuucccacugcaguccuacggcuuucagcccacaaauggcgugggcuaucagcccuacagagugguggugcugagcuucgaacugcugcaugcuccugccacagugugcggcccuaagaaaagcaccaaucucgugaagaacaaaugcgugaacuucaacuucaacggccugaccggcaccggcgugcugacagagagcaacaagaaguuccugccauuccagcaguuuggccgggauaucgccgauaccacagacgccguuagagauccccagacacuggaaauccuggacaucaccccaugcagcuucggcggagugucugugaucaccccuggcaccaacaccagcaaucagguggcagugcuguaccaggacgugaacuguaccgaagugcccguggccauucacgccgaucagcugacaccuacauggcggguguacuccaccggcagcaauguguuucagaccagagccggcugucugaucggagccgagcacgugaacaauagcuacgagugcgacauccccaucggcgcuggcaucugugccagcuaccagacacagacaaacagccccagacgggcuagaagcguggccagccagagcaucauugccuacacaaugucucugggcgccgagaacagcguggccuacuccaacaacucuaucgcuauccccaccaacuucaccaucagcgugaccaccgagauccugccuguguccaugaccaagaccagcguggacugcaccauguacaucugcggcgauuccaccgagugcuccaaccugcugcugcaguacggcagcuucugcacccagcugaauagagcccugacagggaucgccguggaacaggacaagaacacccaagagguguucgcccaagugaagcaaaucuacaagaccccuccuaucaaggacuucggcggcuucaauuucagccagauucugcccgauccuagcaagcccagcaagcggagcuucaucgaggaccugcuguucaacaaagugacacuggccgacgccggcuucaucaagcaguauggcgauugucugggcgacauugccgccagggaucugauuugcgcccagaaguuuaacggacugacagugcugccuccucugcugaccgaugagaugaucgcccaguacacaucugcccugcuggccggcacaaucacaagcggcuggacauuuggagcuggcgccgcucugcagauccccuuugcuaugcagauggccuaccgguucaacggcugcggagugacccagaaugugcuguacgagaaccagaagcugaucgccaaccaguucaacagcgccaucggcaagauccaggacagccugagcagcacagcaagcgcccugggaaagcugcaggacguggucaaccagaaugcccaggcacugaacacccuggucaagcagcuguccuccaacuucggcgccaucagcucugugcugaacgauauccugagcagacuggacaaggucgaggccgaggugcagaucgacagacugaucacaggcagacugcagagccuccagacauacgugacccagcagcugaucagagccgccgagauuagagccucugccaaucuggccgccaccaagaugucugagugugugcugggccagagcaagagaguggacuuuugcggcaagggcugucaccugaugagcuucccucagucugccccucacggcgugguguuucugcacgugacauaugugcccgcucaagagaagaauuucaccaccgcuccagccaucugccacgacggcaaagcccacuuuccuagagaaggcguguucguguccaacggcacccauugguucgugacacagcggaacuucuacgagccccagaucaucaccaccgacaacaccuucgugucuggcaacugcgacguugugaucggcauugugaacaauaccguguacgacccucugcagcccgagcuggacagcuucaaagaggaacuggacaaguacuuuaagaaccacacaagccccgacguggaccugggcgauaucagcggaaucaaugccagcgucgugaacauccagaaagagaucgaccggcugaacgagguggccaagaaucugaacgagagccugaucgaccugcaagaacuggggaaguacgagcaguacaucaag

SEQ ID NO: 12064 - RNA, 3633 nt, Artificial Sequence
  SARS-CoV-2/Wuhan/WIV05/2019__EPI_ISL_402128 spike protein CDS gc mod (1-1211)(Q965C_S1003C)
auguucguguuucuggugcugcugccccugguguccagccagugugugaaccugaccaccagaacacagcugccuccagccuacaccaacagcuucaccagaggcguguacuaccccgacaagguguucagauccagcgugcugcacucuacccaggaccuguuccugccuuucuucagcaacgugaccugguuccacgccauccacguguccggcaccaauggcaccaagagauucgacaaccccgugcugcccuucaacgacgggguguacuuugccagcaccgagaaguccaacaucaucagaggcuggaucuucggcaccacacuggacagcaagacccagagccugcugaucgugaacaacgccaccaacguggucaucaaagugugcgaguuccaguucugcaacgaccccuuccugggcgucuacuaccacaagaacaacaagagcuggauggaaagcgaguuccggguguacagcagcgccaacaacugcaccuucgaguacgugucccagccuuuccugauggaccuggaaggcaagcagggcaacuucaagaaccugcgcgaguucguguucaagaacaucgacggcuacuucaaaaucuacagcaagcacaccccuaucaaccucgugcgggaucugccucagggcuucucugcucuggaaccccugguggaucugcccaucggcaucaacaucacccgguuucagacacugcuggcccugcacagaagcuaccugacaccuggcgauagcagcagcggauggacagcuggugccgccgcuuacuaugugggcuaccugcagccuagaaccuuccugcugaaguacaacgagaacggcaccaucaccgacgccguggauugugcucuggauccucugagcgagacaaagugcacccugaaguccuucaccguggaaaagggcaucuaccagaccagcaacuuccgggugcagcccaccgaauccaucgugcgguuccccaauaucaccaaucugugccccuucggcgagguguucaaugccaccagauucgccucuguguacgccuggaaccggaagcggaucagcaauugcguggccgacuacuccgugcuguacaacuccgccagcuucagcaccuucaagugcuacggcguguccccuaccaagcugaacgaccugugcuucacaaacguguacgccgacagcuucgugauccggggagaugaagugcggcagauugccccuggacagacaggcaagaucgccgacuacaacuacaagcugcccgacgacuucaccggcugugugauugccuggaacagcaacaaccuggacuccaaagucggcggcaacuacaauuaccuguaccggcuguuccggaaguccaaucugaagcccuucgagcgggacaucagcaccgaaaucuaucaggccggcagcaccccuugcaacggcguggaaggcuucaacugcuacuucccacugcaguccuacggcuuucagcccacaaauggcgugggcuaucagcccuacagagugguggugcugagcuucgaacugcugcaugcuccugccacagugugcggcccuaagaaaagcaccaaucucgugaagaacaaaugcgugaacuucaacuucaacggccugaccggcaccggcgugcugacagagagcaacaagaaguuccugccauuccagcaguuuggccgggauaucgccgauaccacagacgccguuagagauccccagacacuggaaauccuggacaucaccccaugcagcuucggcggagugucugugaucaccccuggcaccaacaccagcaaucagguggcagugcuguaccaggacgugaacuguaccgaagugcccguggccauucacgccgaucagcugacaccuacauggcggguguacuccaccggcagcaauguguuucagaccagagccggcugucugaucggagccgagcacgugaacaauagcuacgagugcgacauccccaucggcgcuggcaucugugccagcuaccagacacagacaaacagccccagacgggcuagaagcguggccagccagagcaucauugccuacacaaugucucugggcgccgagaacagcguggccuacuccaacaacucuaucgcuauccccaccaacuucaccaucagcgugaccaccgagauccugccuguguccaugaccaagaccagcguggacugcaccauguacaucugcggcgauuccaccgagugcuccaaccugcugcugcaguacggcagcuucugcacccagcugaauagagcccugacagggaucgccguggaacaggacaagaacacccaagagguguucgcccaagugaagcaaaucuacaagaccccuccuaucaaggacuucggcggcuucaauuucagccagauucugcccgauccuagcaagcccagcaagcggagcuucaucgaggaccugcuguucaacaaagugacacuggccgacgccggcuucaucaagcaguauggcgauugucugggcgacauugccgccagggaucugauuugcgcccagaaguuuaacggacugacagugcugccuccucugcugaccgaugagaugaucgcccaguacacaucugcccugcuggccggcacaaucacaagcggcuggacauuuggagcuggcgccgcucugcagauccccuuugcuaugcagauggccuaccgguucaacggcaucggagugacccagaaugugcuguacgagaaccagaagcugaucgccaaccaguucaacagcgccaucggcaagauccaggacagccugagcagcacagcaagcgcccugggaaagcugcaggacguggucaaccagaaugcccaggcacugaacacccuggucaagugccuguccuccaacuucggcgccaucagcucugugcugaacgauauccugagcagacuggacaaggucgaggccgaggugcagaucgacagacugaucacaggcagacugcagugucuccagacauacgugacccagcagcugaucagagccgccgagauuagagccucugccaaucuggccgccaccaagaugucugagugugugcugggccagagcaagagaguggacuuuugcggcaagggcuaccaccugaugagcuucccucagucugccccucacggcgugguguuucugcacgugacauaugugcccgcucaagagaagaauuucaccaccgcuccagccaucugccacgacggcaaagcccacuuuccuagagaaggcguguucguguccaacggcacccauugguucgugacacagcggaacuucuacgagccccagaucaucaccaccgacaacaccuucgugucuggcaacugcgacguugugaucggcauugugaacaauaccguguacgacccucugcagcccgagcuggacagcuucaaagaggaacuggacaaguacuuuaagaaccacacaagccccgacguggaccugggcgauaucagcggaaucaaugccagcgucgugaacauccagaaagagaucgaccggcugaacgagguggccaagaaucugaacgagagccugaucgaccugcaagaacuggggaaguacgagcaguacaucaag

SEQ ID NO: 12065 - RNA, 3633 nt, Artificial Sequence
  SARS-CoV-2/Wuhan/WIV05/2019__EPI_ISL_402128 spike protein CDS gc mod (1-1211)(F970C_G999C)
auguucguguuucuggugcugcugccccugguguccagccagugugugaaccugaccaccagaacacagcugccuccagccuacaccaacagcuucaccagaggcguguacuaccccgacaagguguucagauccagcgugcugcacucuacccaggaccuguuccugccuuucuucagcaacgugaccugguuccacgccauccacguguccggcaccaauggcaccaagagauucgacaaccccgugcugcccuucaacgacgggguguacuuugccagcaccgagaaguccaacaucaucagaggcuggaucuucggcaccacacuggacagcaagacccagagccugcugaucgugaacaacgccaccaacguggucaucaaagugugcgaguuccaguucugcaacgaccccuuccugggcgucuacuaccacaagaacaacaagagcuggauggaaagcgaguuccggguguacagcagcgccaacaacugcaccuucgaguacgugucccagccuuuccugauggaccuggaaggcaagcagggcaacuucaagaaccugcgcgaguucguguucaagaacaucgacggcuacuucaaaaucuacagcaagcacaccccuaucaaccucgugcgggaucugccucagggcuucucugcucuggaaccccugguggaucugcccaucggcaucaacaucacccgguuucagacacugcuggcccugcacagaagcuaccugacaccuggcgauagcagcagcggauggacagcuggugccgccgcuuacuaugugggcuaccugcagccuagaaccuuccugcugaaguacaacgagaacggcaccaucaccgacgccguggauugugcucuggauccucugagcgagacaaagugcacccugaaguccuucaccguggaaaagggcaucuaccagaccagcaacuuccgggugcagcccaccgaauccaucgugcgguuccccaauaucaccaaucugugccccuucggcgagguguucaaugccaccagauucgccucuguguacgccuggaaccggaagcggaucagcaauugcguggccgacuacuccgugcuguacaacuccgccagcuucagcaccuucaagugcuacggcguguccccuaccaagcugaacgaccugugcuucacaaacguguacgccgacagcuucgugauccggggagaugaagugcggcagauugccccuggacagacaggcaagaucgccgacuacaacuacaagcugcccgacgacuucaccggcugugugauugccuggaacagcaacaaccuggacuccaaagucggcggcaacuacaauuaccuguaccggcuguuccggaaguccaaucugaagcccuucgagcgggacaucagcaccgaaaucuaucaggccggcagcaccccuugcaacggcguggaaggcuucaacugcuacuucccacugcaguccuacggcuuucagcccacaaauggcgugggcuaucagcccuacagagugguggugcugagcuucgaacugcugcaugcuccugccacagugugcggcccuaagaaaagcaccaaucucgugaagaacaaaugcgugaacuucaacuucaacggccugaccggcaccggcgugcugacagagagcaacaagaaguuccugccauuccagcaguuuggccgggauaucgccgauaccacagacgccguuagagauccccagacacuggaaauccuggacaucaccccaugcagcuucggcggagugucugugaucaccccuggcaccaacaccagcaaucagguggcagugcuguaccaggacgugaacuguaccgaagugcccguggccauucacgccgaucagcugacaccuacauggcggguguacuccaccggcagcaauguguuucagaccagagccggcugucugaucggagccgagcacgugaacaauagcuacgagugcgacauccccaucggcgcuggcaucugugccagcuaccagacacagacaaacagccccagacgggcuagaagcguggccagccagagcaucauugccuacacaaugucucugggcgccgagaacagcguggccuacuccaacaacucuaucgcuauccccaccaacuucaccaucagcgugaccaccgagauccugccuguguccaugaccaagaccagcguggacugcaccauguacaucugcggcgauuccaccgagugcuccaaccugcugcugcaguacggcagcuucugcacccagcugaauagagcccugacagggaucgccguggaacaggacaagaacacccaagagguguucgcccaagugaagcaaaucuacaagaccccuccuaucaaggacuucggcggcuucaauuucagccagauucugcccgauccuagcaagcccagcaagcggagcuucaucgaggaccugcuguucaacaaagugacacuggccgacgccggcuucaucaagcaguauggcgauugucugggcgacauugccgccagggaucugauuugcgcccagaaguuuaacggacugacagugcugccuccucugcugaccgaugagaugaucgcccaguacacaucugcccugcuggccggcacaaucacaagcggcuggacauuuggagcuggcgccgcucugcagauccccuuugcuaugcagauggccuaccgguucaacggcaucggagugacccagaaugugcuguacgagaaccagaagcugaucgccaaccaguucaacagcgccaucggcaagauccaggacagccugagcagcacagcaagcgcccugggaaagcugcaggacguggucaaccagaaugcccaggcacugaacacccuggucaagcagcuguccuccaacugcggcgccaucagcucugugcugaacgauauccugagcagacuggacaaggucgaggccgaggugcagaucgacagacugaucacauguagacugcagagccuccagacauacgugacccagcagcugaucagagccgccgagauuagagccucugccaaucuggccgccaccaagaugucugagugugugcugggccagagcaagagaguggacuuuugcggcaagggcuaccaccugaugagcuucccucagucugccccucacggcgugguguuucugcacgugacauaugugcccgcucaagagaagaauuucaccaccgcuccagccaucugccacgacggcaaagcccacuuuccuagagaaggcguguucguguccaacggcacccauugguucgugacacagcggaacuucuacgagccccagaucaucaccaccgacaacaccuucgugucuggcaacugcgacguugugaucggcauugugaacaauaccguguacgacccucugcagcccgagcuggacagcuucaaagaggaacuggacaaguacuuuaagaaccacacaagccccgacguggaccugggcgauaucagcggaaucaaugccagcgucgugaacauccagaaagagaucgaccggcugaacgagguggccaagaaucugaacgagagccugaucgaccugcaagaacuggggaaguacgagcaguacaucaag

SEQ ID NO: 12066 - RNA, 3633 nt, Artificial Sequence
  SARS-CoV-2/Wuhan/WIV05/2019__EPI_ISL_402128 spike protein CDS gc mod (1-1211)(A972C_R995C)
auguucguguuucuggugcugcugccccugguguccagccagugugugaaccugaccaccagaacacagcugccuccagccuacaccaacagcuucaccagaggcguguacuaccccgacaagguguucagauccagcgugcugcacucuacccaggaccuguuccugccuuucuucagcaacgugaccugguuccacgccauccacguguccggcaccaauggcaccaagagauucgacaaccccgugcugcccuucaacgacgggguguacuuugccagcaccgagaaguccaacaucaucagaggcuggaucuucggcaccacacuggacagcaagacccagagccugcugaucgugaacaacgccaccaacguggucaucaaagugugcgaguuccaguucugcaacgaccccuuccugggcgucuacuaccacaagaacaacaagagcuggauggaaagcgaguuccggguguacagcagcgccaacaacugcaccuucgaguacgugucccagccuuuccugauggaccuggaaggcaagcagggcaacuucaagaaccugcgcgaguucguguucaagaacaucgacggcuacuucaaaaucuacagcaagcacaccccuaucaaccucgugcgggaucugccucagggcuucucugcucuggaaccccugguggaucugcccaucggcaucaacaucacccgguuucagacacugcuggcccugcacagaagcuaccugacaccuggcgauagcagcagcggauggacagcuggugccgccgcuuacuaugugggcuaccugcagccuagaaccuuccugcugaaguacaacgagaacggcaccaucaccgacgccguggauugugcucuggauccucugagcgagacaaagugcacccugaaguccuucaccguggaaaagggcaucuaccagaccagcaacuuccgggugcagcccaccgaauccaucgugcgguuccccaauaucaccaaucugugccccuucggcgagguguucaaugccaccagauucgccucuguguacgccuggaaccggaagcggaucagcaauugcguggccgacuacuccgugcuguacaacuccgccagcuucagcaccuucaagugcuacggcguguccccuaccaagcugaacgaccugugcuucacaaacguguacgccgacagcuucgugauccggggagaugaagugcggcagauugccccuggacagacaggcaagaucgccgacuacaacuacaagcugcccgacgacuucaccggcugugugauugccuggaacagcaacaaccuggacuccaaagucggcggcaacuacaauuaccuguaccggcuguuccggaaguccaaucugaagcccuucgagcgggacaucagcaccgaaaucuaucaggccggcagcaccccuugcaacggcguggaaggcuucaacugcuacuucccacugcaguccuacggcuuucagcccacaaauggcgugggcuaucagcccuacagagugguggugcugagcuucgaacugcugcaugcuccugccacagugugcggcccuaagaaaagcaccaaucucgugaagaacaaaugcgugaacuucaacuucaacggccugaccggcaccggcgugcugacagagagcaacaagaaguuccugccauuccagcaguuuggccgggauaucgccgauaccacagacgccguuagagauccccagacacuggaaauccuggacaucaccccaugcagcuucggcggagugucugugaucaccccuggcaccaacaccagcaaucagguggcagugcuguaccaggacgugaacuguaccgaagugcccguggccauucacgccgaucagcugacaccuacauggcggguguacuccaccggcagcaauguguuucagaccagagccggcugucugaucggagccgagcacgugaacaauagcuacgagugcgacauccccaucggcgcuggcaucugugccagcuaccagacacagacaaacagccccagacgggcuagaagcguggccagccagagcaucauugccuacacaaugucucugggcgccgagaacagcguggccuacuccaacaacucuaucgcuauccccaccaacuucaccaucagcgugaccaccgagauccugccuguguccaugaccaagaccagcguggacugcaccauguacaucugcggcgauuccaccgagugcuccaaccugcugcugcaguacggcagcuucugcacccagcugaauagagcccugacagggaucgccguggaacaggacaagaacacccaagagguguucgcccaagugaagcaaaucuacaagaccccuccuaucaaggacuucggcggcuucaauuucagccagauucugcccgauccuagcaagcccagcaagcggagcuucaucgaggaccugcuguucaacaaagugacacuggccgacgccggcuucaucaagcaguauggcgauugucugggcgacauugccgccagggaucugauuugcgcccagaaguuuaacggacugacagugcugccuccucugcugaccgaugagaugaucgcccaguacacaucugcccugcuggccggcacaaucacaagcggcuggacauuuggagcuggcgccgcucugcagauccccuuugcuaugcagauggccuaccgguucaacggcaucggagugacccagaaugugcuguacgagaaccagaagcugaucgccaaccaguucaacagcgccaucggcaagauccaggacagccugagcagcacagcaagcgcccugggaaagcugcaggacguggucaaccagaaugcccaggcacugaacacccuggucaagcagcuguccuccaacuucggcugcaucagcucugugcugaacgauauccugagcagacuggacaaggucgaggccgaggugcagaucgacugucugaucacaggcagacugcagagccuccagacauacgugacccagcagcugaucagagccgccgagauuagagccucugccaaucuggccgccaccaagaugucugagugugugcugggccagagcaagagaguggacuuuugcggcaagggcuaccaccugaugagcuucccucagucugccccucacggcgugguguuucugcacgugacauaugugcccgcucaagagaagaauuucaccaccgcuccagccaucugccacgacggcaaagcccacuuuccuagagaaggcguguucguguccaacggcacccauugguucgugacacagcggaacuucuacgagccccagaucaucaccaccgacaacaccuucgugucuggcaacugcgacguugugaucggcauugugaacaauaccguguacgacccucugcagcccgagcuggacagcuucaaagaggaacuggacaaguacuuuaagaaccacacaagccccgacguggaccugggcgauaucagcggaaucaaugccagcgucgugaacauccagaaagagaucgaccggcugaacgagguggccaagaaucugaacgagagccugaucgaccugcaagaacuggggaaguacgagcaguacaucaag

SEQ ID NO: 12067 - RNA, 3633 nt, Artificial Sequence
  SARS-CoV-2/Wuhan/WIV05/2019__EPI_ISL_402128 spike protein CDS gc mod (1-1211)(A890C_V1040C)
auguucguguuucuggugcugcugccccugguguccagccagugugugaaccugaccaccagaacacagcugccuccagccuacaccaacagcuucaccagaggcguguacuaccccgacaagguguucagauccagcgugcugcacucuacccaggaccuguuccugccuuucuucagcaacgugaccugguuccacgccauccacguguccggcaccaauggcaccaagagauucgacaaccccgugcugcccuucaacgacgggguguacuuugccagcaccgagaaguccaacaucaucagaggcuggaucuucggcaccacacuggacagcaagacccagagccugcugaucgugaacaacgccaccaacguggucaucaaagugugcgaguuccaguucugcaacgaccccuuccugggcgucuacuaccacaagaacaacaagagcuggauggaaagcgaguuccggguguacagcagcgccaacaacugcaccuucgaguacgugucccagccuuuccugauggaccuggaaggcaagcagggcaacuucaagaaccugcgcgaguucguguucaagaacaucgacggcuacuucaaaaucuacagcaagcacaccccuaucaaccucgugcgggaucugccucagggcuucucugcucuggaaccccugguggaucugcccaucggcaucaacaucacccgguuucagacacugcuggcccugcacagaagcuaccugacaccuggcgauagcagcagcggauggacagcuggugccgccgcuuacuaugugggcuaccugcagccuagaaccuuccugcugaaguacaacgagaacggcaccaucaccgacgccguggauugugcucuggauccucugagcgagacaaagugcacccugaaguccuucaccguggaaaagggcaucuaccagaccagcaacuuccgggugcagcccaccgaauccaucgugcgguuccccaauaucaccaaucugugccccuucggcgagguguucaaugccaccagauucgccucuguguacgccuggaaccggaagcggaucagcaauugcguggccgacuacuccgugcuguacaacuccgccagcuucagcaccuucaagugcuacggcguguccccuaccaagcugaacgaccugugcuucacaaacguguacgccgacagcuucgugauccggggagaugaagugcggcagauugccccuggacagacaggcaagaucgccgacuacaacuacaagcugcccgacgacuucaccggcugugugauugccuggaacagcaacaaccuggacuccaaagucggcggcaacuacaauuaccuguaccggcuguuccggaaguccaaucugaagcccuucgagcgggacaucagcaccgaaaucuaucaggccggcagcaccccuugcaacggcguggaaggcuucaacugcuacuucccacugcaguccuacggcuuucagcccacaaauggcgugggcuaucagcccuacagagugguggugcugagcuucgaacugcugcaugcuccugccacagugugcggcccuaagaaaagcaccaaucucgugaagaacaaaugcgugaacuucaacuucaacggccugaccggcaccggcgugcugacagagagcaacaagaaguuccugccauuccagcaguuuggccgggauaucgccgauaccacagacgccguuagagauccccagacacuggaaauccuggacaucaccccaugcagcuucggcggagugucugugaucaccccuggcaccaacaccagcaaucagguggcagugcuguaccaggacgugaacuguaccgaagugcccguggccauucacgccgaucagcugacaccuacauggcggguguacuccaccggcagcaauguguuucagaccagagccggcugucugaucggagccgagcacgugaacaauagcuacgagugcgacauccccaucggcgcuggcaucugugccagcuaccagacacagacaaacagccccagacgggcuagaagcguggccagccagagcaucauugccuacacaaugucucugggcgccgagaacagcguggccuacuccaacaacucuaucgcuauccccaccaacuucaccaucagcgugaccaccgagauccugccuguguccaugaccaagaccagcguggacugcaccauguacaucugcggcgauuccaccgagugcuccaaccugcugcugcaguacggcagcuucugcacccagcugaauagagcccugacagggaucgccguggaacaggacaagaacacccaagagguguucgcccaagugaagcaaaucuacaagaccccuccuaucaaggacuucggcggcuucaauuucagccagauucugcccgauccuagcaagcccagcaagcggagcuucaucgaggaccugcuguucaacaaagugacacuggccgacgccggcuucaucaagcaguauggcgauugucugggcgacauugccgccagggaucugauuugcgcccagaaguuuaacggacugacagugcugccuccucugcugaccgaugagaugaucgcccaguacacaucugcccugcuggccggcacaaucacaagcggcuggacauuuggaugcggcgccgcucugcagauccccuuugcuaugcagauggccuaccgguucaacggcaucggagugacccagaaugugcuguacgagaaccagaagcugaucgccaaccaguucaacagcgccaucggcaagauccaggacagccugagcagcacagcaagcgcccugggaaagcugcaggacguggucaaccagaaugcccaggcacugaacacccuggucaagcagcuguccuccaacuucggcgccaucagcucugugcugaacgauauccugagcagacuggacaaggucgaggccgaggugcagaucgacagacugaucacaggcagacugcagagccuccagacauacgugacccagcagcugaucagagccgccgagauuagagccucugccaaucuggccgccaccaagaugucugagugugugcugggccagagcaagagaugugacuuuugcggcaagggcuaccaccugaugagcuucccucagucugccccucacggcgugguguuucugcacgugacauaugugcccgcucaagagaagaauuucaccaccgcuccagccaucugccacgacggcaaagcccacuuuccuagagaaggcguguucguguccaacggcacccauugguucgugacacagcggaacuucuacgagccccagaucaucaccaccgacaacaccuucgugucuggcaacugcgacguugugaucggcauugugaacaauaccguguacgacccucugcagcccgagcuggacagcuucaaagaggaacuggacaaguacuuuaagaaccacacaagccccgacguggaccugggcgauaucagcggaaucaaugccagcgucgugaacauccagaaagagaucgaccggcugaacgagguggccaagaaucugaacgagagccugaucgaccugcaagaacuggggaaguacgagcaguacaucaag

SEQ ID NO: 12068 - RNA, 3633 nt, Artificial Sequence
  SARS-CoV-2/Wuhan/WIV05/2019__EPI_ISL_402128 spike protein CDS gc mod (1-1211)(T874C_S1055C)
auguucguguuucuggugcugcugccccugguguccagccagugugugaaccugaccaccagaacacagcugccuccagccuacaccaacagcuucaccagaggcguguacuaccccgacaagguguucagauccagcgugcugcacucuacccaggaccuguuccugccuuucuucagcaacgugaccugguuccacgccauccacguguccggcaccaauggcaccaagagauucgacaaccccgugcugcccuucaacgacgggguguacuuugccagcaccgagaaguccaacaucaucagaggcuggaucuucggcaccacacuggacagcaagacccagagccugcugaucgugaacaacgccaccaacguggucaucaaagugugcgaguuccaguucugcaacgaccccuuccugggcgucuacuaccacaagaacaacaagagcuggauggaaagcgaguuccggguguacagcagcgccaacaacugcaccuucgaguacgugucccagccuuuccugauggaccuggaaggcaagcagggcaacuucaagaaccugcgcgaguucguguucaagaacaucgacggcuacuucaaaaucuacagcaagcacaccccuaucaaccucgugcgggaucugccucagggcuucucugcucuggaaccccugguggaucugcccaucggcaucaacaucacccgguuucagacacugcuggcccugcacagaagcuaccugacaccuggcgauagcagcagcggauggacagcuggugccgccgcuuacuaugugggcuaccugcagccuagaaccuuccugcugaaguacaacgagaacggcaccaucaccgacgccguggauugugcucuggauccucugagcgagacaaagugcacccugaaguccuucaccguggaaaagggcaucuaccagaccagcaacuuccgggugcagcccaccgaauccaucgugcgguuccccaauaucaccaaucugugccccuucggcgagguguucaaugccaccagauucgccucuguguacgccuggaaccggaagcggaucagcaauugcguggccgacuacuccgugcuguacaacuccgccagcuucagcaccuucaagugcuacggcguguccccuaccaagcugaacgaccugugcuucacaaacguguacgccgacagcuucgugauccggggagaugaagugcggcagauugccccuggacagacaggcaagaucgccgacuacaacuacaagcugcccgacgacuucaccggcugugugauugccuggaacagcaacaaccuggacuccaaagucggcggcaacuacaauuaccuguaccggcuguuccggaaguccaaucugaagcccuucgagcgggacaucagcaccgaaaucuaucaggccggcagcaccccuugcaacggcguggaaggcuucaacugcuacuucccacugcaguccuacggcuuucagcccacaaauggcgugggcuaucagcccuacagagugguggugcugagcuucgaacugcugcaugcuccugccacagugugcggcccuaagaaaagcaccaaucucgugaagaacaaaugcgugaacuucaacuucaacggccugaccggcaccggcgugcugacagagagcaacaagaaguuccugccauuccagcaguuuggccgggauaucgccgauaccacagacgccguuagagauccccagacacuggaaauccuggacaucaccccaugcagcuucggcggagugucugugaucaccccuggcaccaacaccagcaaucagguggcagugcuguaccaggacgugaacuguaccgaagugcccguggccauucacgccgaucagcugacaccuacauggcggguguacuccaccggcagcaauguguuucagaccagagccggcugucugaucggagccgagcacgugaacaauagcuacgagugcgacauccccaucggcgcuggcaucugugccagcuaccagacacagacaaacagccccagacgggcuagaagcguggccagccagagcaucauugccuacacaaugucucugggcgccgagaacagcguggccuacuccaacaacucuaucgcuauccccaccaacuucaccaucagcgugaccaccgagauccugccuguguccaugaccaagaccagcguggacugcaccauguacaucugcggcgauuccaccgagugcuccaaccugcugcugcaguacggcagcuucugcacccagcugaauagagcccugacagggaucgccguggaacaggacaagaacacccaagagguguucgcccaagugaagcaaaucuacaagaccccuccuaucaaggacuucggcggcuucaauuucagccagauucugcccgauccuagcaagcccagcaagcggagcuucaucgaggaccugcuguucaacaaagugacacuggccgacgccggcuucaucaagcaguauggcgauugucugggcgacauugccgccagggaucugauuugcgcccagaaguuuaacggacugacagugcugccuccucugcugaccgaugagaugaucgcccaguacugcucugcccugcuggccggcacaaucacaagcggcuggacauuuggagcuggcgccgcucugcagauccccuuugcuaugcagauggccuaccgguucaacggcaucggagugacccagaaugugcuguacgagaaccagaagcugaucgccaaccaguucaacagcgccaucggcaagauccaggacagccugagcagcacagcaagcgcccugggaaagcugcaggacguggucaaccagaaugcccaggcacugaacacccuggucaagcagcuguccuccaacuucggcgccaucagcucugugcugaacgauauccugagcagacuggacaaggucgaggccgaggugcagaucgacagacugaucacaggcagacugcagagccuccagacauacgugacccagcagcugaucagagccgccgagauuagagccucugccaaucuggccgccaccaagaugucugagugugugcugggccagagcaagagaguggacuuuugcggcaagggcuaccaccugaugagcuucccucagugcgccccucacggcgugguguuucugcacgugacauaugugcccgcucaagagaagaauuucaccaccgcuccagccaucugccacgacggcaaagcccacuuuccuagagaaggcguguucguguccaacggcacccauugguucgugacacagcggaacuucuacgagccccagaucaucaccaccgacaacaccuucgugucuggcaacugcgacguugugaucggcauugugaacaauaccguguacgacccucugcagcccgagcuggacagcuucaaagaggaacuggacaaguacuuuaagaaccacacaagccccgacguggaccugggcgauaucagcggaaucaaugccagcgucgugaacauccagaaagagaucgaccggcugaacgagguggccaagaaucugaacgagagccugaucgaccugcaagaacuggggaaguacgagcaguacaucaag

SEQ ID NO: 12069 - RNA, 3441 nt, Artificial Sequence
  SARS-CoV-2/Wuhan/WIV05/2019__EPI_ISL_402128 spike protein CDS gc mod (1-1147)
auguucguguuucuggugcugcugccccugguguccagccagugugugaaccugaccaccagaacacagcugccuccagccuacaccaacagcuucaccagaggcguguacuaccccgacaagguguucagauccagcgugcugcacucuacccaggaccuguuccugccuuucuucagcaacgugaccugguuccacgccauccacguguccggcaccaauggcaccaagagauucgacaaccccgugcugcccuucaacgacgggguguacuuugccagcaccgagaaguccaacaucaucagaggcuggaucuucggcaccacacuggacagcaagacccagagccugcugaucgugaacaacgccaccaacguggucaucaaagugugcgaguuccaguucugcaacgaccccuuccugggcgucuacuaccacaagaacaacaagagcuggauggaaagcgaguuccggguguacagcagcgccaacaacugcaccuucgaguacgugucccagccuuuccugauggaccuggaaggcaagcagggcaacuucaagaaccugcgcgaguucguguucaagaacaucgacggcuacuucaaaaucuacagcaagcacaccccuaucaaccucgugcgggaucugccucagggcuucucugcucuggaaccccugguggaucugcccaucggcaucaacaucacccgguuucagacacugcuggcccugcacagaagcuaccugacaccuggcgauagcagcagcggauggacagcuggugccgccgcuuacuaugugggcuaccugcagccuagaaccuuccugcugaaguacaacgagaacggcaccaucaccgacgccguggauugugcucuggauccucugagcgagacaaagugcacccugaaguccuucaccguggaaaagggcaucuaccagaccagcaacuuccgggugcagcccaccgaauccaucgugcgguuccccaauaucaccaaucugugccccuucggcgagguguucaaugccaccagauucgccucuguguacgccuggaaccggaagcggaucagcaauugcguggccgacuacuccgugcuguacaacuccgccagcuucagcaccuucaagugcuacggcguguccccuaccaagcugaacgaccugugcuucacaaacguguacgccgacagcuucgugauccggggagaugaagugcggcagauugccccuggacagacaggcaagaucgccgacuacaacuacaagcugcccgacgacuucaccggcugugugauugccuggaacagcaacaaccuggacuccaaagucggcggcaacuacaauuaccuguaccggcuguuccggaaguccaaucugaagcccuucgagcgggacaucagcaccgaaaucuaucaggccggcagcaccccuugcaacggcguggaaggcuucaacugcuacuucccacugcaguccuacggcuuucagcccacaaauggcgugggcuaucagcccuacagagugguggugcugagcuucgaacugcugcaugcuccugccacagugugcggcccuaagaaaagcaccaaucucgugaagaacaaaugcgugaacuucaacuucaacggccugaccggcaccggcgugcugacagagagcaacaagaaguuccugccauuccagcaguuuggccgggauaucgccgauaccacagacgccguuagagauccccagacacuggaaauccuggacaucaccccaugcagcuucggcggagugucugugaucaccccuggcaccaacaccagcaaucagguggcagugcuguaccaggacgugaacuguaccgaagugcccguggccauucacgccgaucagcugacaccuacauggcggguguacuccaccggcagcaauguguuucagaccagagccggcugucugaucggagccgagcacgugaacaauagcuacgagugcgacauccccaucggcgcuggcaucugugccagcuaccagacacagacaaacagccccagacgggcuagaagcguggccagccagagcaucauugccuacacaaugucucugggcgccgagaacagcguggccuacuccaacaacucuaucgcuauccccaccaacuucaccaucagcgugaccaccgagauccugccuguguccaugaccaagaccagcguggacugcaccauguacaucugcggcgauuccaccgagugcuccaaccugcugcugcaguacggcagcuucugcacccagcugaauagagcccugacagggaucgccguggaacaggacaagaacacccaagagguguucgcccaagugaagcaaaucuacaagaccccuccuaucaaggacuucggcggcuucaauuucagccagauucugcccgauccuagcaagcccagcaagcggagcuucaucgaggaccugcuguucaacaaagugacacuggccgacgccggcuucaucaagcaguauggcgauugucugggcgacauugccgccagggaucugauuugcgcccagaaguuuaacggacugacagugcugccuccucugcugaccgaugagaugaucgcccaguacacaucugcccugcuggccggcacaaucacaagcggcuggacauuuggagcuggcgccgcucugcagauccccuuugcuaugcagauggccuaccgguucaacggcaucggagugacccagaaugugcuguacgagaaccagaagcugaucgccaaccaguucaacagcgccaucggcaagauccaggacagccugagcagcacagcaagcgcccugggaaagcugcaggacguggucaaccagaaugcccaggcacugaacacccuggucaagcagcuguccuccaacuucggcgccaucagcucugugcugaacgauauccugagcagacuggacaaggucgaggccgaggugcagaucgacagacugaucacaggcagacugcagagccuccagacauacgugacccagcagcugaucagagccgccgagauuagagccucugccaaucuggccgccaccaagaugucugagugugugcugggccagagcaagagaguggacuuuugcggcaagggcuaccaccugaugagcuucccucagucugccccucacggcgugguguuucugcacgugacauaugugcccgcucaagagaagaauuucaccaccgcuccagccaucugccacgacggcaaagcccacuuuccuagagaaggcguguucguguccaacggcacccauugguucgugacacagcggaacuucuacgagccccagaucaucaccaccgacaacaccuucgugucuggcaacugcgacguugugaucggcauugugaacaauaccguguacgacccucugcagcccgagcuggacagc

SEQ ID NO: 12070 - RNA, 3441 nt, Artificial Sequence
  SARS-CoV-2/Wuhan/WIV05/2019__EPI_ISL_402128 spike protein CDS gc mod (1-1147)(K986P_V987P)
auguucguguuucuggugcugcugccccugguguccagccagugugugaaccugaccaccagaacacagcugccuccagccuacaccaacagcuucaccagaggcguguacuaccccgacaagguguucagauccagcgugcugcacucuacccaggaccuguuccugccuuucuucagcaacgugaccugguuccacgccauccacguguccggcaccaauggcaccaagagauucgacaaccccgugcugcccuucaacgacgggguguacuuugccagcaccgagaaguccaacaucaucagaggcuggaucuucggcaccacacuggacagcaagacccagagccugcugaucgugaacaacgccaccaacguggucaucaaagugugcgaguuccaguucugcaacgaccccuuccugggcgucuacuaccacaagaacaacaagagcuggauggaaagcgaguuccggguguacagcagcgccaacaacugcaccuucgaguacgugucccagccuuuccugauggaccuggaaggcaagcagggcaacuucaagaaccugcgcgaguucguguucaagaacaucgacggcuacuucaaaaucuacagcaagcacaccccuaucaaccucgugcgggaucugccucagggcuucucugcucuggaaccccugguggaucugcccaucggcaucaacaucacccgguuucagacacugcuggcccugcacagaagcuaccugacaccuggcgauagcagcagcggauggacagcuggugccgccgcuuacuaugugggcuaccugcagccuagaaccuuccugcugaaguacaacgagaacggcaccaucaccgacgccguggauugugcucuggauccucugagcgagacaaagugcacccugaaguccuucaccguggaaaagggcaucuaccagaccagcaacuuccgggugcagcccaccgaauccaucgugcgguuccccaauaucaccaaucugugccccuucggcgagguguucaaugccaccagauucgccucuguguacgccuggaaccggaagcggaucagcaauugcguggccgacuacuccgugcuguacaacuccgccagcuucagcaccuucaagugcuacggcguguccccuaccaagcugaacgaccugugcuucacaaacguguacgccgacagcuucgugauccggggagaugaagugcggcagauugccccuggacagacaggcaagaucgccgacuacaacuacaagcugcccgacgacuucaccggcugugugauugccuggaacagcaacaaccuggacuccaaagucggcggcaacuacaauuaccuguaccggcuguuccggaaguccaaucugaagcccuucgagcgggacaucagcaccgaaaucuaucaggccggcagcaccccuugcaacggcguggaaggcuucaacugcuacuucccacugcaguccuacggcuuucagcccacaaauggcgugggcuaucagcccuacagagugguggugcugagcuucgaacugcugcaugcuccugccacagugugcggcccuaagaaaagcaccaaucucgugaagaacaaaugcgugaacuucaacuucaacggccugaccggcaccggcgugcugacagagagcaacaagaaguuccugccauuccagcaguuuggccgggauaucgccgauaccacagacgccguuagagauccccagacacuggaaauccuggacaucaccccaugcagcuucggcggagugucugugaucaccccuggcaccaacaccagcaaucagguggcagugcuguaccaggacgugaacuguaccgaagugcccguggccauucacgccgaucagcugacaccuacauggcggguguacuccaccggcagcaauguguuucagaccagagccggcugucugaucggagccgagcacgugaacaauagcuacgagugcgacauccccaucggcgcuggcaucugugccagcuaccagacacagacaaacagccccagacgggcuagaagcguggccagccagagcaucauugccuacacaaugucucugggcgccgagaacagcguggccuacuccaacaacucuaucgcuauccccaccaacuucaccaucagcgugaccaccgagauccugccuguguccaugaccaagaccagcguggacugcaccauguacaucugcggcgauuccaccgagugcuccaaccugcugcugcaguacggcagcuucugcacccagcugaauagagcccugacagggaucgccguggaacaggacaagaacacccaagagguguucgcccaagugaagcaaaucuacaagaccccuccuaucaaggacuucggcggcuucaauuucagccagauucugcccgauccuagcaagcccagcaagcggagcuucaucgaggaccugcuguucaacaaagugacacuggccgacgccggcuucaucaagcaguauggcgauugucugggcgacauugccgccagggaucugauuugcgcccagaaguuuaacggacugacagugcugccuccucugcugaccgaugagaugaucgcccaguacacaucugcccugcuggccggcacaaucacaagcggcuggacauuuggagcuggcgccgcucugcagauccccuuugcuaugcagauggccuaccgguucaacggcaucggagugacccagaaugugcuguacgagaaccagaagcugaucgccaaccaguucaacagcgccaucggcaagauccaggacagccugagcagcacagcaagcgcccugggaaagcugcaggacguggucaaccagaaugcccaggcacugaacacccuggucaagcagcuguccuccaacuucggcgccaucagcucugugcugaacgauauccugagcagacuggacccuccugaggccgaggugcagaucgacagacugaucacaggcagacugcagagccuccagacauacgugacccagcagcugaucagagccgccgagauuagagccucugccaaucuggccgccaccaagaugucugagugugugcugggccagagcaagagaguggacuuuugcggcaagggcuaccaccugaugagcuucccucagucugccccucacggcgugguguuucugcacgugacauaugugcccgcucaagagaagaauuucaccaccgcuccagccaucugccacgacggcaaagcccacuuuccuagagaaggcguguucguguccaacggcacccauugguucgugacacagcggaacuucuacgagccccagaucaucaccaccgacaacaccuucgugucuggcaacugcgacguugugaucggcauugugaacaauaccguguacgacccucugcagcccgagcuggacagc

SEQ ID NO: 12071 - RNA, 3441 nt, Artificial Sequence
  SARS-CoV-2/Wuhan/WIV05/2019__EPI_ISL_402128 spike protein CDS gc mod (1-1147)(K986P_V987P_T887WN_A1020W)
auguucguguuucuggugcugcugccccugguguccagccagugugugaaccugaccaccagaacacagcugccuccagccuacaccaacagcuucaccagaggcguguacuaccccgacaagguguucagauccagcgugcugcacucuacccaggaccuguuccugccuuucuucagcaacgugaccugguuccacgccauccacguguccggcaccaauggcaccaagagauucgacaaccccgugcugcccuucaacgacgggguguacuuugccagcaccgagaaguccaacaucaucagaggcuggaucuucggcaccacacuggacagcaagacccagagccugcugaucgugaacaacgccaccaacguggucaucaaagugugcgaguuccaguucugcaacgaccccuuccugggcgucuacuaccacaagaacaacaagagcuggauggaaagcgaguuccggguguacagcagcgccaacaacugcaccuucgaguacgugucccagccuuuccugauggaccuggaaggcaagcagggcaacuucaagaaccugcgcgaguucguguucaagaacaucgacggcuacuucaaaaucuacagcaagcacaccccuaucaaccucgugcgggaucugccucagggcuucucugcucuggaaccccugguggaucugcccaucggcaucaacaucacccgguuucagacacugcuggcccugcacagaagcuaccugacaccuggcgauagcagcagcggauggacagcuggugccgccgcuuacuaugugggcuaccugcagccuagaaccuuccugcugaaguacaacgagaacggcaccaucaccgacgccguggauugugcucuggauccucugagcgagacaaagugcacccugaaguccuucaccguggaaaagggcaucuaccagaccagcaacuuccgggugcagcccaccgaauccaucgugcgguuccccaauaucaccaaucugugccccuucggcgagguguucaaugccaccagauucgccucuguguacgccuggaaccggaagcggaucagcaauugcguggccgacuacuccgugcuguacaacuccgccagcuucagcaccuucaagugcuacggcguguccccuaccaagcugaacgaccugugcuucacaaacguguacgccgacagcuucgugauccggggagaugaagugcggcagauugccccuggacagacaggcaagaucgccgacuacaacuacaagcugcccgacgacuucaccggcugugugauugccuggaacagcaacaaccuggacuccaaagucggcggcaacuacaauuaccuguaccggcuguuccggaaguccaaucugaagcccuucgagcgggacaucagcaccgaaaucuaucaggccggcagcaccccuugcaacggcguggaaggcuucaacugcuacuucccacugcaguccuacggcuuucagcccacaaauggcgugggcuaucagcccuacagagugguggugcugagcuucgaacugcugcaugcuccugccacagugugcggcccuaagaaaagcaccaaucucgugaagaacaaaugcgugaacuucaacuucaacggccugaccggcaccggcgugcugacagagagcaacaagaaguuccugccauuccagcaguuuggccgggauaucgccgauaccacagacgccguuagagauccccagacacuggaaauccuggacaucaccccaugcagcuucggcggagugucugugaucaccccuggcaccaacaccagcaaucagguggcagugcuguaccaggacgugaacuguaccgaagugcccguggccauucacgccgaucagcugacaccuacauggcggguguacuccaccggcagcaauguguuucagaccagagccggcugucugaucggagccgagcacgugaacaauagcuacgagugcgacauccccaucggcgcuggcaucugugccagcuaccagacacagacaaacagccccagacgggcuagaagcguggccagccagagcaucauugccuacacaaugucucugggcgccgagaacagcguggccuacuccaacaacucuaucgcuauccccaccaacuucaccaucagcgugaccaccgagauccugccuguguccaugaccaagaccagcguggacugcaccauguacaucugcggcgauuccaccgagugcuccaaccugcugcugcaguacggcagcuucugcacccagcugaauagagcccugacagggaucgccguggaacaggacaagaacacccaagagguguucgcccaagugaagcaaaucuacaagaccccuccuaucaaggacuucggcggcuucaauuucagccagauucugcccgauccuagcaagcccagcaagcggagcuucaucgaggaccugcuguucaacaaagugacacuggccgacgccggcuucaucaagcaguauggcgauugucugggcgacauugccgccagggaucugauuugcgcccagaaguuuaacggacugacagugcugccuccucugcugaccgaugagaugaucgcccaguacacaucugcccugcuggccggcacaaucacaagcggcuggugguuuggagcuggcgccgcucugcagauccccuuugcuaugcagauggccuaccgguucaacggcaucggagugacccagaaugugcuguacgagaaccagaagcugaucgccaaccaguucaacagcgccaucggcaagauccaggacagccugagcagcacagcaagcgcccugggaaagcugcaggacguggucaaccagaaugcccaggcacugaacacccuggucaagcagcuguccuccaacuucggcgccaucagcucugugcugaacgauauccugagcagacuggacccuccugaggccgaggugcagaucgacagacugaucacaggcagacugcagagccuccagacauacgugacccagcagcugaucagagccgccgagauuagauggucugccaaucuggccgccaccaagaugucugagugugugcugggccagagcaagagaguggacuuuugcggcaagggcuaccaccugaugagcuucccucagucugccccucacggcgugguguuucugcacgugacauaugugcccgcucaagagaagaauuucaccaccgcuccagccaucugccacgacggcaaagcccacuuuccuagagaaggcguguucguguccaacggcacccauugguucgugacacagcggaacuucuacgagccccagaucaucaccaccgacaacaccuucgugucuggcaacugcgacguugugaucggcauugugaacaauaccguguacgacccucugcagcccgagcuggacagc

SEQ ID NO: 12072 - RNA, 3441 nt, Artificial Sequence
  SARS-CoV-2/Wuhan/WIV05/2019__EPI_ISL_402128 spike protein CDS gc mod (1-1147)(K986P_V987P_P1069F)
auguucguguuucuggugcugcugccccugguguccagccagugugugaaccugaccaccagaacacagcugccuccagccuacaccaacagcuucaccagaggcguguacuaccccgacaagguguucagauccagcgugcugcacucuacccaggaccuguuccugccuuucuucagcaacgugaccugguuccacgccauccacguguccggcaccaauggcaccaagagauucgacaaccccgugcugcccuucaacgacgggguguacuuugccagcaccgagaaguccaacaucaucagaggcuggaucuucggcaccacacuggacagcaagacccagagccugcugaucgugaacaacgccaccaacguggucaucaaagugugcgaguuccaguucugcaacgaccccuuccugggcgucuacuaccacaagaacaacaagagcuggauggaaagcgaguuccggguguacagcagcgccaacaacugcaccuucgaguacgugucccagccuuuccugauggaccuggaaggcaagcagggcaacuucaagaaccugcgcgaguucguguucaagaacaucgacggcuacuucaaaaucuacagcaagcacaccccuaucaaccucgugcgggaucugccucagggcuucucugcucuggaaccccugguggaucugcccaucggcaucaacaucacccgguuucagacacugcuggcccugcacagaagcuaccugacaccuggcgauagcagcagcggauggacagcuggugccgccgcuuacuaugugggcuaccugcagccuagaaccuuccugcugaaguacaacgagaacggcaccaucaccgacgccguggauugugcucuggauccucugagcgagacaaagugcacccugaaguccuucaccguggaaaagggcaucuaccagaccagcaacuuccgggugcagcccaccgaauccaucgugcgguuccccaauaucaccaaucugugccccuucggcgagguguucaaugccaccagauucgccucuguguacgccuggaaccggaagcggaucagcaauugcguggccgacuacuccgugcuguacaacuccgccagcuucagcaccuucaagugcuacggcguguccccuaccaagcugaacgaccugugcuucacaaacguguacgccgacagcuucgugauccggggagaugaagugcggcagauugccccuggacagacaggcaagaucgccgacuacaacuacaagcugcccgacgacuucaccggcugugugauugccuggaacagcaacaaccuggacuccaaagucggcggcaacuacaauuaccuguaccggcuguuccggaaguccaaucugaagcccuucgagcgggacaucagcaccgaaaucuaucaggccggcagcaccccuugcaacggcguggaaggcuucaacugcuacuucccacugcaguccuacggcuuucagcccacaaauggcgugggcuaucagcccuacagagugguggugcugagcuucgaacugcugcaugcuccugccacagugugcggcccuaagaaaagcaccaaucucgugaagaacaaaugcgugaacuucaacuucaacggccugaccggcaccggcgugcugacagagagcaacaagaaguuccugccauuccagcaguuuggccgggauaucgccgauaccacagacgccguuagagauccccagacacuggaaauccuggacaucaccccaugcagcuucggcggagugucugugaucaccccuggcaccaacaccagcaaucagguggcagugcuguaccaggacgugaacuguaccgaagugcccguggccauucacgccgaucagcugacaccuacauggcggguguacuccaccggcagcaauguguuucagaccagagccggcugucugaucggagccgagcacgugaacaauagcuacgagugcgacauccccaucggcgcuggcaucugugccagcuaccagacacagacaaacagccccagacgggcuagaagcguggccagccagagcaucauugccuacacaaugucucugggcgccgagaacagcguggccuacuccaacaacucuaucgcuauccccaccaacuucaccaucagcgugaccaccgagauccugccuguguccaugaccaagaccagcguggacugcaccauguacaucugcggcgauuccaccgagugcuccaaccugcugcugcaguacggcagcuucugcacccagcugaauagagcccugacagggaucgccguggaacaggacaagaacacccaagagguguucgcccaagugaagcaaaucuacaagaccccuccuaucaaggacuucggcggcuucaauuucagccagauucugcccgauccuagcaagcccagcaagcggagcuucaucgaggaccugcuguucaacaaagugacacuggccgacgccggcuucaucaagcaguauggcgauugucugggcgacauugccgccagggaucugauuugcgcccagaaguuuaacggacugacagugcugccuccucugcugaccgaugagaugaucgcccaguacacaucugcccugcuggccggcacaaucacaagcggcuggacauuuggagcuggcgccgcucugcagauccccuuugcuaugcagauggccuaccgguucaacggcaucggagugacccagaaugugcuguacgagaaccagaagcugaucgccaaccaguucaacagcgccaucggcaagauccaggacagccugagcagcacagcaagcgcccugggaaagcugcaggacguggucaaccagaaugcccaggcacugaacacccuggucaagcagcuguccuccaacuucggcgccaucagcucugugcugaacgauauccugagcagacuggacccuccugaggccgaggugcagaucgacagacugaucacaggcagacugcagagccuccagacauacgugacccagcagcugaucagagccgccgagauuagagccucugccaaucuggccgccaccaagaugucugagugugugcugggccagagcaagagaguggacuuuugcggcaagggcuaccaccugaugagcuucccucagucugccccucacggcgugguguuucugcacgugacauauguguucgcucaagagaagaauuucaccaccgcuccagccaucugccacgacggcaaagcccacuuuccuagagaaggcguguucguguccaacggcacccauugguucgugacacagcggaacuucuacgagccccagaucaucaccaccgacaacaccuucgugucuggcaacugcgacguugugaucggcauugugaacaauaccguguacgacccucugcagcccgagcuggacagc

SEQ ID NO: 12073 - RNA, 3441 nt, Artificial Sequence
  SARS-CoV-2/Wuhan/WIV05/2019__EPI_ISL_402128 spike protein CDS gc mod (1-1147)(K986P_V987P_ H1048Q_H1064N_ H1083N_H1101N)
auguucguguuucuggugcugcugccccugguguccagccagugugugaaccugaccaccagaacacagcugccuccagccuacaccaacagcuucaccagaggcguguacuaccccgacaagguguucagauccagcgugcugcacucuacccaggaccuguuccugccuuucuucagcaacgugaccugguuccacgccauccacguguccggcaccaauggcaccaagagauucgacaaccccgugcugcccuucaacgacgggguguacuuugccagcaccgagaaguccaacaucaucagaggcuggaucuucggcaccacacuggacagcaagacccagagccugcugaucgugaacaacgccaccaacguggucaucaaagugugcgaguuccaguucugcaacgaccccuuccugggcgucuacuaccacaagaacaacaagagcuggauggaaagcgaguuccggguguacagcagcgccaacaacugcaccuucgaguacgugucccagccuuuccugauggaccuggaaggcaagcagggcaacuucaagaaccugcgcgaguucguguucaagaacaucgacggcuacuucaaaaucuacagcaagcacaccccuaucaaccucgugcgggaucugccucagggcuucucugcucuggaaccccugguggaucugcccaucggcaucaacaucacccgguuucagacacugcuggcccugcacagaagcuaccugacaccuggcgauagcagcagcggauggacagcuggugccgccgcuuacuaugugggcuaccugcagccuagaaccuuccugcugaaguacaacgagaacggcaccaucaccgacgccguggauugugcucuggauccucugagcgagacaaagugcacccugaaguccuucaccguggaaaagggcaucuaccagaccagcaacuuccgggugcagcccaccgaauccaucgugcgguuccccaauaucaccaaucugugccccuucggcgagguguucaaugccaccagauucgccucuguguacgccuggaaccggaagcggaucagcaauugcguggccgacuacuccgugcuguacaacuccgccagcuucagcaccuucaagugcuacggcguguccccuaccaagcugaacgaccugugcuucacaaacguguacgccgacagcuucgugauccggggagaugaagugcggcagauugccccuggacagacaggcaagaucgccgacuacaacuacaagcugcccgacgacuucaccggcugugugauugccuggaacagcaacaaccuggacuccaaagucggcggcaacuacaauuaccuguaccggcuguuccggaaguccaaucugaagcccuucgagcgggacaucagcaccgaaaucuaucaggccggcagcaccccuugcaacggcguggaaggcuucaacugcuacuucccacugcaguccuacggcuuucagcccacaaauggcgugggcuaucagcccuacagagugguggugcugagcuucgaacugcugcaugcuccugccacagugugcggcccuaagaaaagcaccaaucucgugaagaacaaaugcgugaacuucaacuucaacggccugaccggcaccggcgugcugacagagagcaacaagaaguuccugccauuccagcaguuuggccgggauaucgccgauaccacagacgccguuagagauccccagacacuggaaauccuggacaucaccccaugcagcuucggcggagugucugugaucaccccuggcaccaacaccagcaaucagguggcagugcuguaccaggacgugaacuguaccgaagugcccguggccauucacgccgaucagcugacaccuacauggcggguguacuccaccggcagcaauguguuucagaccagagccggcugucugaucggagccgagcacgugaacaauagcuacgagugcgacauccccaucggcgcuggcaucugugccagcuaccagacacagacaaacagccccagacgggcuagaagcguggccagccagagcaucauugccuacacaaugucucugggcgccgagaacagcguggccuacuccaacaacucuaucgcuauccccaccaacuucaccaucagcgugaccaccgagauccugccuguguccaugaccaagaccagcguggacugcaccauguacaucugcggcgauuccaccgagugcuccaaccugcugcugcaguacggcagcuucugcacccagcugaauagagcccugacagggaucgccguggaacaggacaagaacacccaagagguguucgcccaagugaagcaaaucuacaagaccccuccuaucaaggacuucggcggcuucaauuucagccagauucugcccgauccuagcaagcccagcaagcggagcuucaucgaggaccugcuguucaacaaagugacacuggccgacgccggcuucaucaagcaguauggcgauugucugggcgacauugccgccagggaucugauuugcgcccagaaguuuaacggacugacagugcugccuccucugcugaccgaugagaugaucgcccaguacacaucugcccugcuggccggcacaaucacaagcggcuggacauuuggagcuggcgccgcucugcagauccccuuugcuaugcagauggccuaccgguucaacggcaucggagugacccagaaugugcuguacgagaaccagaagcugaucgccaaccaguucaacagcgccaucggcaagauccaggacagccugagcagcacagcaagcgcccugggaaagcugcaggacguggucaaccagaaugcccaggcacugaacacccuggucaagcagcuguccuccaacuucggcgccaucagcucugugcugaacgauauccugagcagacuggacccuccugaggccgaggugcagaucgacagacugaucacaggcagacugcagagccuccagacauacgugacccagcagcugaucagagccgccgagauuagagccucugccaaucuggccgccaccaagaugucugagugugugcugggccagagcaagagaguggacuuuugcggcaagggcuaccagcugaugagcuucccucagucugccccucacggcgugguguuucugaacgugacauaugugcccgcucaagagaagaauuucaccaccgcuccagccaucugcaacgacggcaaagcccacuuuccuagagaaggcguguucguguccaacggcaccaacugguucgugacacagcggaacuucuacgagccccagaucaucaccaccgacaacaccuucgugucuggcaacugcgacguugugaucggcauugugaacaauaccguguacgacccucugcagcccgagcuggacagc

SEQ ID NO: 12074 - RNA, 3441 nt, Artificial Sequence
  SARS-CoV-2/Wuhan/WIV05/2019__EPI_ISL_402128 spike protein CDS gc mod (1-1147)(I712C_T1077C)
auguucguguuucuggugcugcugccccugguguccagccagugugugaaccugaccaccagaacacagcugccuccagccuacaccaacagcuucaccagaggcguguacuaccccgacaagguguucagauccagcgugcugcacucuacccaggaccuguuccugccuuucuucagcaacgugaccugguuccacgccauccacguguccggcaccaauggcaccaagagauucgacaaccccgugcugcccuucaacgacgggguguacuuugccagcaccgagaaguccaacaucaucagaggcuggaucuucggcaccacacuggacagcaagacccagagccugcugaucgugaacaacgccaccaacguggucaucaaagugugcgaguuccaguucugcaacgaccccuuccugggcgucuacuaccacaagaacaacaagagcuggauggaaagcgaguuccggguguacagcagcgccaacaacugcaccuucgaguacgugucccagccuuuccugauggaccuggaaggcaagcagggcaacuucaagaaccugcgcgaguucguguucaagaacaucgacggcuacuucaaaaucuacagcaagcacaccccuaucaaccucgugcgggaucugccucagggcuucucugcucuggaaccccugguggaucugcccaucggcaucaacaucacccgguuucagacacugcuggcccugcacagaagcuaccugacaccuggcgauagcagcagcggauggacagcuggugccgccgcuuacuaugugggcuaccugcagccuagaaccuuccugcugaaguacaacgagaacggcaccaucaccgacgccguggauugugcucuggauccucugagcgagacaaagugcacccugaaguccuucaccguggaaaagggcaucuaccagaccagcaacuuccgggugcagcccaccgaauccaucgugcgguuccccaauaucaccaaucugugccccuucggcgagguguucaaugccaccagauucgccucuguguacgccuggaaccggaagcggaucagcaauugcguggccgacuacuccgugcuguacaacuccgccagcuucagcaccuucaagugcuacggcguguccccuaccaagcugaacgaccugugcuucacaaacguguacgccgacagcuucgugauccggggagaugaagugcggcagauugccccuggacagacaggcaagaucgccgacuacaacuacaagcugcccgacgacuucaccggcugugugauugccuggaacagcaacaaccuggacuccaaagucggcggcaacuacaauuaccuguaccggcuguuccggaaguccaaucugaagcccuucgagcgggacaucagcaccgaaaucuaucaggccggcagcaccccuugcaacggcguggaaggcuucaacugcuacuucccacugcaguccuacggcuuucagcccacaaauggcgugggcuaucagcccuacagagugguggugcugagcuucgaacugcugcaugcuccugccacagugugcggcccuaagaaaagcaccaaucucgugaagaacaaaugcgugaacuucaacuucaacggccugaccggcaccggcgugcugacagagagcaacaagaaguuccugccauuccagcaguuuggccgggauaucgccgauaccacagacgccguuagagauccccagacacuggaaauccuggacaucaccccaugcagcuucggcggagugucugugaucaccccuggcaccaacaccagcaaucagguggcagugcuguaccaggacgugaacuguaccgaagugcccguggccauucacgccgaucagcugacaccuacauggcggguguacuccaccggcagcaauguguuucagaccagagccggcugucugaucggagccgagcacgugaacaauagcuacgagugcgacauccccaucggcgcuggcaucugugccagcuaccagacacagacaaacagccccagacgggcuagaagcguggccagccagagcaucauugccuacacaaugucucugggcgccgagaacagcguggccuacuccaacaacucuugcgcuauccccaccaacuucaccaucagcgugaccaccgagauccugccuguguccaugaccaagaccagcguggacugcaccauguacaucugcggcgauuccaccgagugcuccaaccugcugcugcaguacggcagcuucugcacccagcugaauagagcccugacagggaucgccguggaacaggacaagaacacccaagagguguucgcccaagugaagcaaaucuacaagaccccuccuaucaaggacuucggcggcuucaauuucagccagauucugcccgauccuagcaagcccagcaagcggagcuucaucgaggaccugcuguucaacaaagugacacuggccgacgccggcuucaucaagcaguauggcgauugucugggcgacauugccgccagggaucugauuugcgcccagaaguuuaacggacugacagugcugccuccucugcugaccgaugagaugaucgcccaguacacaucugcccugcuggccggcacaaucacaagcggcuggacauuuggagcuggcgccgcucugcagauccccuuugcuaugcagauggccuaccgguucaacggcaucggagugacccagaaugugcuguacgagaaccagaagcugaucgccaaccaguucaacagcgccaucggcaagauccaggacagccugagcagcacagcaagcgcccugggaaagcugcaggacguggucaaccagaaugcccaggcacugaacacccuggucaagcagcuguccuccaacuucggcgccaucagcucugugcugaacgauauccugagcagacuggacaaggucgaggccgaggugcagaucgacagacugaucacaggcagacugcagagccuccagacauacgugacccagcagcugaucagagccgccgagauuagagccucugccaaucuggccgccaccaagaugucugagugugugcugggccagagcaagagaguggacuuuugcggcaagggcuaccaccugaugagcuucccucagucugccccucacggcgugguguuucugcacgugacauaugugcccgcucaagagaagaauuucaccugugcuccagccaucugccacgacggcaaagcccacuuuccuagagaaggcguguucguguccaacggcacccauugguucgugacacagcggaacuucuacgagccccagaucaucaccaccgacaacaccuucgugucuggcaacugcgacguugugaucggcauugugaacaauaccguguacgacccucugcagcccgagcuggacagc

SEQ ID NO: 12075 - RNA, 3441 nt, Artificial Sequence
  SARS-CoV-2/Wuhan/WIV05/2019__EPI_ISL_402128 spike protein CDS gc mod (1-1147)(I714C_Y1110C)
auguucguguuucuggugcugcugccccugguguccagccagugugugaaccugaccaccagaacacagcugccuccagccuacaccaacagcuucaccagaggcguguacuaccccgacaagguguucagauccagcgugcugcacucuacccaggaccuguuccugccuuucuucagcaacgugaccugguuccacgccauccacguguccggcaccaauggcaccaagagauucgacaaccccgugcugcccuucaacgacgggguguacuuugccagcaccgagaaguccaacaucaucagaggcuggaucuucggcaccacacuggacagcaagacccagagccugcugaucgugaacaacgccaccaacguggucaucaaagugugcgaguuccaguucugcaacgaccccuuccugggcgucuacuaccacaagaacaacaagagcuggauggaaagcgaguuccggguguacagcagcgccaacaacugcaccuucgaguacgugucccagccuuuccugauggaccuggaaggcaagcagggcaacuucaagaaccugcgcgaguucguguucaagaacaucgacggcuacuucaaaaucuacagcaagcacaccccuaucaaccucgugcgggaucugccucagggcuucucugcucuggaaccccugguggaucugcccaucggcaucaacaucacccgguuucagacacugcuggcccugcacagaagcuaccugacaccuggcgauagcagcagcggauggacagcuggugccgccgcuuacuaugugggcuaccugcagccuagaaccuuccugcugaaguacaacgagaacggcaccaucaccgacgccguggauugugcucuggauccucugagcgagacaaagugcacccugaaguccuucaccguggaaaagggcaucuaccagaccagcaacuuccgggugcagcccaccgaauccaucgugcgguuccccaauaucaccaaucugugccccuucggcgagguguucaaugccaccagauucgccucuguguacgccuggaaccggaagcggaucagcaauugcguggccgacuacuccgugcuguacaacuccgccagcuucagcaccuucaagugcuacggcguguccccuaccaagcugaacgaccugugcuucacaaacguguacgccgacagcuucgugauccggggagaugaagugcggcagauugccccuggacagacaggcaagaucgccgacuacaacuacaagcugcccgacgacuucaccggcugugugauugccuggaacagcaacaaccuggacuccaaagucggcggcaacuacaauuaccuguaccggcuguuccggaaguccaaucugaagcccuucgagcgggacaucagcaccgaaaucuaucaggccggcagcaccccuugcaacggcguggaaggcuucaacugcuacuucccacugcaguccuacggcuuucagcccacaaauggcgugggcuaucagcccuacagagugguggugcugagcuucgaacugcugcaugcuccugccacagugugcggcccuaagaaaagcaccaaucucgugaagaacaaaugcgugaacuucaacuucaacggccugaccggcaccggcgugcugacagagagcaacaagaaguuccugccauuccagcaguuuggccgggauaucgccgauaccacagacgccguuagagauccccagacacuggaaauccuggacaucaccccaugcagcuucggcggagugucugugaucaccccuggcaccaacaccagcaaucagguggcagugcuguaccaggacgugaacuguaccgaagugcccguggccauucacgccgaucagcugacaccuacauggcggguguacuccaccggcagcaauguguuucagaccagagccggcugucugaucggagccgagcacgugaacaauagcuacgagugcgacauccccaucggcgcuggcaucugugccagcuaccagacacagacaaacagccccagacgggcuagaagcguggccagccagagcaucauugccuacacaaugucucugggcgccgagaacagcguggccuacuccaacaacucuaucgcuugccccaccaacuucaccaucagcgugaccaccgagauccugccuguguccaugaccaagaccagcguggacugcaccauguacaucugcggcgauuccaccgagugcuccaaccugcugcugcaguacggcagcuucugcacccagcugaauagagcccugacagggaucgccguggaacaggacaagaacacccaagagguguucgcccaagugaagcaaaucuacaagaccccuccuaucaaggacuucggcggcuucaauuucagccagauucugcccgauccuagcaagcccagcaagcggagcuucaucgaggaccugcuguucaacaaagugacacuggccgacgccggcuucaucaagcaguauggcgauugucugggcgacauugccgccagggaucugauuugcgcccagaaguuuaacggacugacagugcugccuccucugcugaccgaugagaugaucgcccaguacacaucugcccugcuggccggcacaaucacaagcggcuggacauuuggagcuggcgccgcucugcagauccccuuugcuaugcagauggccuaccgguucaacggcaucggagugacccagaaugugcuguacgagaaccagaagcugaucgccaaccaguucaacagcgccaucggcaagauccaggacagccugagcagcacagcaagcgcccugggaaagcugcaggacguggucaaccagaaugcccaggcacugaacacccuggucaagcagcuguccuccaacuucggcgccaucagcucugugcugaacgauauccugagcagacuggacaaggucgaggccgaggugcagaucgacagacugaucacaggcagacugcagagccuccagacauacgugacccagcagcugaucagagccgccgagauuagagccucugccaaucuggccgccaccaagaugucugagugugugcugggccagagcaagagaguggacuuuugcggcaagggcuaccaccugaugagcuucccucagucugccccucacggcgugguguuucugcacgugacauaugugcccgcucaagagaagaauuucaccaccgcuccagccaucugccacgacggcaaagcccacuuuccuagagaaggcguguucguguccaacggcacccauugguucgugacacagcggaacuucugugagccccagaucaucaccaccgacaacaccuucgugucuggcaacugcgacguugugaucggcauugugaacaauaccguguacgacccucugcagcccgagcuggacagc

SEQ ID NO: 12076 - RNA, 3441 nt, Artificial Sequence
  SARS-CoV-2/Wuhan/WIV05/2019__EPI_ISL_402128 spike protein CDS gc mod (1-1147)(P715C_P1069C)
auguucguguuucuggugcugcugccccugguguccagccagugugugaaccugaccaccagaacacagcugccuccagccuacaccaacagcuucaccagaggcguguacuaccccgacaagguguucagauccagcgugcugcacucuacccaggaccuguuccugccuuucuucagcaacgugaccugguuccacgccauccacguguccggcaccaauggcaccaagagauucgacaaccccgugcugcccuucaacgacgggguguacuuugccagcaccgagaaguccaacaucaucagaggcuggaucuucggcaccacacuggacagcaagacccagagccugcugaucgugaacaacgccaccaacguggucaucaaagugugcgaguuccaguucugcaacgaccccuuccugggcgucuacuaccacaagaacaacaagagcuggauggaaagcgaguuccggguguacagcagcgccaacaacugcaccuucgaguacgugucccagccuuuccugauggaccuggaaggcaagcagggcaacuucaagaaccugcgcgaguucguguucaagaacaucgacggcuacuucaaaaucuacagcaagcacaccccuaucaaccucgugcgggaucugccucagggcuucucugcucuggaaccccugguggaucugcccaucggcaucaacaucacccgguuucagacacugcuggcccugcacagaagcuaccugacaccuggcgauagcagcagcggauggacagcuggugccgccgcuuacuaugugggcuaccugcagccuagaaccuuccugcugaaguacaacgagaacggcaccaucaccgacgccguggauugugcucuggauccucugagcgagacaaagugcacccugaaguccuucaccguggaaaagggcaucuaccagaccagcaacuuccgggugcagcccaccgaauccaucgugcgguuccccaauaucaccaaucugugccccuucggcgagguguucaaugccaccagauucgccucuguguacgccuggaaccggaagcggaucagcaauugcguggccgacuacuccgugcuguacaacuccgccagcuucagcaccuucaagugcuacggcguguccccuaccaagcugaacgaccugugcuucacaaacguguacgccgacagcuucgugauccggggagaugaagugcggcagauugccccuggacagacaggcaagaucgccgacuacaacuacaagcugcccgacgacuucaccggcugugugauugccuggaacagcaacaaccuggacuccaaagucggcggcaacuacaauuaccuguaccggcuguuccggaaguccaaucugaagcccuucgagcgggacaucagcaccgaaaucuaucaggccggcagcaccccuugcaacggcguggaaggcuucaacugcuacuucccacugcaguccuacggcuuucagcccacaaauggcgugggcuaucagcccuacagagugguggugcugagcuucgaacugcugcaugcuccugccacagugugcggcccuaagaaaagcaccaaucucgugaagaacaaaugcgugaacuucaacuucaacggccugaccggcaccggcgugcugacagagagcaacaagaaguuccugccauuccagcaguuuggccgggauaucgccgauaccacagacgccguuagagauccccagacacuggaaauccuggacaucaccccaugcagcuucggcggagugucugugaucaccccuggcaccaacaccagcaaucagguggcagugcuguaccaggacgugaacuguaccgaagugcccguggccauucacgccgaucagcugacaccuacauggcggguguacuccaccggcagcaauguguuucagaccagagccggcugucugaucggagccgagcacgugaacaauagcuacgagugcgacauccccaucggcgcuggcaucugugccagcuaccagacacagacaaacagccccagacgggcuagaagcguggccagccagagcaucauugccuacacaaugucucugggcgccgagaacagcguggccuacuccaacaacucuaucgcuaucugcaccaacuucaccaucagcgugaccaccgagauccugccuguguccaugaccaagaccagcguggacugcaccauguacaucugcggcgauuccaccgagugcuccaaccugcugcugcaguacggcagcuucugcacccagcugaauagagcccugacagggaucgccguggaacaggacaagaacacccaagagguguucgcccaagugaagcaaaucuacaagaccccuccuaucaaggacuucggcggcuucaauuucagccagauucugcccgauccuagcaagcccagcaagcggagcuucaucgaggaccugcuguucaacaaagugacacuggccgacgccggcuucaucaagcaguauggcgauugucugggcgacauugccgccagggaucugauuugcgcccagaaguuuaacggacugacagugcugccuccucugcugaccgaugagaugaucgcccaguacacaucugcccugcuggccggcacaaucacaagcggcuggacauuuggagcuggcgccgcucugcagauccccuuugcuaugcagauggccuaccgguucaacggcaucggagugacccagaaugugcuguacgagaaccagaagcugaucgccaaccaguucaacagcgccaucggcaagauccaggacagccugagcagcacagcaagcgcccugggaaagcugcaggacguggucaaccagaaugcccaggcacugaacacccuggucaagcagcuguccuccaacuucggcgccaucagcucugugcugaacgauauccugagcagacuggacaaggucgaggccgaggugcagaucgacagacugaucacaggcagacugcagagccuccagacauacgugacccagcagcugaucagagccgccgagauuagagccucugccaaucuggccgccaccaagaugucugagugugugcugggccagagcaagagaguggacuuuugcggcaagggcuaccaccugaugagcuucccucagucugccccucacggcgugguguuucugcacgugacauaugugugugcucaagagaagaauuucaccaccgcuccagccaucugccacgacggcaaagcccacuuuccuagagaaggcguguucguguccaacggcacccauugguucgugacacagcggaacuucuacgagccccagaucaucaccaccgacaacaccuucgugucuggcaacugcgacguugugaucggcauugugaacaauaccguguacgacccucugcagcccgagcuggacagc

SEQ ID NO: 12077 - RNA, 3441 nt, Artificial Sequence
  SARS-CoV-2/Wuhan/WIV05/2019__EPI_ISL_402128 spike protein CDS gc mod (1-1147)(G889C_L1034C)
auguucguguuucuggugcugcugccccugguguccagccagugugugaaccugaccaccagaacacagcugccuccagccuacaccaacagcuucaccagaggcguguacuaccccgacaagguguucagauccagcgugcugcacucuacccaggaccuguuccugccuuucuucagcaacgugaccugguuccacgccauccacguguccggcaccaauggcaccaagagauucgacaaccccgugcugcccuucaacgacgggguguacuuugccagcaccgagaaguccaacaucaucagaggcuggaucuucggcaccacacuggacagcaagacccagagccugcugaucgugaacaacgccaccaacguggucaucaaagugugcgaguuccaguucugcaacgaccccuuccugggcgucuacuaccacaagaacaacaagagcuggauggaaagcgaguuccggguguacagcagcgccaacaacugcaccuucgaguacgugucccagccuuuccugauggaccuggaaggcaagcagggcaacuucaagaaccugcgcgaguucguguucaagaacaucgacggcuacuucaaaaucuacagcaagcacaccccuaucaaccucgugcgggaucugccucagggcuucucugcucuggaaccccugguggaucugcccaucggcaucaacaucacccgguuucagacacugcuggcccugcacagaagcuaccugacaccuggcgauagcagcagcggauggacagcuggugccgccgcuuacuaugugggcuaccugcagccuagaaccuuccugcugaaguacaacgagaacggcaccaucaccgacgccguggauugugcucuggauccucugagcgagacaaagugcacccugaaguccuucaccguggaaaagggcaucuaccagaccagcaacuuccgggugcagcccaccgaauccaucgugcgguuccccaauaucaccaaucugugccccuucggcgagguguucaaugccaccagauucgccucuguguacgccuggaaccggaagcggaucagcaauugcguggccgacuacuccgugcuguacaacuccgccagcuucagcaccuucaagugcuacggcguguccccuaccaagcugaacgaccugugcuucacaaacguguacgccgacagcuucgugauccggggagaugaagugcggcagauugccccuggacagacaggcaagaucgccgacuacaacuacaagcugcccgacgacuucaccggcugugugauugccuggaacagcaacaaccuggacuccaaagucggcggcaacuacaauuaccuguaccggcuguuccggaaguccaaucugaagcccuucgagcgggacaucagcaccgaaaucuaucaggccggcagcaccccuugcaacggcguggaaggcuucaacugcuacuucccacugcaguccuacggcuuucagcccacaaauggcgugggcuaucagcccuacagagugguggugcugagcuucgaacugcugcaugcuccugccacagugugcggcccuaagaaaagcaccaaucucgugaagaacaaaugcgugaacuucaacuucaacggccugaccggcaccggcgugcugacagagagcaacaagaaguuccugccauuccagcaguuuggccgggauaucgccgauaccacagacgccguuagagauccccagacacuggaaauccuggacaucaccccaugcagcuucggcggagugucugugaucaccccuggcaccaacaccagcaaucagguggcagugcuguaccaggacgugaacuguaccgaagugcccguggccauucacgccgaucagcugacaccuacauggcggguguacuccaccggcagcaauguguuucagaccagagccggcugucugaucggagccgagcacgugaacaauagcuacgagugcgacauccccaucggcgcuggcaucugugccagcuaccagacacagacaaacagccccagacgggcuagaagcguggccagccagagcaucauugccuacacaaugucucugggcgccgagaacagcguggccuacuccaacaacucuaucgcuauccccaccaacuucaccaucagcgugaccaccgagauccugccuguguccaugaccaagaccagcguggacugcaccauguacaucugcggcgauuccaccgagugcuccaaccugcugcugcaguacggcagcuucugcacccagcugaauagagcccugacagggaucgccguggaacaggacaagaacacccaagagguguucgcccaagugaagcaaaucuacaagaccccuccuaucaaggacuucggcggcuucaauuucagccagauucugcccgauccuagcaagcccagcaagcggagcuucaucgaggaccugcuguucaacaaagugacacuggccgacgccggcuucaucaagcaguauggcgauugucugggcgacauugccgccagggaucugauuugcgcccagaaguuuaacggacugacagugcugccuccucugcugaccgaugagaugaucgcccaguacacaucugcccugcuggccggcacaaucacaagcggcuggacauuuugcgcuggcgccgcucugcagauccccuuugcuaugcagauggccuaccgguucaacggcaucggagugacccagaaugugcuguacgagaaccagaagcugaucgccaaccaguucaacagcgccaucggcaagauccaggacagccugagcagcacagcaagcgcccugggaaagcugcaggacguggucaaccagaaugcccaggcacugaacacccuggucaagcagcuguccuccaacuucggcgccaucagcucugugcugaacgauauccugagcagacuggacaaggucgaggccgaggugcagaucgacagacugaucacaggcagacugcagagccuccagacauacgugacccagcagcugaucagagccgccgagauuagagccucugccaaucuggccgccaccaagaugucugaguguguguguggccagagcaagagaguggacuuuugcggcaagggcuaccaccugaugagcuucccucagucugccccucacggcgugguguuucugcacgugacauaugugcccgcucaagagaagaauuucaccaccgcuccagccaucugccacgacggcaaagcccacuuuccuagagaaggcguguucguguccaacggcacccauugguucgugacacagcggaacuucuacgagccccagaucaucaccaccgacaacaccuucgugucuggcaacugcgacguugugaucggcauugugaacaauaccguguacgacccucugcagcccgagcuggacagc

SEQ ID NO: 12078 - RNA, 3441 nt, Artificial Sequence
  SARS-CoV-2/Wuhan/WIV05/2019__EPI_ISL_402128 spike protein CDS gc mod (1-1147)(I909C_Y1047C)
auguucguguuucuggugcugcugccccugguguccagccagugugugaaccugaccaccagaacacagcugccuccagccuacaccaacagcuucaccagaggcguguacuaccccgacaagguguucagauccagcgugcugcacucuacccaggaccuguuccugccuuucuucagcaacgugaccugguuccacgccauccacguguccggcaccaauggcaccaagagauucgacaaccccgugcugcccuucaacgacgggguguacuuugccagcaccgagaaguccaacaucaucagaggcuggaucuucggcaccacacuggacagcaagacccagagccugcugaucgugaacaacgccaccaacguggucaucaaagugugcgaguuccaguucugcaacgaccccuuccugggcgucuacuaccacaagaacaacaagagcuggauggaaagcgaguuccggguguacagcagcgccaacaacugcaccuucgaguacgugucccagccuuuccugauggaccuggaaggcaagcagggcaacuucaagaaccugcgcgaguucguguucaagaacaucgacggcuacuucaaaaucuacagcaagcacaccccuaucaaccucgugcgggaucugccucagggcuucucugcucuggaaccccugguggaucugcccaucggcaucaacaucacccgguuucagacacugcuggcccugcacagaagcuaccugacaccuggcgauagcagcagcggauggacagcuggugccgccgcuuacuaugugggcuaccugcagccuagaaccuuccugcugaaguacaacgagaacggcaccaucaccgacgccguggauugugcucuggauccucugagcgagacaaagugcacccugaaguccuucaccguggaaaagggcaucuaccagaccagcaacuuccgggugcagcccaccgaauccaucgugcgguuccccaauaucaccaaucugugccccuucggcgagguguucaaugccaccagauucgccucuguguacgccuggaaccggaagcggaucagcaauugcguggccgacuacuccgugcuguacaacuccgccagcuucagcaccuucaagugcuacggcguguccccuaccaagcugaacgaccugugcuucacaaacguguacgccgacagcuucgugauccggggagaugaagugcggcagauugccccuggacagacaggcaagaucgccgacuacaacuacaagcugcccgacgacuucaccggcugugugauugccuggaacagcaacaaccuggacuccaaagucggcggcaacuacaauuaccuguaccggcuguuccggaaguccaaucugaagcccuucgagcgggacaucagcaccgaaaucuaucaggccggcagcaccccuugcaacggcguggaaggcuucaacugcuacuucccacugcaguccuacggcuuucagcccacaaauggcgugggcuaucagcccuacagagugguggugcugagcuucgaacugcugcaugcuccugccacagugugcggcccuaagaaaagcaccaaucucgugaagaacaaaugcgugaacuucaacuucaacggccugaccggcaccggcgugcugacagagagcaacaagaaguuccugccauuccagcaguuuggccgggauaucgccgauaccacagacgccguuagagauccccagacacuggaaauccuggacaucaccccaugcagcuucggcggagugucugugaucaccccuggcaccaacaccagcaaucagguggcagugcuguaccaggacgugaacuguaccgaagugcccguggccauucacgccgaucagcugacaccuacauggcggguguacuccaccggcagcaauguguuucagaccagagccggcugucugaucggagccgagcacgugaacaauagcuacgagugcgacauccccaucggcgcuggcaucugugccagcuaccagacacagacaaacagccccagacgggcuagaagcguggccagccagagcaucauugccuacacaaugucucugggcgccgagaacagcguggccuacuccaacaacucuaucgcuauccccaccaacuucaccaucagcgugaccaccgagauccugccuguguccaugaccaagaccagcguggacugcaccauguacaucugcggcgauuccaccgagugcuccaaccugcugcugcaguacggcagcuucugcacccagcugaauagagcccugacagggaucgccguggaacaggacaagaacacccaagagguguucgcccaagugaagcaaaucuacaagaccccuccuaucaaggacuucggcggcuucaauuucagccagauucugcccgauccuagcaagcccagcaagcggagcuucaucgaggaccugcuguucaacaaagugacacuggccgacgccggcuucaucaagcaguauggcgauugucugggcgacauugccgccagggaucugauuugcgcccagaaguuuaacggacugacagugcugccuccucugcugaccgaugagaugaucgcccaguacacaucugcccugcuggccggcacaaucacaagcggcuggacauuuggagcuggcgccgcucugcagauccccuuugcuaugcagauggccuaccgguucaacggcugcggagugacccagaaugugcuguacgagaaccagaagcugaucgccaaccaguucaacagcgccaucggcaagauccaggacagccugagcagcacagcaagcgcccugggaaagcugcaggacguggucaaccagaaugcccaggcacugaacacccuggucaagcagcuguccuccaacuucggcgccaucagcucugugcugaacgauauccugagcagacuggacaaggucgaggccgaggugcagaucgacagacugaucacaggcagacugcagagccuccagacauacgugacccagcagcugaucagagccgccgagauuagagccucugccaaucuggccgccaccaagaugucugagugugugcugggccagagcaagagaguggacuuuugcggcaagggcugucaccugaugagcuucccucagucugccccucacggcgugguguuucugcacgugacauaugugcccgcucaagagaagaauuucaccaccgcuccagccaucugccacgacggcaaagcccacuuuccuagagaaggcguguucguguccaacggcacccauugguucgugacacagcggaacuucuacgagccccagaucaucaccaccgacaacaccuucgugucuggcaacugcgacguugugaucggcauugugaacaauaccguguacgacccucugcagcccgagcuggacagc

SEQ ID NO: 12079 - RNA, 3441 nt, Artificial Sequence
  SARS-CoV-2/Wuhan/WIV05/2019__EPI_ISL_402128 spike protein CDS gc mod (1-1147)(Q965C_S1003C)
auguucguguuucuggugcugcugccccugguguccagccagugugugaaccugaccaccagaacacagcugccuccagccuacaccaacagcuucaccagaggcguguacuaccccgacaagguguucagauccagcgugcugcacucuacccaggaccuguuccugccuuucuucagcaacgugaccugguuccacgccauccacguguccggcaccaauggcaccaagagauucgacaaccccgugcugcccuucaacgacgggguguacuuugccagcaccgagaaguccaacaucaucagaggcuggaucuucggcaccacacuggacagcaagacccagagccugcugaucgugaacaacgccaccaacguggucaucaaagugugcgaguuccaguucugcaacgaccccuuccugggcgucuacuaccacaagaacaacaagagcuggauggaaagcgaguuccggguguacagcagcgccaacaacugcaccuucgaguacgugucccagccuuuccugauggaccuggaaggcaagcagggcaacuucaagaaccugcgcgaguucguguucaagaacaucgacggcuacuucaaaaucuacagcaagcacaccccuaucaaccucgugcgggaucugccucagggcuucucugcucuggaaccccugguggaucugcccaucggcaucaacaucacccgguuucagacacugcuggcccugcacagaagcuaccugacaccuggcgauagcagcagcggauggacagcuggugccgccgcuuacuaugugggcuaccugcagccuagaaccuuccugcugaaguacaacgagaacggcaccaucaccgacgccguggauugugcucuggauccucugagcgagacaaagugcacccugaaguccuucaccguggaaaagggcaucuaccagaccagcaacuuccgggugcagcccaccgaauccaucgugcgguuccccaauaucaccaaucugugccccuucggcgagguguucaaugccaccagauucgccucuguguacgccuggaaccggaagcggaucagcaauugcguggccgacuacuccgugcuguacaacuccgccagcuucagcaccuucaagugcuacggcguguccccuaccaagcugaacgaccugugcuucacaaacguguacgccgacagcuucgugauccggggagaugaagugcggcagauugccccuggacagacaggcaagaucgccgacuacaacuacaagcugcccgacgacuucaccggcugugugauugccuggaacagcaacaaccuggacuccaaagucggcggcaacuacaauuaccuguaccggcuguuccggaaguccaaucugaagcccuucgagcgggacaucagcaccgaaaucuaucaggccggcagcaccccuugcaacggcguggaaggcuucaacugcuacuucccacugcaguccuacggcuuucagcccacaaauggcgugggcuaucagcccuacagagugguggugcugagcuucgaacugcugcaugcuccugccacagugugcggcccuaagaaaagcaccaaucucgugaagaacaaaugcgugaacuucaacuucaacggccugaccggcaccggcgugcugacagagagcaacaagaaguuccugccauuccagcaguuuggccgggauaucgccgauaccacagacgccguuagagauccccagacacuggaaauccuggacaucaccccaugcagcuucggcggagugucugugaucaccccuggcaccaacaccagcaaucagguggcagugcuguaccaggacgugaacuguaccgaagugcccguggccauucacgccgaucagcugacaccuacauggcggguguacuccaccggcagcaauguguuucagaccagagccggcugucugaucggagccgagcacgugaacaauagcuacgagugcgacauccccaucggcgcuggcaucugugccagcuaccagacacagacaaacagccccagacgggcuagaagcguggccagccagagcaucauugccuacacaaugucucugggcgccgagaacagcguggccuacuccaacaacucuaucgcuauccccaccaacuucaccaucagcgugaccaccgagauccugccuguguccaugaccaagaccagcguggacugcaccauguacaucugcggcgauuccaccgagugcuccaaccugcugcugcaguacggcagcuucugcacccagcugaauagagcccugacagggaucgccguggaacaggacaagaacacccaagagguguucgcccaagugaagcaaaucuacaagaccccuccuaucaaggacuucggcggcuucaauuucagccagauucugcccgauccuagcaagcccagcaagcggagcuucaucgaggaccugcuguucaacaaagugacacuggccgacgccggcuucaucaagcaguauggcgauugucugggcgacauugccgccagggaucugauuugcgcccagaaguuuaacggacugacagugcugccuccucugcugaccgaugagaugaucgcccaguacacaucugcccugcuggccggcacaaucacaagcggcuggacauuuggagcuggcgccgcucugcagauccccuuugcuaugcagauggccuaccgguucaacggcaucggagugacccagaaugugcuguacgagaaccagaagcugaucgccaaccaguucaacagcgccaucggcaagauccaggacagccugagcagcacagcaagcgcccugggaaagcugcaggacguggucaaccagaaugcccaggcacugaacacccuggucaagugccuguccuccaacuucggcgccaucagcucugugcugaacgauauccugagcagacuggacaaggucgaggccgaggugcagaucgacagacugaucacaggcagacugcagugucuccagacauacgugacccagcagcugaucagagccgccgagauuagagccucugccaaucuggccgccaccaagaugucugagugugugcugggccagagcaagagaguggacuuuugcggcaagggcuaccaccugaugagcuucccucagucugccccucacggcgugguguuucugcacgugacauaugugcccgcucaagagaagaauuucaccaccgcuccagccaucugccacgacggcaaagcccacuuuccuagagaaggcguguucguguccaacggcacccauugguucgugacacagcggaacuucuacgagccccagaucaucaccaccgacaacaccuucgugucuggcaacugcgacguugugaucggcauugugaacaauaccguguacgacccucugcagcccgagcuggacagc

SEQ ID NO: 12080 - RNA, 3441 nt, Artificial Sequence
  SARS-CoV-2/Wuhan/WIV05/2019__EPI_ISL_402128 spike protein CDS gc mod (1-1147)(F970C_G999C)
auguucguguuucuggugcugcugccccugguguccagccagugugugaaccugaccaccagaacacagcugccuccagccuacaccaacagcuucaccagaggcguguacuaccccgacaagguguucagauccagcgugcugcacucuacccaggaccuguuccugccuuucuucagcaacgugaccugguuccacgccauccacguguccggcaccaauggcaccaagagauucgacaaccccgugcugcccuucaacgacgggguguacuuugccagcaccgagaaguccaacaucaucagaggcuggaucuucggcaccacacuggacagcaagacccagagccugcugaucgugaacaacgccaccaacguggucaucaaagugugcgaguuccaguucugcaacgaccccuuccugggcgucuacuaccacaagaacaacaagagcuggauggaaagcgaguuccggguguacagcagcgccaacaacugcaccuucgaguacgugucccagccuuuccugauggaccuggaaggcaagcagggcaacuucaagaaccugcgcgaguucguguucaagaacaucgacggcuacuucaaaaucuacagcaagcacaccccuaucaaccucgugcgggaucugccucagggcuucucugcucuggaaccccugguggaucugcccaucggcaucaacaucacccgguuucagacacugcuggcccugcacagaagcuaccugacaccuggcgauagcagcagcggauggacagcuggugccgccgcuuacuaugugggcuaccugcagccuagaaccuuccugcugaaguacaacgagaacggcaccaucaccgacgccguggauugugcucuggauccucugagcgagacaaagugcacccugaaguccuucaccguggaaaagggcaucuaccagaccagcaacuuccgggugcagcccaccgaauccaucgugcgguuccccaauaucaccaaucugugccccuucggcgagguguucaaugccaccagauucgccucuguguacgccuggaaccggaagcggaucagcaauugcguggccgacuacuccgugcuguacaacuccgccagcuucagcaccuucaagugcuacggcguguccccuaccaagcugaacgaccugugcuucacaaacguguacgccgacagcuucgugauccggggagaugaagugcggcagauugccccuggacagacaggcaagaucgccgacuacaacuacaagcugcccgacgacuucaccggcugugugauugccuggaacagcaacaaccuggacuccaaagucggcggcaacuacaauuaccuguaccggcuguuccggaaguccaaucugaagcccuucgagcgggacaucagcaccgaaaucuaucaggccggcagcaccccuugcaacggcguggaaggcuucaacugcuacuucccacugcaguccuacggcuuucagcccacaaauggcgugggcuaucagcccuacagagugguggugcugagcuucgaacugcugcaugcuccugccacagugugcggcccuaagaaaagcaccaaucucgugaagaacaaaugcgugaacuucaacuucaacggccugaccggcaccggcgugcugacagagagcaacaagaaguuccugccauuccagcaguuuggccgggauaucgccgauaccacagacgccguuagagauccccagacacuggaaauccuggacaucaccccaugcagcuucggcggagugucugugaucaccccuggcaccaacaccagcaaucagguggcagugcuguaccaggacgugaacuguaccgaagugcccguggccauucacgccgaucagcugacaccuacauggcggguguacuccaccggcagcaauguguuucagaccagagccggcugucugaucggagccgagcacgugaacaauagcuacgagugcgacauccccaucggcgcuggcaucugugccagcuaccagacacagacaaacagccccagacgggcuagaagcguggccagccagagcaucauugccuacacaaugucucugggcgccgagaacagcguggccuacuccaacaacucuaucgcuauccccaccaacuucaccaucagcgugaccaccgagauccugccuguguccaugaccaagaccagcguggacugcaccauguacaucugcggcgauuccaccgagugcuccaaccugcugcugcaguacggcagcuucugcacccagcugaauagagcccugacagggaucgccguggaacaggacaagaacacccaagagguguucgcccaagugaagcaaaucuacaagaccccuccuaucaaggacuucggcggcuucaauuucagccagauucugcccgauccuagcaagcccagcaagcggagcuucaucgaggaccugcuguucaacaaagugacacuggccgacgccggcuucaucaagcaguauggcgauugucugggcgacauugccgccagggaucugauuugcgcccagaaguuuaacggacugacagugcugccuccucugcugaccgaugagaugaucgcccaguacacaucugcccugcuggccggcacaaucacaagcggcuggacauuuggagcuggcgccgcucugcagauccccuuugcuaugcagauggccuaccgguucaacggcaucggagugacccagaaugugcuguacgagaaccagaagcugaucgccaaccaguucaacagcgccaucggcaagauccaggacagccugagcagcacagcaagcgcccugggaaagcugcaggacguggucaaccagaaugcccaggcacugaacacccuggucaagcagcuguccuccaacugcggcgccaucagcucugugcugaacgauauccugagcagacuggacaaggucgaggccgaggugcagaucgacagacugaucacauguagacugcagagccuccagacauacgugacccagcagcugaucagagccgccgagauuagagccucugccaaucuggccgccaccaagaugucugagugugugcugggccagagcaagagaguggacuuuugcggcaagggcuaccaccugaugagcuucccucagucugccccucacggcgugguguuucugcacgugacauaugugcccgcucaagagaagaauuucaccaccgcuccagccaucugccacgacggcaaagcccacuuuccuagagaaggcguguucguguccaacggcacccauugguucgugacacagcggaacuucuacgagccccagaucaucaccaccgacaacaccuucgugucuggcaacugcgacguugugaucggcauugugaacaauaccguguacgacccucugcagcccgagcuggacagc

SEQ ID NO: 12081 - RNA, 3441 nt, Artificial Sequence
  SARS-CoV-2/Wuhan/WIV05/2019__EPI_ISL_402128 spike protein CDS gc mod (1-1147)(A972C_R995C)
auguucguguuucuggugcugcugccccugguguccagccagugugugaaccugaccaccagaacacagcugccuccagccuacaccaacagcuucaccagaggcguguacuaccccgacaagguguucagauccagcgugcugcacucuacccaggaccuguuccugccuuucuucagcaacgugaccugguuccacgccauccacguguccggcaccaauggcaccaagagauucgacaaccccgugcugcccuucaacgacgggguguacuuugccagcaccgagaaguccaacaucaucagaggcuggaucuucggcaccacacuggacagcaagacccagagccugcugaucgugaacaacgccaccaacguggucaucaaagugugcgaguuccaguucugcaacgaccccuuccugggcgucuacuaccacaagaacaacaagagcuggauggaaagcgaguuccggguguacagcagcgccaacaacugcaccuucgaguacgugucccagccuuuccugauggaccuggaaggcaagcagggcaacuucaagaaccugcgcgaguucguguucaagaacaucgacggcuacuucaaaaucuacagcaagcacaccccuaucaaccucgugcgggaucugccucagggcuucucugcucuggaaccccugguggaucugcccaucggcaucaacaucacccgguuucagacacugcuggcccugcacagaagcuaccugacaccuggcgauagcagcagcggauggacagcuggugccgccgcuuacuaugugggcuaccugcagccuagaaccuuccugcugaaguacaacgagaacggcaccaucaccgacgccguggauugugcucuggauccucugagcgagacaaagugcacccugaaguccuucaccguggaaaagggcaucuaccagaccagcaacuuccgggugcagcccaccgaauccaucgugcgguuccccaauaucaccaaucugugccccuucggcgagguguucaaugccaccagauucgccucuguguacgccuggaaccggaagcggaucagcaauugcguggccgacuacuccgugcuguacaacuccgccagcuucagcaccuucaagugcuacggcguguccccuaccaagcugaacgaccugugcuucacaaacguguacgccgacagcuucgugauccggggagaugaagugcggcagauugccccuggacagacaggcaagaucgccgacuacaacuacaagcugcccgacgacuucaccggcugugugauugccuggaacagcaacaaccuggacuccaaagucggcggcaacuacaauuaccuguaccggcuguuccggaaguccaaucugaagcccuucgagcgggacaucagcaccgaaaucuaucaggccggcagcaccccuugcaacggcguggaaggcuucaacugcuacuucccacugcaguccuacggcuuucagcccacaaauggcgugggcuaucagcccuacagagugguggugcugagcuucgaacugcugcaugcuccugccacagugugcggcccuaagaaaagcaccaaucucgugaagaacaaaugcgugaacuucaacuucaacggccugaccggcaccggcgugcugacagagagcaacaagaaguuccugccauuccagcaguuuggccgggauaucgccgauaccacagacgccguuagagauccccagacacuggaaauccuggacaucaccccaugcagcuucggcggagugucugugaucaccccuggcaccaacaccagcaaucagguggcagugcuguaccaggacgugaacuguaccgaagugcccguggccauucacgccgaucagcugacaccuacauggcggguguacuccaccggcagcaauguguuucagaccagagccggcugucugaucggagccgagcacgugaacaauagcuacgagugcgacauccccaucggcgcuggcaucugugccagcuaccagacacagacaaacagccccagacgggcuagaagcguggccagccagagcaucauugccuacacaaugucucugggcgccgagaacagcguggccuacuccaacaacucuaucgcuauccccaccaacuucaccaucagcgugaccaccgagauccugccuguguccaugaccaagaccagcguggacugcaccauguacaucugcggcgauuccaccgagugcuccaaccugcugcugcaguacggcagcuucugcacccagcugaauagagcccugacagggaucgccguggaacaggacaagaacacccaagagguguucgcccaagugaagcaaaucuacaagaccccuccuaucaaggacuucggcggcuucaauuucagccagauucugcccgauccuagcaagcccagcaagcggagcuucaucgaggaccugcuguucaacaaagugacacuggccgacgccggcuucaucaagcaguauggcgauugucugggcgacauugccgccagggaucugauuugcgcccagaaguuuaacggacugacagugcugccuccucugcugaccgaugagaugaucgcccaguacacaucugcccugcuggccggcacaaucacaagcggcuggacauuuggagcuggcgccgcucugcagauccccuuugcuaugcagauggccuaccgguucaacggcaucggagugacccagaaugugcuguacgagaaccagaagcugaucgccaaccaguucaacagcgccaucggcaagauccaggacagccugagcagcacagcaagcgcccugggaaagcugcaggacguggucaaccagaaugcccaggcacugaacacccuggucaagcagcuguccuccaacuucggcugcaucagcucugugcugaacgauauccugagcagacuggacaaggucgaggccgaggugcagaucgacugucugaucacaggcagacugcagagccuccagacauacgugacccagcagcugaucagagccgccgagauuagagccucugccaaucuggccgccaccaagaugucugagugugugcugggccagagcaagagaguggacuuuugcggcaagggcuaccaccugaugagcuucccucagucugccccucacggcgugguguuucugcacgugacauaugugcccgcucaagagaagaauuucaccaccgcuccagccaucugccacgacggcaaagcccacuuuccuagagaaggcguguucguguccaacggcacccauugguucgugacacagcggaacuucuacgagccccagaucaucaccaccgacaacaccuucgugucuggcaacugcgacguugugaucggcauugugaacaauaccguguacgacccucugcagcccgagcuggacagc

SEQ ID NO: 12082 - RNA, 3441 nt, Artificial Sequence
  SARS-CoV-2/Wuhan/WIV05/2019__EPI_ISL_402128 spike protein CDS gc mod (1-1147)(A890C_V1040C)
auguucguguuucuggugcugcugccccugguguccagccagugugugaaccugaccaccagaacacagcugccuccagccuacaccaacagcuucaccagaggcguguacuaccccgacaagguguucagauccagcgugcugcacucuacccaggaccuguuccugccuuucuucagcaacgugaccugguuccacgccauccacguguccggcaccaauggcaccaagagauucgacaaccccgugcugcccuucaacgacgggguguacuuugccagcaccgagaaguccaacaucaucagaggcuggaucuucggcaccacacuggacagcaagacccagagccugcugaucgugaacaacgccaccaacguggucaucaaagugugcgaguuccaguucugcaacgaccccuuccugggcgucuacuaccacaagaacaacaagagcuggauggaaagcgaguuccggguguacagcagcgccaacaacugcaccuucgaguacgugucccagccuuuccugauggaccuggaaggcaagcagggcaacuucaagaaccugcgcgaguucguguucaagaacaucgacggcuacuucaaaaucuacagcaagcacaccccuaucaaccucgugcgggaucugccucagggcuucucugcucuggaaccccugguggaucugcccaucggcaucaacaucacccgguuucagacacugcuggcccugcacagaagcuaccugacaccuggcgauagcagcagcggauggacagcuggugccgccgcuuacuaugugggcuaccugcagccuagaaccuuccugcugaaguacaacgagaacggcaccaucaccgacgccguggauugugcucuggauccucugagcgagacaaagugcacccugaaguccuucaccguggaaaagggcaucuaccagaccagcaacuuccgggugcagcccaccgaauccaucgugcgguuccccaauaucaccaaucugugccccuucggcgagguguucaaugccaccagauucgccucuguguacgccuggaaccggaagcggaucagcaauugcguggccgacuacuccgugcuguacaacuccgccagcuucagcaccuucaagugcuacggcguguccccuaccaagcugaacgaccugugcuucacaaacguguacgccgacagcuucgugauccggggagaugaagugcggcagauugccccuggacagacaggcaagaucgccgacuacaacuacaagcugcccgacgacuucaccggcugugugauugccuggaacagcaacaaccuggacuccaaagucggcggcaacuacaauuaccuguaccggcuguuccggaaguccaaucugaagcccuucgagcgggacaucagcaccgaaaucuaucaggccggcagcaccccuugcaacggcguggaaggcuucaacugcuacuucccacugcaguccuacggcuuucagcccacaaauggcgugggcuaucagcccuacagagugguggugcugagcuucgaacugcugcaugcuccugccacagugugcggcccuaagaaaagcaccaaucucgugaagaacaaaugcgugaacuucaacuucaacggccugaccggcaccggcgugcugacagagagcaacaagaaguuccugccauuccagcaguuuggccgggauaucgccgauaccacagacgccguuagagauccccagacacuggaaauccuggacaucaccccaugcagcuucggcggagugucugugaucaccccuggcaccaacaccagcaaucagguggcagugcuguaccaggacgugaacuguaccgaagugcccguggccauucacgccgaucagcugacaccuacauggcggguguacuccaccggcagcaauguguuucagaccagagccggcugucugaucggagccgagcacgugaacaauagcuacgagugcgacauccccaucggcgcuggcaucugugccagcuaccagacacagacaaacagccccagacgggcuagaagcguggccagccagagcaucauugccuacacaaugucucugggcgccgagaacagcguggccuacuccaacaacucuaucgcuauccccaccaacuucaccaucagcgugaccaccgagauccugccuguguccaugaccaagaccagcguggacugcaccauguacaucugcggcgauuccaccgagugcuccaaccugcugcugcaguacggcagcuucugcacccagcugaauagagcccugacagggaucgccguggaacaggacaagaacacccaagagguguucgcccaagugaagcaaaucuacaagaccccuccuaucaaggacuucggcggcuucaauuucagccagauucugcccgauccuagcaagcccagcaagcggagcuucaucgaggaccugcuguucaacaaagugacacuggccgacgccggcuucaucaagcaguauggcgauugucugggcgacauugccgccagggaucugauuugcgcccagaaguuuaacggacugacagugcugccuccucugcugaccgaugagaugaucgcccaguacacaucugcccugcuggccggcacaaucacaagcggcuggacauuuggaugcggcgccgcucugcagauccccuuugcuaugcagauggccuaccgguucaacggcaucggagugacccagaaugugcuguacgagaaccagaagcugaucgccaaccaguucaacagcgccaucggcaagauccaggacagccugagcagcacagcaagcgcccugggaaagcugcaggacguggucaaccagaaugcccaggcacugaacacccuggucaagcagcuguccuccaacuucggcgccaucagcucugugcugaacgauauccugagcagacuggacaaggucgaggccgaggugcagaucgacagacugaucacaggcagacugcagagccuccagacauacgugacccagcagcugaucagagccgccgagauuagagccucugccaaucuggccgccaccaagaugucugagugugugcugggccagagcaagagaugugacuuuugcggcaagggcuaccaccugaugagcuucccucagucugccccucacggcgugguguuucugcacgugacauaugugcccgcucaagagaagaauuucaccaccgcuccagccaucugccacgacggcaaagcccacuuuccuagagaaggcguguucguguccaacggcacccauugguucgugacacagcggaacuucuacgagccccagaucaucaccaccgacaacaccuucgugucuggcaacugcgacguugugaucggcauugugaacaauaccguguacgacccucugcagcccgagcuggacagc

SEQ ID NO: 12083 - RNA, 3441 nt, Artificial Sequence
  SARS-CoV-2/Wuhan/WIV05/2019__EPI_ISL_402128 spike protein CDS gc mod (1-1147)(T874C_S1055C)
auguucguguuucuggugcugcugccccugguguccagccagugugugaaccugaccaccagaacacagcugccuccagccuacaccaacagcuucaccagaggcguguacuaccccgacaagguguucagauccagcgugcugcacucuacccaggaccuguuccugccuuucuucagcaacgugaccugguuccacgccauccacguguccggcaccaauggcaccaagagauucgacaaccccgugcugcccuucaacgacgggguguacuuugccagcaccgagaaguccaacaucaucagaggcuggaucuucggcaccacacuggacagcaagacccagagccugcugaucgugaacaacgccaccaacguggucaucaaagugugcgaguuccaguucugcaacgaccccuuccugggcgucuacuaccacaagaacaacaagagcuggauggaaagcgaguuccggguguacagcagcgccaacaacugcaccuucgaguacgugucccagccuuuccugauggaccuggaaggcaagcagggcaacuucaagaaccugcgcgaguucguguucaagaacaucgacggcuacuucaaaaucuacagcaagcacaccccuaucaaccucgugcgggaucugccucagggcuucucugcucuggaaccccugguggaucugcccaucggcaucaacaucacccgguuucagacacugcuggcccugcacagaagcuaccugacaccuggcgauagcagcagcggauggacagcuggugccgccgcuuacuaugugggcuaccugcagccuagaaccuuccugcugaaguacaacgagaacggcaccaucaccgacgccguggauugugcucuggauccucugagcgagacaaagugcacccugaaguccuucaccguggaaaagggcaucuaccagaccagcaacuuccgggugcagcccaccgaauccaucgugcgguuccccaauaucaccaaucugugccccuucggcgagguguucaaugccaccagauucgccucuguguacgccuggaaccggaagcggaucagcaauugcguggccgacuacuccgugcuguacaacuccgccagcuucagcaccuucaagugcuacggcguguccccuaccaagcugaacgaccugugcuucacaaacguguacgccgacagcuucgugauccggggagaugaagugcggcagauugccccuggacagacaggcaagaucgccgacuacaacuacaagcugcccgacgacuucaccggcugugugauugccuggaacagcaacaaccuggacuccaaagucggcggcaacuacaauuaccuguaccggcuguuccggaaguccaaucugaagcccuucgagcgggacaucagcaccgaaaucuaucaggccggcagcaccccuugcaacggcguggaaggcuucaacugcuacuucccacugcaguccuacggcuuucagcccacaaauggcgugggcuaucagcccuacagagugguggugcugagcuucgaacugcugcaugcuccugccacagugugcggcccuaagaaaagcaccaaucucgugaagaacaaaugcgugaacuucaacuucaacggccugaccggcaccggcgugcugacagagagcaacaagaaguuccugccauuccagcaguuuggccgggauaucgccgauaccacagacgccguuagagauccccagacacuggaaauccuggacaucaccccaugcagcuucggcggagugucugugaucaccccuggcaccaacaccagcaaucagguggcagugcuguaccaggacgugaacuguaccgaagugcccguggccauucacgccgaucagcugacaccuacauggcggguguacuccaccggcagcaauguguuucagaccagagccggcugucugaucggagccgagcacgugaacaauagcuacgagugcgacauccccaucggcgcuggcaucugugccagcuaccagacacagacaaacagccccagacgggcuagaagcguggccagccagagcaucauugccuacacaaugucucugggcgccgagaacagcguggccuacuccaacaacucuaucgcuauccccaccaacuucaccaucagcgugaccaccgagauccugccuguguccaugaccaagaccagcguggacugcaccauguacaucugcggcgauuccaccgagugcuccaaccugcugcugcaguacggcagcuucugcacccagcugaauagagcccugacagggaucgccguggaacaggacaagaacacccaagagguguucgcccaagugaagcaaaucuacaagaccccuccuaucaaggacuucggcggcuucaauuucagccagauucugcccgauccuagcaagcccagcaagcggagcuucaucgaggaccugcuguucaacaaagugacacuggccgacgccggcuucaucaagcaguauggcgauugucugggcgacauugccgccagggaucugauuugcgcccagaaguuuaacggacugacagugcugccuccucugcugaccgaugagaugaucgcccaguacugcucugcccugcuggccggcacaaucacaagcggcuggacauuuggagcuggcgccgcucugcagauccccuuugcuaugcagauggccuaccgguucaacggcaucggagugacccagaaugugcuguacgagaaccagaagcugaucgccaaccaguucaacagcgccaucggcaagauccaggacagccugagcagcacagcaagcgcccugggaaagcugcaggacguggucaaccagaaugcccaggcacugaacacccuggucaagcagcuguccuccaacuucggcgccaucagcucugugcugaacgauauccugagcagacuggacaaggucgaggccgaggugcagaucgacagacugaucacaggcagacugcagagccuccagacauacgugacccagcagcugaucagagccgccgagauuagagccucugccaaucuggccgccaccaagaugucugagugugugcugggccagagcaagagaguggacuuuugcggcaagggcuaccaccugaugagcuucccucagugcgccccucacggcgugguguuucugcacgugacauaugugcccgcucaagagaagaauuucaccaccgcuccagccaucugccacgacggcaaagcccacuuuccuagagaaggcguguucguguccaacggcacccauugguucgugacacagcggaacuucuacgagccccagaucaucaccaccgacaacaccuucgugucuggcaacugcgacguugugaucggcauugugaacaauaccguguacgacccucugcagcccgagcuggacagc

SEQ ID NO: 12084 - RNA, 4116 nt, Artificial Sequence
  SARS-CoV-2/Wuhan/WIV05/2019__EPI_ISL_402128 spike protein CDS gc mod (1-1211) LumSynth construct
auguucguguuucuggugcugcugccccugguguccagccagugugugaaccugaccaccagaacacagcugccuccagccuacaccaacagcuucaccagaggcguguacuaccccgacaagguguucagauccagcgugcugcacucuacccaggaccuguuccugccuuucuucagcaacgugaccugguuccacgccauccacguguccggcaccaauggcaccaagagauucgacaaccccgugcugcccuucaacgacgggguguacuuugccagcaccgagaaguccaacaucaucagaggcuggaucuucggcaccacacuggacagcaagacccagagccugcugaucgugaacaacgccaccaacguggucaucaaagugugcgaguuccaguucugcaacgaccccuuccugggcgucuacuaccacaagaacaacaagagcuggauggaaagcgaguuccggguguacagcagcgccaacaacugcaccuucgaguacgugucccagccuuuccugauggaccuggaaggcaagcagggcaacuucaagaaccugcgcgaguucguguucaagaacaucgacggcuacuucaaaaucuacagcaagcacaccccuaucaaccucgugcgggaucugccucagggcuucucugcucuggaaccccugguggaucugcccaucggcaucaacaucacccgguuucagacacugcuggcccugcacagaagcuaccugacaccuggcgauagcagcagcggauggacagcuggugccgccgcuuacuaugugggcuaccugcagccuagaaccuuccugcugaaguacaacgagaacggcaccaucaccgacgccguggauugugcucuggauccucugagcgagacaaagugcacccugaaguccuucaccguggaaaagggcaucuaccagaccagcaacuuccgggugcagcccaccgaauccaucgugcgguuccccaauaucaccaaucugugccccuucggcgagguguucaaugccaccagauucgccucuguguacgccuggaaccggaagcggaucagcaauugcguggccgacuacuccgugcuguacaacuccgccagcuucagcaccuucaagugcuacggcguguccccuaccaagcugaacgaccugugcuucacaaacguguacgccgacagcuucgugauccggggagaugaagugcggcagauugccccuggacagacaggcaagaucgccgacuacaacuacaagcugcccgacgacuucaccggcugugugauugccuggaacagcaacaaccuggacuccaaagucggcggcaacuacaauuaccuguaccggcuguuccggaaguccaaucugaagcccuucgagcgggacaucagcaccgaaaucuaucaggccggcagcaccccuugcaacggcguggaaggcuucaacugcuacuucccacugcaguccuacggcuuucagcccacaaauggcgugggcuaucagcccuacagagugguggugcugagcuucgaacugcugcaugcuccugccacagugugcggcccuaagaaaagcaccaaucucgugaagaacaaaugcgugaacuucaacuucaacggccugaccggcaccggcgugcugacagagagcaacaagaaguuccugccauuccagcaguuuggccgggauaucgccgauaccacagacgccguuagagauccccagacacuggaaauccuggacaucaccccaugcagcuucggcggagugucugugaucaccccuggcaccaacaccagcaaucagguggcagugcuguaccaggacgugaacuguaccgaagugcccguggccauucacgccgaucagcugacaccuacauggcggguguacuccaccggcagcaauguguuucagaccagagccggcugucugaucggagccgagcacgugaacaauagcuacgagugcgacauccccaucggcgcuggcaucugugccagcuaccagacacagacaaacagccccagacgggcuagaagcguggccagccagagcaucauugccuacacaaugucucugggcgccgagaacagcguggccuacuccaacaacucuaucgcuauccccaccaacuucaccaucagcgugaccaccgagauccugccuguguccaugaccaagaccagcguggacugcaccauguacaucugcggcgauuccaccgagugcuccaaccugcugcugcaguacggcagcuucugcacccagcugaauagagcccugacagggaucgccguggaacaggacaagaacacccaagagguguucgcccaagugaagcaaaucuacaagaccccuccuaucaaggacuucggcggcuucaauuucagccagauucugcccgauccuagcaagcccagcaagcggagcuucaucgaggaccugcuguucaacaaagugacacuggccgacgccggcuucaucaagcaguauggcgauugucugggcgacauugccgccagggaucugauuugcgcccagaaguuuaacggacugacagugcugccuccucugcugaccgaugagaugaucgcccaguacacaucugcccugcuggccggcacaaucacaagcggcuggacauuuggagcuggcgccgcucugcagauccccuuugcuaugcagauggccuaccgguucaacggcaucggagugacccagaaugugcuguacgagaaccagaagcugaucgccaaccaguucaacagcgccaucggcaagauccaggacagccugagcagcacagcaagcgcccugggaaagcugcaggacguggucaaccagaaugcccaggcacugaacacccuggucaagcagcuguccuccaacuucggcgccaucagcucugugcugaacgauauccugagcagacuggacaaggucgaggccgaggugcagaucgacagacugaucacaggcagacugcagagccuccagacauacgugacccagcagcugaucagagccgccgagauuagagccucugccaaucuggccgccaccaagaugucugagugugugcugggccagagcaagagaguggacuuuugcggcaagggcuaccaccugaugagcuucccucagucugccccucacggcgugguguuucugcacgugacauaugugcccgcucaagagaagaauuucaccaccgcuccagccaucugccacgacggcaaagcccacuuuccuagagaaggcguguucguguccaacggcacccauugguucgugacacagcggaacuucuacgagccccagaucaucaccaccgacaacaccuucgugucuggcaacugcgacguugugaucggcauugugaacaauaccguguacgacccucugcagcccgagcuggacagcuucaaagaggaacuggacaaguacuuuaagaaccacacaagccccgacguggaccugggcgauaucagcggaaucaaugccagcgucgugaacauccagaaagagaucgaccggcugaacgagguggccaagaaucugaacgagagccugaucgaccugcaagaacuggggaaguacgagcaguacaucaagggcggaggaucuggcggaggacagaucuacgagggcaagcugacagccgagggccugagauuuggaaucguggccagccgguucaaucacgcccugguggauagacugguggaaggcgccaucgaugccauugucagacacggcggcagagaagaggacaucacccucguuagagugcccggcucuugggagauuccuguggcugcuggcgagcuggcccggaaagaagauaucgacgccguuaucgccaucggcgugcugaucagaggcgccacaccucacuucgacuauaucgccagcgagguguccaaaggccuggccgaucugagccuggaacugagaaagcccaucaccuucggcgugaucaccgcugacacacuggaacaggccauugagagagccggcaccaagcacggcaacaaaggaugggaagccgcucuguccgccaucgagauggccaaccuguucaagagccugcgguga

SEQ ID NO: 12085 - RNA, 4116 nt, Artificial Sequence
  SARS-CoV-2/Wuhan/WIV05/2019__EPI_ISL_402128 spike protein CDS gc mod (1-1211)(K986P_V987P) LumSynth construct
auguucguguuucuggugcugcugccccugguguccagccagugugugaaccugaccaccagaacacagcugccuccagccuacaccaacagcuucaccagaggcguguacuaccccgacaagguguucagauccagcgugcugcacucuacccaggaccuguuccugccuuucuucagcaacgugaccugguuccacgccauccacguguccggcaccaauggcaccaagagauucgacaaccccgugcugcccuucaacgacgggguguacuuugccagcaccgagaaguccaacaucaucagaggcuggaucuucggcaccacacuggacagcaagacccagagccugcugaucgugaacaacgccaccaacguggucaucaaagugugcgaguuccaguucugcaacgaccccuuccugggcgucuacuaccacaagaacaacaagagcuggauggaaagcgaguuccggguguacagcagcgccaacaacugcaccuucgaguacgugucccagccuuuccugauggaccuggaaggcaagcagggcaacuucaagaaccugcgcgaguucguguucaagaacaucgacggcuacuucaaaaucuacagcaagcacaccccuaucaaccucgugcgggaucugccucagggcuucucugcucuggaaccccugguggaucugcccaucggcaucaacaucacccgguuucagacacugcuggcccugcacagaagcuaccugacaccuggcgauagcagcagcggauggacagcuggugccgccgcuuacuaugugggcuaccugcagccuagaaccuuccugcugaaguacaacgagaacggcaccaucaccgacgccguggauugugcucuggauccucugagcgagacaaagugcacccugaaguccuucaccguggaaaagggcaucuaccagaccagcaacuuccgggugcagcccaccgaauccaucgugcgguuccccaauaucaccaaucugugccccuucggcgagguguucaaugccaccagauucgccucuguguacgccuggaaccggaagcggaucagcaauugcguggccgacuacuccgugcuguacaacuccgccagcuucagcaccuucaagugcuacggcguguccccuaccaagcugaacgaccugugcuucacaaacguguacgccgacagcuucgugauccggggagaugaagugcggcagauugccccuggacagacaggcaagaucgccgacuacaacuacaagcugcccgacgacuucaccggcugugugauugccuggaacagcaacaaccuggacuccaaagucggcggcaacuacaauuaccuguaccggcuguuccggaaguccaaucugaagcccuucgagcgggacaucagcaccgaaaucuaucaggccggcagcaccccuugcaacggcguggaaggcuucaacugcuacuucccacugcaguccuacggcuuucagcccacaaauggcgugggcuaucagcccuacagagugguggugcugagcuucgaacugcugcaugcuccugccacagugugcggcccuaagaaaagcaccaaucucgugaagaacaaaugcgugaacuucaacuucaacggccugaccggcaccggcgugcugacagagagcaacaagaaguuccugccauuccagcaguuuggccgggauaucgccgauaccacagacgccguuagagauccccagacacuggaaauccuggacaucaccccaugcagcuucggcggagugucugugaucaccccuggcaccaacaccagcaaucagguggcagugcuguaccaggacgugaacuguaccgaagugcccguggccauucacgccgaucagcugacaccuacauggcggguguacuccaccggcagcaauguguuucagaccagagccggcugucugaucggagccgagcacgugaacaauagcuacgagugcgacauccccaucggcgcuggcaucugugccagcuaccagacacagacaaacagccccagacgggcuagaagcguggccagccagagcaucauugccuacacaaugucucugggcgccgagaacagcguggccuacuccaacaacucuaucgcuauccccaccaacuucaccaucagcgugaccaccgagauccugccuguguccaugaccaagaccagcguggacugcaccauguacaucugcggcgauuccaccgagugcuccaaccugcugcugcaguacggcagcuucugcacccagcugaauagagcccugacagggaucgccguggaacaggacaagaacacccaagagguguucgcccaagugaagcaaaucuacaagaccccuccuaucaaggacuucggcggcuucaauuucagccagauucugcccgauccuagcaagcccagcaagcggagcuucaucgaggaccugcuguucaacaaagugacacuggccgacgccggcuucaucaagcaguauggcgauugucugggcgacauugccgccagggaucugauuugcgcccagaaguuuaacggacugacagugcugccuccucugcugaccgaugagaugaucgcccaguacacaucugcccugcuggccggcacaaucacaagcggcuggacauuuggagcuggcgccgcucugcagauccccuuugcuaugcagauggccuaccgguucaacggcaucggagugacccagaaugugcuguacgagaaccagaagcugaucgccaaccaguucaacagcgccaucggcaagauccaggacagccugagcagcacagcaagcgcccugggaaagcugcaggacguggucaaccagaaugcccaggcacugaacacccuggucaagcagcuguccuccaacuucggcgccaucagcucugugcugaacgauauccugagcagacuggacccuccugaggccgaggugcagaucgacagacugaucacaggcagacugcagagccuccagacauacgugacccagcagcugaucagagccgccgagauuagagccucugccaaucuggccgccaccaagaugucugagugugugcugggccagagcaagagaguggacuuuugcggcaagggcuaccaccugaugagcuucccucagucugccccucacggcgugguguuucugcacgugacauaugugcccgcucaagagaagaauuucaccaccgcuccagccaucugccacgacggcaaagcccacuuuccuagagaaggcguguucguguccaacggcacccauugguucgugacacagcggaacuucuacgagccccagaucaucaccaccgacaacaccuucgugucuggcaacugcgacguugugaucggcauugugaacaauaccguguacgacccucugcagcccgagcuggacagcuucaaagaggaacuggacaaguacuuuaagaaccacacaagccccgacguggaccugggcgauaucagcggaaucaaugccagcgucgugaacauccagaaagagaucgaccggcugaacgagguggccaagaaucugaacgagagccugaucgaccugcaagaacuggggaaguacgagcaguacaucaagggcggaggaucuggcggaggacagaucuacgagggcaagcugacagccgagggccugagauuuggaaucguggccagccgguucaaucacgcccugguggauagacugguggaaggcgccaucgaugccauugucagacacggcggcagagaagaggacaucacccucguuagagugcccggcucuugggagauuccuguggcugcuggcgagcuggcccggaaagaagauaucgacgccguuaucgccaucggcgugcugaucagaggcgccacaccucacuucgacuauaucgccagcgagguguccaaaggccuggccgaucugagccuggaacugagaaagcccaucaccuucggcgugaucaccgcugacacacuggaacaggccauugagagagccggcaccaagcacggcaacaaaggaugggaagccgcucuguccgccaucgagauggccaaccuguucaagagccugcgguga

SEQ ID NO: 12086 - RNA, 4116 nt, Artificial Sequence
  SARS-CoV-2/Wuhan/WIV05/2019__EPI_ISL_402128 spike protein CDS gc mod (1-1211)(K986P_V987P_T887WN_A1020W) LumSynth construct
auguucguguuucuggugcugcugccccugguguccagccagugugugaaccugaccaccagaacacagcugccuccagccuacaccaacagcuucaccagaggcguguacuaccccgacaagguguucagauccagcgugcugcacucuacccaggaccuguuccugccuuucuucagcaacgugaccugguuccacgccauccacguguccggcaccaauggcaccaagagauucgacaaccccgugcugcccuucaacgacgggguguacuuugccagcaccgagaaguccaacaucaucagaggcuggaucuucggcaccacacuggacagcaagacccagagccugcugaucgugaacaacgccaccaacguggucaucaaagugugcgaguuccaguucugcaacgaccccuuccugggcgucuacuaccacaagaacaacaagagcuggauggaaagcgaguuccggguguacagcagcgccaacaacugcaccuucgaguacgugucccagccuuuccugauggaccuggaaggcaagcagggcaacuucaagaaccugcgcgaguucguguucaagaacaucgacggcuacuucaaaaucuacagcaagcacaccccuaucaaccucgugcgggaucugccucagggcuucucugcucuggaaccccugguggaucugcccaucggcaucaacaucacccgguuucagacacugcuggcccugcacagaagcuaccugacaccuggcgauagcagcagcggauggacagcuggugccgccgcuuacuaugugggcuaccugcagccuagaaccuuccugcugaaguacaacgagaacggcaccaucaccgacgccguggauugugcucuggauccucugagcgagacaaagugcacccugaaguccuucaccguggaaaagggcaucuaccagaccagcaacuuccgggugcagcccaccgaauccaucgugcgguuccccaauaucaccaaucugugccccuucggcgagguguucaaugccaccagauucgccucuguguacgccuggaaccggaagcggaucagcaauugcguggccgacuacuccgugcuguacaacuccgccagcuucagcaccuucaagugcuacggcguguccccuaccaagcugaacgaccugugcuucacaaacguguacgccgacagcuucgugauccggggagaugaagugcggcagauugccccuggacagacaggcaagaucgccgacuacaacuacaagcugcccgacgacuucaccggcugugugauugccuggaacagcaacaaccuggacuccaaagucggcggcaacuacaauuaccuguaccggcuguuccggaaguccaaucugaagcccuucgagcgggacaucagcaccgaaaucuaucaggccggcagcaccccuugcaacggcguggaaggcuucaacugcuacuucccacugcaguccuacggcuuucagcccacaaauggcgugggcuaucagcccuacagagugguggugcugagcuucgaacugcugcaugcuccugccacagugugcggcccuaagaaaagcaccaaucucgugaagaacaaaugcgugaacuucaacuucaacggccugaccggcaccggcgugcugacagagagcaacaagaaguuccugccauuccagcaguuuggccgggauaucgccgauaccacagacgccguuagagauccccagacacuggaaauccuggacaucaccccaugcagcuucggcggagugucugugaucaccccuggcaccaacaccagcaaucagguggcagugcuguaccaggacgugaacuguaccgaagugcccguggccauucacgccgaucagcugacaccuacauggcggguguacuccaccggcagcaauguguuucagaccagagccggcugucugaucggagccgagcacgugaacaauagcuacgagugcgacauccccaucggcgcuggcaucugugccagcuaccagacacagacaaacagccccagacgggcuagaagcguggccagccagagcaucauugccuacacaaugucucugggcgccgagaacagcguggccuacuccaacaacucuaucgcuauccccaccaacuucaccaucagcgugaccaccgagauccugccuguguccaugaccaagaccagcguggacugcaccauguacaucugcggcgauuccaccgagugcuccaaccugcugcugcaguacggcagcuucugcacccagcugaauagagcccugacagggaucgccguggaacaggacaagaacacccaagagguguucgcccaagugaagcaaaucuacaagaccccuccuaucaaggacuucggcggcuucaauuucagccagauucugcccgauccuagcaagcccagcaagcggagcuucaucgaggaccugcuguucaacaaagugacacuggccgacgccggcuucaucaagcaguauggcgauugucugggcgacauugccgccagggaucugauuugcgcccagaaguuuaacggacugacagugcugccuccucugcugaccgaugagaugaucgcccaguacacaucugcccugcuggccggcacaaucacaagcggcuggugguuuggagcuggcgccgcucugcagauccccuuugcuaugcagauggccuaccgguucaacggcaucggagugacccagaaugugcuguacgagaaccagaagcugaucgccaaccaguucaacagcgccaucggcaagauccaggacagccugagcagcacagcaagcgcccugggaaagcugcaggacguggucaaccagaaugcccaggcacugaacacccuggucaagcagcuguccuccaacuucggcgccaucagcucugugcugaacgauauccugagcagacuggacccuccugaggccgaggugcagaucgacagacugaucacaggcagacugcagagccuccagacauacgugacccagcagcugaucagagccgccgagauuagauggucugccaaucuggccgccaccaagaugucugagugugugcugggccagagcaagagaguggacuuuugcggcaagggcuaccaccugaugagcuucccucagucugccccucacggcgugguguuucugcacgugacauaugugcccgcucaagagaagaauuucaccaccgcuccagccaucugccacgacggcaaagcccacuuuccuagagaaggcguguucguguccaacggcacccauugguucgugacacagcggaacuucuacgagccccagaucaucaccaccgacaacaccuucgugucuggcaacugcgacguugugaucggcauugugaacaauaccguguacgacccucugcagcccgagcuggacagcuucaaagaggaacuggacaaguacuuuaagaaccacacaagccccgacguggaccugggcgauaucagcggaaucaaugccagcgucgugaacauccagaaagagaucgaccggcugaacgagguggccaagaaucugaacgagagccugaucgaccugcaagaacuggggaaguacgagcaguacaucaagggcggaggaucuggcggaggacagaucuacgagggcaagcugacagccgagggccugagauuuggaaucguggccagccgguucaaucacgcccugguggauagacugguggaaggcgccaucgaugccauugucagacacggcggcagagaagaggacaucacccucguuagagugcccggcucuugggagauuccuguggcugcuggcgagcuggcccggaaagaagauaucgacgccguuaucgccaucggcgugcugaucagaggcgccacaccucacuucgacuauaucgccagcgagguguccaaaggccuggccgaucugagccuggaacugagaaagcccaucaccuucggcgugaucaccgcugacacacuggaacaggccauugagagagccggcaccaagcacggcaacaaaggaugggaagccgcucuguccgccaucgagauggccaaccuguucaagagccugcgguga

SEQ ID NO: 12087 - RNA, 4116 nt, Artificial Sequence
  SARS-CoV-2/Wuhan/WIV05/2019__EPI_ISL_402128 spike protein CDS gc mod (1-1211)(K986P_V987P_P1069F) LumSynth construct
auguucguguuucuggugcugcugccccugguguccagccagugugugaaccugaccaccagaacacagcugccuccagccuacaccaacagcuucaccagaggcguguacuaccccgacaagguguucagauccagcgugcugcacucuacccaggaccuguuccugccuuucuucagcaacgugaccugguuccacgccauccacguguccggcaccaauggcaccaagagauucgacaaccccgugcugcccuucaacgacgggguguacuuugccagcaccgagaaguccaacaucaucagaggcuggaucuucggcaccacacuggacagcaagacccagagccugcugaucgugaacaacgccaccaacguggucaucaaagugugcgaguuccaguucugcaacgaccccuuccugggcgucuacuaccacaagaacaacaagagcuggauggaaagcgaguuccggguguacagcagcgccaacaacugcaccuucgaguacgugucccagccuuuccugauggaccuggaaggcaagcagggcaacuucaagaaccugcgcgaguucguguucaagaacaucgacggcuacuucaaaaucuacagcaagcacaccccuaucaaccucgugcgggaucugccucagggcuucucugcucuggaaccccugguggaucugcccaucggcaucaacaucacccgguuucagacacugcuggcccugcacagaagcuaccugacaccuggcgauagcagcagcggauggacagcuggugccgccgcuuacuaugugggcuaccugcagccuagaaccuuccugcugaaguacaacgagaacggcaccaucaccgacgccguggauugugcucuggauccucugagcgagacaaagugcacccugaaguccuucaccguggaaaagggcaucuaccagaccagcaacuuccgggugcagcccaccgaauccaucgugcgguuccccaauaucaccaaucugugccccuucggcgagguguucaaugccaccagauucgccucuguguacgccuggaaccggaagcggaucagcaauugcguggccgacuacuccgugcuguacaacuccgccagcuucagcaccuucaagugcuacggcguguccccuaccaagcugaacgaccugugcuucacaaacguguacgccgacagcuucgugauccggggagaugaagugcggcagauugccccuggacagacaggcaagaucgccgacuacaacuacaagcugcccgacgacuucaccggcugugugauugccuggaacagcaacaaccuggacuccaaagucggcggcaacuacaauuaccuguaccggcuguuccggaaguccaaucugaagcccuucgagcgggacaucagcaccgaaaucuaucaggccggcagcaccccuugcaacggcguggaaggcuucaacugcuacuucccacugcaguccuacggcuuucagcccacaaauggcgugggcuaucagcccuacagagugguggugcugagcuucgaacugcugcaugcuccugccacagugugcggcccuaagaaaagcaccaaucucgugaagaacaaaugcgugaacuucaacuucaacggccugaccggcaccggcgugcugacagagagcaacaagaaguuccugccauuccagcaguuuggccgggauaucgccgauaccacagacgccguuagagauccccagacacuggaaauccuggacaucaccccaugcagcuucggcggagugucugugaucaccccuggcaccaacaccagcaaucagguggcagugcuguaccaggacgugaacuguaccgaagugcccguggccauucacgccgaucagcugacaccuacauggcggguguacuccaccggcagcaauguguuucagaccagagccggcugucugaucggagccgagcacgugaacaauagcuacgagugcgacauccccaucggcgcuggcaucugugccagcuaccagacacagacaaacagccccagacgggcuagaagcguggccagccagagcaucauugccuacacaaugucucugggcgccgagaacagcguggccuacuccaacaacucuaucgcuauccccaccaacuucaccaucagcgugaccaccgagauccugccuguguccaugaccaagaccagcguggacugcaccauguacaucugcggcgauuccaccgagugcuccaaccugcugcugcaguacggcagcuucugcacccagcugaauagagcccugacagggaucgccguggaacaggacaagaacacccaagagguguucgcccaagugaagcaaaucuacaagaccccuccuaucaaggacuucggcggcuucaauuucagccagauucugcccgauccuagcaagcccagcaagcggagcuucaucgaggaccugcuguucaacaaagugacacuggccgacgccggcuucaucaagcaguauggcgauugucugggcgacauugccgccagggaucugauuugcgcccagaaguuuaacggacugacagugcugccuccucugcugaccgaugagaugaucgcccaguacacaucugcccugcuggccggcacaaucacaagcggcuggacauuuggagcuggcgccgcucugcagauccccuuugcuaugcagauggccuaccgguucaacggcaucggagugacccagaaugugcuguacgagaaccagaagcugaucgccaaccaguucaacagcgccaucggcaagauccaggacagccugagcagcacagcaagcgcccugggaaagcugcaggacguggucaaccagaaugcccaggcacugaacacccuggucaagcagcuguccuccaacuucggcgccaucagcucugugcugaacgauauccugagcagacuggacccuccugaggccgaggugcagaucgacagacugaucacaggcagacugcagagccuccagacauacgugacccagcagcugaucagagccgccgagauuagagccucugccaaucuggccgccaccaagaugucugagugugugcugggccagagcaagagaguggacuuuugcggcaagggcuaccaccugaugagcuucccucagucugccccucacggcgugguguuucugcacgugacauauguguucgcucaagagaagaauuucaccaccgcuccagccaucugccacgacggcaaagcccacuuuccuagagaaggcguguucguguccaacggcacccauugguucgugacacagcggaacuucuacgagccccagaucaucaccaccgacaacaccuucgugucuggcaacugcgacguugugaucggcauugugaacaauaccguguacgacccucugcagcccgagcuggacagcuucaaagaggaacuggacaaguacuuuaagaaccacacaagccccgacguggaccugggcgauaucagcggaaucaaugccagcgucgugaacauccagaaagagaucgaccggcugaacgagguggccaagaaucugaacgagagccugaucgaccugcaagaacuggggaaguacgagcaguacaucaagggcggaggaucuggcggaggacagaucuacgagggcaagcugacagccgagggccugagauuuggaaucguggccagccgguucaaucacgcccugguggauagacugguggaaggcgccaucgaugccauugucagacacggcggcagagaagaggacaucacccucguuagagugcccggcucuugggagauuccuguggcugcuggcgagcuggcccggaaagaagauaucgacgccguuaucgccaucggcgugcugaucagaggcgccacaccucacuucgacuauaucgccagcgagguguccaaaggccuggccgaucugagccuggaacugagaaagcccaucaccuucggcgugaucaccgcugacacacuggaacaggccauugagagagccggcaccaagcacggcaacaaaggaugggaagccgcucuguccgccaucgagauggccaaccuguucaagagccugcgguga

SEQ ID NO: 12088 - RNA, 4116 nt, Artificial Sequence
  SARS-CoV-2/Wuhan/WIV05/2019__EPI_ISL_402128 spike protein CDS gc mod (1-1211)(K986P_V987P_ H1048Q_H1064N_ H1083N_H1101N) LumSynth construct
auguucguguuucuggugcugcugccccugguguccagccagugugugaaccugaccaccagaacacagcugccuccagccuacaccaacagcuucaccagaggcguguacuaccccgacaagguguucagauccagcgugcugcacucuacccaggaccuguuccugccuuucuucagcaacgugaccugguuccacgccauccacguguccggcaccaauggcaccaagagauucgacaaccccgugcugcccuucaacgacgggguguacuuugccagcaccgagaaguccaacaucaucagaggcuggaucuucggcaccacacuggacagcaagacccagagccugcugaucgugaacaacgccaccaacguggucaucaaagugugcgaguuccaguucugcaacgaccccuuccugggcgucuacuaccacaagaacaacaagagcuggauggaaagcgaguuccggguguacagcagcgccaacaacugcaccuucgaguacgugucccagccuuuccugauggaccuggaaggcaagcagggcaacuucaagaaccugcgcgaguucguguucaagaacaucgacggcuacuucaaaaucuacagcaagcacaccccuaucaaccucgugcgggaucugccucagggcuucucugcucuggaaccccugguggaucugcccaucggcaucaacaucacccgguuucagacacugcuggcccugcacagaagcuaccugacaccuggcgauagcagcagcggauggacagcuggugccgccgcuuacuaugugggcuaccugcagccuagaaccuuccugcugaaguacaacgagaacggcaccaucaccgacgccguggauugugcucuggauccucugagcgagacaaagugcacccugaaguccuucaccguggaaaagggcaucuaccagaccagcaacuuccgggugcagcccaccgaauccaucgugcgguuccccaauaucaccaaucugugccccuucggcgagguguucaaugccaccagauucgccucuguguacgccuggaaccggaagcggaucagcaauugcguggccgacuacuccgugcuguacaacuccgccagcuucagcaccuucaagugcuacggcguguccccuaccaagcugaacgaccugugcuucacaaacguguacgccgacagcuucgugauccggggagaugaagugcggcagauugccccuggacagacaggcaagaucgccgacuacaacuacaagcugcccgacgacuucaccggcugugugauugccuggaacagcaacaaccuggacuccaaagucggcggcaacuacaauuaccuguaccggcuguuccggaaguccaaucugaagcccuucgagcgggacaucagcaccgaaaucuaucaggccggcagcaccccuugcaacggcguggaaggcuucaacugcuacuucccacugcaguccuacggcuuucagcccacaaauggcgugggcuaucagcccuacagagugguggugcugagcuucgaacugcugcaugcuccugccacagugugcggcccuaagaaaagcaccaaucucgugaagaacaaaugcgugaacuucaacuucaacggccugaccggcaccggcgugcugacagagagcaacaagaaguuccugccauuccagcaguuuggccgggauaucgccgauaccacagacgccguuagagauccccagacacuggaaauccuggacaucaccccaugcagcuucggcggagugucugugaucaccccuggcaccaacaccagcaaucagguggcagugcuguaccaggacgugaacuguaccgaagugcccguggccauucacgccgaucagcugacaccuacauggcggguguacuccaccggcagcaauguguuucagaccagagccggcugucugaucggagccgagcacgugaacaauagcuacgagugcgacauccccaucggcgcuggcaucugugccagcuaccagacacagacaaacagccccagacgggcuagaagcguggccagccagagcaucauugccuacacaaugucucugggcgccgagaacagcguggccuacuccaacaacucuaucgcuauccccaccaacuucaccaucagcgugaccaccgagauccugccuguguccaugaccaagaccagcguggacugcaccauguacaucugcggcgauuccaccgagugcuccaaccugcugcugcaguacggcagcuucugcacccagcugaauagagcccugacagggaucgccguggaacaggacaagaacacccaagagguguucgcccaagugaagcaaaucuacaagaccccuccuaucaaggacuucggcggcuucaauuucagccagauucugcccgauccuagcaagcccagcaagcggagcuucaucgaggaccugcuguucaacaaagugacacuggccgacgccggcuucaucaagcaguauggcgauugucugggcgacauugccgccagggaucugauuugcgcccagaaguuuaacggacugacagugcugccuccucugcugaccgaugagaugaucgcccaguacacaucugcccugcuggccggcacaaucacaagcggcuggacauuuggagcuggcgccgcucugcagauccccuuugcuaugcagauggccuaccgguucaacggcaucggagugacccagaaugugcuguacgagaaccagaagcugaucgccaaccaguucaacagcgccaucggcaagauccaggacagccugagcagcacagcaagcgcccugggaaagcugcaggacguggucaaccagaaugcccaggcacugaacacccuggucaagcagcuguccuccaacuucggcgccaucagcucugugcugaacgauauccugagcagacuggacccuccugaggccgaggugcagaucgacagacugaucacaggcagacugcagagccuccagacauacgugacccagcagcugaucagagccgccgagauuagagccucugccaaucuggccgccaccaagaugucugagugugugcugggccagagcaagagaguggacuuuugcggcaagggcuaccagcugaugagcuucccucagucugccccucacggcgugguguuucugaacgugacauaugugcccgcucaagagaagaauuucaccaccgcuccagccaucugcaacgacggcaaagcccacuuuccuagagaaggcguguucguguccaacggcaccaacugguucgugacacagcggaacuucuacgagccccagaucaucaccaccgacaacaccuucgugucuggcaacugcgacguugugaucggcauugugaacaauaccguguacgacccucugcagcccgagcuggacagcuucaaagaggaacuggacaaguacuuuaagaaccacacaagccccgacguggaccugggcgauaucagcggaaucaaugccagcgucgugaacauccagaaagagaucgaccggcugaacgagguggccaagaaucugaacgagagccugaucgaccugcaagaacuggggaaguacgagcaguacaucaagggcggaggaucuggcggaggacagaucuacgagggcaagcugacagccgagggccugagauuuggaaucguggccagccgguucaaucacgcccugguggauagacugguggaaggcgccaucgaugccauugucagacacggcggcagagaagaggacaucacccucguuagagugcccggcucuugggagauuccuguggcugcuggcgagcuggcccggaaagaagauaucgacgccguuaucgccaucggcgugcugaucagaggcgccacaccucacuucgacuauaucgccagcgagguguccaaaggccuggccgaucugagccuggaacugagaaagcccaucaccuucggcgugaucaccgcugacacacuggaacaggccauugagagagccggcaccaagcacggcaacaaaggaugggaagccgcucuguccgccaucgagauggccaaccuguucaagagccugcgguga

SEQ ID NO: 12089 - RNA, 4116 nt, Artificial Sequence
  SARS-CoV-2/Wuhan/WIV05/2019__EPI_ISL_402128 spike protein CDS gc mod (1-1211)(I712C_T1077C) LumSynth construct
auguucguguuucuggugcugcugccccugguguccagccagugugugaaccugaccaccagaacacagcugccuccagccuacaccaacagcuucaccagaggcguguacuaccccgacaagguguucagauccagcgugcugcacucuacccaggaccuguuccugccuuucuucagcaacgugaccugguuccacgccauccacguguccggcaccaauggcaccaagagauucgacaaccccgugcugcccuucaacgacgggguguacuuugccagcaccgagaaguccaacaucaucagaggcuggaucuucggcaccacacuggacagcaagacccagagccugcugaucgugaacaacgccaccaacguggucaucaaagugugcgaguuccaguucugcaacgaccccuuccugggcgucuacuaccacaagaacaacaagagcuggauggaaagcgaguuccggguguacagcagcgccaacaacugcaccuucgaguacgugucccagccuuuccugauggaccuggaaggcaagcagggcaacuucaagaaccugcgcgaguucguguucaagaacaucgacggcuacuucaaaaucuacagcaagcacaccccuaucaaccucgugcgggaucugccucagggcuucucugcucuggaaccccugguggaucugcccaucggcaucaacaucacccgguuucagacacugcuggcccugcacagaagcuaccugacaccuggcgauagcagcagcggauggacagcuggugccgccgcuuacuaugugggcuaccugcagccuagaaccuuccugcugaaguacaacgagaacggcaccaucaccgacgccguggauugugcucuggauccucugagcgagacaaagugcacccugaaguccuucaccguggaaaagggcaucuaccagaccagcaacuuccgggugcagcccaccgaauccaucgugcgguuccccaauaucaccaaucugugccccuucggcgagguguucaaugccaccagauucgccucuguguacgccuggaaccggaagcggaucagcaauugcguggccgacuacuccgugcuguacaacuccgccagcuucagcaccuucaagugcuacggcguguccccuaccaagcugaacgaccugugcuucacaaacguguacgccgacagcuucgugauccggggagaugaagugcggcagauugccccuggacagacaggcaagaucgccgacuacaacuacaagcugcccgacgacuucaccggcugugugauugccuggaacagcaacaaccuggacuccaaagucggcggcaacuacaauuaccuguaccggcuguuccggaaguccaaucugaagcccuucgagcgggacaucagcaccgaaaucuaucaggccggcagcaccccuugcaacggcguggaaggcuucaacugcuacuucccacugcaguccuacggcuuucagcccacaaauggcgugggcuaucagcccuacagagugguggugcugagcuucgaacugcugcaugcuccugccacagugugcggcccuaagaaaagcaccaaucucgugaagaacaaaugcgugaacuucaacuucaacggccugaccggcaccggcgugcugacagagagcaacaagaaguuccugccauuccagcaguuuggccgggauaucgccgauaccacagacgccguuagagauccccagacacuggaaauccuggacaucaccccaugcagcuucggcggagugucugugaucaccccuggcaccaacaccagcaaucagguggcagugcuguaccaggacgugaacuguaccgaagugcccguggccauucacgccgaucagcugacaccuacauggcggguguacuccaccggcagcaauguguuucagaccagagccggcugucugaucggagccgagcacgugaacaauagcuacgagugcgacauccccaucggcgcuggcaucugugccagcuaccagacacagacaaacagccccagacgggcuagaagcguggccagccagagcaucauugccuacacaaugucucugggcgccgagaacagcguggccuacuccaacaacucuugcgcuauccccaccaacuucaccaucagcgugaccaccgagauccugccuguguccaugaccaagaccagcguggacugcaccauguacaucugcggcgauuccaccgagugcuccaaccugcugcugcaguacggcagcuucugcacccagcugaauagagcccugacagggaucgccguggaacaggacaagaacacccaagagguguucgcccaagugaagcaaaucuacaagaccccuccuaucaaggacuucggcggcuucaauuucagccagauucugcccgauccuagcaagcccagcaagcggagcuucaucgaggaccugcuguucaacaaagugacacuggccgacgccggcuucaucaagcaguauggcgauugucugggcgacauugccgccagggaucugauuugcgcccagaaguuuaacggacugacagugcugccuccucugcugaccgaugagaugaucgcccaguacacaucugcccugcuggccggcacaaucacaagcggcuggacauuuggagcuggcgccgcucugcagauccccuuugcuaugcagauggccuaccgguucaacggcaucggagugacccagaaugugcuguacgagaaccagaagcugaucgccaaccaguucaacagcgccaucggcaagauccaggacagccugagcagcacagcaagcgcccugggaaagcugcaggacguggucaaccagaaugcccaggcacugaacacccuggucaagcagcuguccuccaacuucggcgccaucagcucugugcugaacgauauccugagcagacuggacaaggucgaggccgaggugcagaucgacagacugaucacaggcagacugcagagccuccagacauacgugacccagcagcugaucagagccgccgagauuagagccucugccaaucuggccgccaccaagaugucugagugugugcugggccagagcaagagaguggacuuuugcggcaagggcuaccaccugaugagcuucccucagucugccccucacggcgugguguuucugcacgugacauaugugcccgcucaagagaagaauuucaccugugcuccagccaucugccacgacggcaaagcccacuuuccuagagaaggcguguucguguccaacggcacccauugguucgugacacagcggaacuucuacgagccccagaucaucaccaccgacaacaccuucgugucuggcaacugcgacguugugaucggcauugugaacaauaccguguacgacccucugcagcccgagcuggacagcuucaaagaggaacuggacaaguacuuuaagaaccacacaagccccgacguggaccugggcgauaucagcggaaucaaugccagcgucgugaacauccagaaagagaucgaccggcugaacgagguggccaagaaucugaacgagagccugaucgaccugcaagaacuggggaaguacgagcaguacaucaagggcggaggaucuggcggaggacagaucuacgagggcaagcugacagccgagggccugagauuuggaaucguggccagccgguucaaucacgcccugguggauagacugguggaaggcgccaucgaugccauugucagacacggcggcagagaagaggacaucacccucguuagagugcccggcucuugggagauuccuguggcugcuggcgagcuggcccggaaagaagauaucgacgccguuaucgccaucggcgugcugaucagaggcgccacaccucacuucgacuauaucgccagcgagguguccaaaggccuggccgaucugagccuggaacugagaaagcccaucaccuucggcgugaucaccgcugacacacuggaacaggccauugagagagccggcaccaagcacggcaacaaaggaugggaagccgcucuguccgccaucgagauggccaaccuguucaagagccugcgguga

SEQ ID NO: 12090 - RNA, 4116 nt, Artificial Sequence
  SARS-CoV-2/Wuhan/WIV05/2019__EPI_ISL_402128 spike protein CDS gc mod (1-1211)(I714C_Y1110C) LumSynth construct
auguucguguuucuggugcugcugccccugguguccagccagugugugaaccugaccaccagaacacagcugccuccagccuacaccaacagcuucaccagaggcguguacuaccccgacaagguguucagauccagcgugcugcacucuacccaggaccuguuccugccuuucuucagcaacgugaccugguuccacgccauccacguguccggcaccaauggcaccaagagauucgacaaccccgugcugcccuucaacgacgggguguacuuugccagcaccgagaaguccaacaucaucagaggcuggaucuucggcaccacacuggacagcaagacccagagccugcugaucgugaacaacgccaccaacguggucaucaaagugugcgaguuccaguucugcaacgaccccuuccugggcgucuacuaccacaagaacaacaagagcuggauggaaagcgaguuccggguguacagcagcgccaacaacugcaccuucgaguacgugucccagccuuuccugauggaccuggaaggcaagcagggcaacuucaagaaccugcgcgaguucguguucaagaacaucgacggcuacuucaaaaucuacagcaagcacaccccuaucaaccucgugcgggaucugccucagggcuucucugcucuggaaccccugguggaucugcccaucggcaucaacaucacccgguuucagacacugcuggcccugcacagaagcuaccugacaccuggcgauagcagcagcggauggacagcuggugccgccgcuuacuaugugggcuaccugcagccuagaaccuuccugcugaaguacaacgagaacggcaccaucaccgacgccguggauugugcucuggauccucugagcgagacaaagugcacccugaaguccuucaccguggaaaagggcaucuaccagaccagcaacuuccgggugcagcccaccgaauccaucgugcgguuccccaauaucaccaaucugugccccuucggcgagguguucaaugccaccagauucgccucuguguacgccuggaaccggaagcggaucagcaauugcguggccgacuacuccgugcuguacaacuccgccagcuucagcaccuucaagugcuacggcguguccccuaccaagcugaacgaccugugcuucacaaacguguacgccgacagcuucgugauccggggagaugaagugcggcagauugccccuggacagacaggcaagaucgccgacuacaacuacaagcugcccgacgacuucaccggcugugugauugccuggaacagcaacaaccuggacuccaaagucggcggcaacuacaauuaccuguaccggcuguuccggaaguccaaucugaagcccuucgagcgggacaucagcaccgaaaucuaucaggccggcagcaccccuugcaacggcguggaaggcuucaacugcuacuucccacugcaguccuacggcuuucagcccacaaauggcgugggcuaucagcccuacagagugguggugcugagcuucgaacugcugcaugcuccugccacagugugcggcccuaagaaaagcaccaaucucgugaagaacaaaugcgugaacuucaacuucaacggccugaccggcaccggcgugcugacagagagcaacaagaaguuccugccauuccagcaguuuggccgggauaucgccgauaccacagacgccguuagagauccccagacacuggaaauccuggacaucaccccaugcagcuucggcggagugucugugaucaccccuggcaccaacaccagcaaucagguggcagugcuguaccaggacgugaacuguaccgaagugcccguggccauucacgccgaucagcugacaccuacauggcggguguacuccaccggcagcaauguguuucagaccagagccggcugucugaucggagccgagcacgugaacaauagcuacgagugcgacauccccaucggcgcuggcaucugugccagcuaccagacacagacaaacagccccagacgggcuagaagcguggccagccagagcaucauugccuacacaaugucucugggcgccgagaacagcguggccuacuccaacaacucuaucgcuugccccaccaacuucaccaucagcgugaccaccgagauccugccuguguccaugaccaagaccagcguggacugcaccauguacaucugcggcgauuccaccgagugcuccaaccugcugcugcaguacggcagcuucugcacccagcugaauagagcccugacagggaucgccguggaacaggacaagaacacccaagagguguucgcccaagugaagcaaaucuacaagaccccuccuaucaaggacuucggcggcuucaauuucagccagauucugcccgauccuagcaagcccagcaagcggagcuucaucgaggaccugcuguucaacaaagugacacuggccgacgccggcuucaucaagcaguauggcgauugucugggcgacauugccgccagggaucugauuugcgcccagaaguuuaacggacugacagugcugccuccucugcugaccgaugagaugaucgcccaguacacaucugcccugcuggccggcacaaucacaagcggcuggacauuuggagcuggcgccgcucugcagauccccuuugcuaugcagauggccuaccgguucaacggcaucggagugacccagaaugugcuguacgagaaccagaagcugaucgccaaccaguucaacagcgccaucggcaagauccaggacagccugagcagcacagcaagcgcccugggaaagcugcaggacguggucaaccagaaugcccaggcacugaacacccuggucaagcagcuguccuccaacuucggcgccaucagcucugugcugaacgauauccugagcagacuggacaaggucgaggccgaggugcagaucgacagacugaucacaggcagacugcagagccuccagacauacgugacccagcagcugaucagagccgccgagauuagagccucugccaaucuggccgccaccaagaugucugagugugugcugggccagagcaagagaguggacuuuugcggcaagggcuaccaccugaugagcuucccucagucugccccucacggcgugguguuucugcacgugacauaugugcccgcucaagagaagaauuucaccaccgcuccagccaucugccacgacggcaaagcccacuuuccuagagaaggcguguucguguccaacggcacccauugguucgugacacagcggaacuucugugagccccagaucaucaccaccgacaacaccuucgugucuggcaacugcgacguugugaucggcauugugaacaauaccguguacgacccucugcagcccgagcuggacagcuucaaagaggaacuggacaaguacuuuaagaaccacacaagccccgacguggaccugggcgauaucagcggaaucaaugccagcgucgugaacauccagaaagagaucgaccggcugaacgagguggccaagaaucugaacgagagccugaucgaccugcaagaacuggggaaguacgagcaguacaucaagggcggaggaucuggcggaggacagaucuacgagggcaagcugacagccgagggccugagauuuggaaucguggccagccgguucaaucacgcccugguggauagacugguggaaggcgccaucgaugccauugucagacacggcggcagagaagaggacaucacccucguuagagugcccggcucuugggagauuccuguggcugcuggcgagcuggcccggaaagaagauaucgacgccguuaucgccaucggcgugcugaucagaggcgccacaccucacuucgacuauaucgccagcgagguguccaaaggccuggccgaucugagccuggaacugagaaagcccaucaccuucggcgugaucaccgcugacacacuggaacaggccauugagagagccggcaccaagcacggcaacaaaggaugggaagccgcucuguccgccaucgagauggccaaccuguucaagagccugcgguga

SEQ ID NO: 12091 - RNA, 4116 nt, Artificial Sequence
  SARS-CoV-2/Wuhan/WIV05/2019__EPI_ISL_402128 spike protein CDS gc mod (1-1211)(P715C_P1069C) LumSynth construct
auguucguguuucuggugcugcugccccugguguccagccagugugugaaccugaccaccagaacacagcugccuccagccuacaccaacagcuucaccagaggcguguacuaccccgacaagguguucagauccagcgugcugcacucuacccaggaccuguuccugccuuucuucagcaacgugaccugguuccacgccauccacguguccggcaccaauggcaccaagagauucgacaaccccgugcugcccuucaacgacgggguguacuuugccagcaccgagaaguccaacaucaucagaggcuggaucuucggcaccacacuggacagcaagacccagagccugcugaucgugaacaacgccaccaacguggucaucaaagugugcgaguuccaguucugcaacgaccccuuccugggcgucuacuaccacaagaacaacaagagcuggauggaaagcgaguuccggguguacagcagcgccaacaacugcaccuucgaguacgugucccagccuuuccugauggaccuggaaggcaagcagggcaacuucaagaaccugcgcgaguucguguucaagaacaucgacggcuacuucaaaaucuacagcaagcacaccccuaucaaccucgugcgggaucugccucagggcuucucugcucuggaaccccugguggaucugcccaucggcaucaacaucacccgguuucagacacugcuggcccugcacagaagcuaccugacaccuggcgauagcagcagcggauggacagcuggugccgccgcuuacuaugugggcuaccugcagccuagaaccuuccugcugaaguacaacgagaacggcaccaucaccgacgccguggauugugcucuggauccucugagcgagacaaagugcacccugaaguccuucaccguggaaaagggcaucuaccagaccagcaacuuccgggugcagcccaccgaauccaucgugcgguuccccaauaucaccaaucugugccccuucggcgagguguucaaugccaccagauucgccucuguguacgccuggaaccggaagcggaucagcaauugcguggccgacuacuccgugcuguacaacuccgccagcuucagcaccuucaagugcuacggcguguccccuaccaagcugaacgaccugugcuucacaaacguguacgccgacagcuucgugauccggggagaugaagugcggcagauugccccuggacagacaggcaagaucgccgacuacaacuacaagcugcccgacgacuucaccggcugugugauugccuggaacagcaacaaccuggacuccaaagucggcggcaacuacaauuaccuguaccggcuguuccggaaguccaaucugaagcccuucgagcgggacaucagcaccgaaaucuaucaggccggcagcaccccuugcaacggcguggaaggcuucaacugcuacuucccacugcaguccuacggcuuucagcccacaaauggcgugggcuaucagcccuacagagugguggugcugagcuucgaacugcugcaugcuccugccacagugugcggcccuaagaaaagcaccaaucucgugaagaacaaaugcgugaacuucaacuucaacggccugaccggcaccggcgugcugacagagagcaacaagaaguuccugccauuccagcaguuuggccgggauaucgccgauaccacagacgccguuagagauccccagacacuggaaauccuggacaucaccccaugcagcuucggcggagugucugugaucaccccuggcaccaacaccagcaaucagguggcagugcuguaccaggacgugaacuguaccgaagugcccguggccauucacgccgaucagcugacaccuacauggcggguguacuccaccggcagcaauguguuucagaccagagccggcugucugaucggagccgagcacgugaacaauagcuacgagugcgacauccccaucggcgcuggcaucugugccagcuaccagacacagacaaacagccccagacgggcuagaagcguggccagccagagcaucauugccuacacaaugucucugggcgccgagaacagcguggccuacuccaacaacucuaucgcuaucugcaccaacuucaccaucagcgugaccaccgagauccugccuguguccaugaccaagaccagcguggacugcaccauguacaucugcggcgauuccaccgagugcuccaaccugcugcugcaguacggcagcuucugcacccagcugaauagagcccugacagggaucgccguggaacaggacaagaacacccaagagguguucgcccaagugaagcaaaucuacaagaccccuccuaucaaggacuucggcggcuucaauuucagccagauucugcccgauccuagcaagcccagcaagcggagcuucaucgaggaccugcuguucaacaaagugacacuggccgacgccggcuucaucaagcaguauggcgauugucugggcgacauugccgccagggaucugauuugcgcccagaaguuuaacggacugacagugcugccuccucugcugaccgaugagaugaucgcccaguacacaucugcccugcuggccggcacaaucacaagcggcuggacauuuggagcuggcgccgcucugcagauccccuuugcuaugcagauggccuaccgguucaacggcaucggagugacccagaaugugcuguacgagaaccagaagcugaucgccaaccaguucaacagcgccaucggcaagauccaggacagccugagcagcacagcaagcgcccugggaaagcugcaggacguggucaaccagaaugcccaggcacugaacacccuggucaagcagcuguccuccaacuucggcgccaucagcucugugcugaacgauauccugagcagacuggacaaggucgaggccgaggugcagaucgacagacugaucacaggcagacugcagagccuccagacauacgugacccagcagcugaucagagccgccgagauuagagccucugccaaucuggccgccaccaagaugucugagugugugcugggccagagcaagagaguggacuuuugcggcaagggcuaccaccugaugagcuucccucagucugccccucacggcgugguguuucugcacgugacauaugugugugcucaagagaagaauuucaccaccgcuccagccaucugccacgacggcaaagcccacuuuccuagagaaggcguguucguguccaacggcacccauugguucgugacacagcggaacuucuacgagccccagaucaucaccaccgacaacaccuucgugucuggcaacugcgacguugugaucggcauugugaacaauaccguguacgacccucugcagcccgagcuggacagcuucaaagaggaacuggacaaguacuuuaagaaccacacaagccccgacguggaccugggcgauaucagcggaaucaaugccagcgucgugaacauccagaaagagaucgaccggcugaacgagguggccaagaaucugaacgagagccugaucgaccugcaagaacuggggaaguacgagcaguacaucaagggcggaggaucuggcggaggacagaucuacgagggcaagcugacagccgagggccugagauuuggaaucguggccagccgguucaaucacgcccugguggauagacugguggaaggcgccaucgaugccauugucagacacggcggcagagaagaggacaucacccucguuagagugcccggcucuugggagauuccuguggcugcuggcgagcuggcccggaaagaagauaucgacgccguuaucgccaucggcgugcugaucagaggcgccacaccucacuucgacuauaucgccagcgagguguccaaaggccuggccgaucugagccuggaacugagaaagcccaucaccuucggcgugaucaccgcugacacacuggaacaggccauugagagagccggcaccaagcacggcaacaaaggaugggaagccgcucuguccgccaucgagauggccaaccuguucaagagccugcgguga

SEQ ID NO: 12092 - RNA, 4116 nt, Artificial Sequence
  SARS-CoV-2/Wuhan/WIV05/2019__EPI_ISL_402128 spike protein CDS gc mod (1-1211)(G889C_L1034C) LumSynth construct
auguucguguuucuggugcugcugccccugguguccagccagugugugaaccugaccaccagaacacagcugccuccagccuacaccaacagcuucaccagaggcguguacuaccccgacaagguguucagauccagcgugcugcacucuacccaggaccuguuccugccuuucuucagcaacgugaccugguuccacgccauccacguguccggcaccaauggcaccaagagauucgacaaccccgugcugcccuucaacgacgggguguacuuugccagcaccgagaaguccaacaucaucagaggcuggaucuucggcaccacacuggacagcaagacccagagccugcugaucgugaacaacgccaccaacguggucaucaaagugugcgaguuccaguucugcaacgaccccuuccugggcgucuacuaccacaagaacaacaagagcuggauggaaagcgaguuccggguguacagcagcgccaacaacugcaccuucgaguacgugucccagccuuuccugauggaccuggaaggcaagcagggcaacuucaagaaccugcgcgaguucguguucaagaacaucgacggcuacuucaaaaucuacagcaagcacaccccuaucaaccucgugcgggaucugccucagggcuucucugcucuggaaccccugguggaucugcccaucggcaucaacaucacccgguuucagacacugcuggcccugcacagaagcuaccugacaccuggcgauagcagcagcggauggacagcuggugccgccgcuuacuaugugggcuaccugcagccuagaaccuuccugcugaaguacaacgagaacggcaccaucaccgacgccguggauugugcucuggauccucugagcgagacaaagugcacccugaaguccuucaccguggaaaagggcaucuaccagaccagcaacuuccgggugcagcccaccgaauccaucgugcgguuccccaauaucaccaaucugugccccuucggcgagguguucaaugccaccagauucgccucuguguacgccuggaaccggaagcggaucagcaauugcguggccgacuacuccgugcuguacaacuccgccagcuucagcaccuucaagugcuacggcguguccccuaccaagcugaacgaccugugcuucacaaacguguacgccgacagcuucgugauccggggagaugaagugcggcagauugccccuggacagacaggcaagaucgccgacuacaacuacaagcugcccgacgacuucaccggcugugugauugccuggaacagcaacaaccuggacuccaaagucggcggcaacuacaauuaccuguaccggcuguuccggaaguccaaucugaagcccuucgagcgggacaucagcaccgaaaucuaucaggccggcagcaccccuugcaacggcguggaaggcuucaacugcuacuucccacugcaguccuacggcuuucagcccacaaauggcgugggcuaucagcccuacagagugguggugcugagcuucgaacugcugcaugcuccugccacagugugcggcccuaagaaaagcaccaaucucgugaagaacaaaugcgugaacuucaacuucaacggccugaccggcaccggcgugcugacagagagcaacaagaaguuccugccauuccagcaguuuggccgggauaucgccgauaccacagacgccguuagagauccccagacacuggaaauccuggacaucaccccaugcagcuucggcggagugucugugaucaccccuggcaccaacaccagcaaucagguggcagugcuguaccaggacgugaacuguaccgaagugcccguggccauucacgccgaucagcugacaccuacauggcggguguacuccaccggcagcaauguguuucagaccagagccggcugucugaucggagccgagcacgugaacaauagcuacgagugcgacauccccaucggcgcuggcaucugugccagcuaccagacacagacaaacagccccagacgggcuagaagcguggccagccagagcaucauugccuacacaaugucucugggcgccgagaacagcguggccuacuccaacaacucuaucgcuauccccaccaacuucaccaucagcgugaccaccgagauccugccuguguccaugaccaagaccagcguggacugcaccauguacaucugcggcgauuccaccgagugcuccaaccugcugcugcaguacggcagcuucugcacccagcugaauagagcccugacagggaucgccguggaacaggacaagaacacccaagagguguucgcccaagugaagcaaaucuacaagaccccuccuaucaaggacuucggcggcuucaauuucagccagauucugcccgauccuagcaagcccagcaagcggagcuucaucgaggaccugcuguucaacaaagugacacuggccgacgccggcuucaucaagcaguauggcgauugucugggcgacauugccgccagggaucugauuugcgcccagaaguuuaacggacugacagugcugccuccucugcugaccgaugagaugaucgcccaguacacaucugcccugcuggccggcacaaucacaagcggcuggacauuuugcgcuggcgccgcucugcagauccccuuugcuaugcagauggccuaccgguucaacggcaucggagugacccagaaugugcuguacgagaaccagaagcugaucgccaaccaguucaacagcgccaucggcaagauccaggacagccugagcagcacagcaagcgcccugggaaagcugcaggacguggucaaccagaaugcccaggcacugaacacccuggucaagcagcuguccuccaacuucggcgccaucagcucugugcugaacgauauccugagcagacuggacaaggucgaggccgaggugcagaucgacagacugaucacaggcagacugcagagccuccagacauacgugacccagcagcugaucagagccgccgagauuagagccucugccaaucuggccgccaccaagaugucugaguguguguguggccagagcaagagaguggacuuuugcggcaagggcuaccaccugaugagcuucccucagucugccccucacggcgugguguuucugcacgugacauaugugcccgcucaagagaagaauuucaccaccgcuccagccaucugccacgacggcaaagcccacuuuccuagagaaggcguguucguguccaacggcacccauugguucgugacacagcggaacuucuacgagccccagaucaucaccaccgacaacaccuucgugucuggcaacugcgacguugugaucggcauugugaacaauaccguguacgacccucugcagcccgagcuggacagcuucaaagaggaacuggacaaguacuuuaagaaccacacaagccccgacguggaccugggcgauaucagcggaaucaaugccagcgucgugaacauccagaaagagaucgaccggcugaacgagguggccaagaaucugaacgagagccugaucgaccugcaagaacuggggaaguacgagcaguacaucaagggcggaggaucuggcggaggacagaucuacgagggcaagcugacagccgagggccugagauuuggaaucguggccagccgguucaaucacgcccugguggauagacugguggaaggcgccaucgaugccauugucagacacggcggcagagaagaggacaucacccucguuagagugcccggcucuugggagauuccuguggcugcuggcgagcuggcccggaaagaagauaucgacgccguuaucgccaucggcgugcugaucagaggcgccacaccucacuucgacuauaucgccagcgagguguccaaaggccuggccgaucugagccuggaacugagaaagcccaucaccuucggcgugaucaccgcugacacacuggaacaggccauugagagagccggcaccaagcacggcaacaaaggaugggaagccgcucuguccgccaucgagauggccaaccuguucaagagccugcgguga

SEQ ID NO: 12093 - RNA, 4116 nt, Artificial Sequence
  SARS-CoV-2/Wuhan/WIV05/2019__EPI_ISL_402128 spike protein CDS gc mod (1-1211)(I909C_Y1047C) LumSynth construct
auguucguguuucuggugcugcugccccugguguccagccagugugugaaccugaccaccagaacacagcugccuccagccuacaccaacagcuucaccagaggcguguacuaccccgacaagguguucagauccagcgugcugcacucuacccaggaccuguuccugccuuucuucagcaacgugaccugguuccacgccauccacguguccggcaccaauggcaccaagagauucgacaaccccgugcugcccuucaacgacgggguguacuuugccagcaccgagaaguccaacaucaucagaggcuggaucuucggcaccacacuggacagcaagacccagagccugcugaucgugaacaacgccaccaacguggucaucaaagugugcgaguuccaguucugcaacgaccccuuccugggcgucuacuaccacaagaacaacaagagcuggauggaaagcgaguuccggguguacagcagcgccaacaacugcaccuucgaguacgugucccagccuuuccugauggaccuggaaggcaagcagggcaacuucaagaaccugcgcgaguucguguucaagaacaucgacggcuacuucaaaaucuacagcaagcacaccccuaucaaccucgugcgggaucugccucagggcuucucugcucuggaaccccugguggaucugcccaucggcaucaacaucacccgguuucagacacugcuggcccugcacagaagcuaccugacaccuggcgauagcagcagcggauggacagcuggugccgccgcuuacuaugugggcuaccugcagccuagaaccuuccugcugaaguacaacgagaacggcaccaucaccgacgccguggauugugcucuggauccucugagcgagacaaagugcacccugaaguccuucaccguggaaaagggcaucuaccagaccagcaacuuccgggugcagcccaccgaauccaucgugcgguuccccaauaucaccaaucugugccccuucggcgagguguucaaugccaccagauucgccucuguguacgccuggaaccggaagcggaucagcaauugcguggccgacuacuccgugcuguacaacuccgccagcuucagcaccuucaagugcuacggcguguccccuaccaagcugaacgaccugugcuucacaaacguguacgccgacagcuucgugauccggggagaugaagugcggcagauugccccuggacagacaggcaagaucgccgacuacaacuacaagcugcccgacgacuucaccggcugugugauugccuggaacagcaacaaccuggacuccaaagucggcggcaacuacaauuaccuguaccggcuguuccggaaguccaaucugaagcccuucgagcgggacaucagcaccgaaaucuaucaggccggcagcaccccuugcaacggcguggaaggcuucaacugcuacuucccacugcaguccuacggcuuucagcccacaaauggcgugggcuaucagcccuacagagugguggugcugagcuucgaacugcugcaugcuccugccacagugugcggcccuaagaaaagcaccaaucucgugaagaacaaaugcgugaacuucaacuucaacggccugaccggcaccggcgugcugacagagagcaacaagaaguuccugccauuccagcaguuuggccgggauaucgccgauaccacagacgccguuagagauccccagacacuggaaauccuggacaucaccccaugcagcuucggcggagugucugugaucaccccuggcaccaacaccagcaaucagguggcagugcuguaccaggacgugaacuguaccgaagugcccguggccauucacgccgaucagcugacaccuacauggcggguguacuccaccggcagcaauguguuucagaccagagccggcugucugaucggagccgagcacgugaacaauagcuacgagugcgacauccccaucggcgcuggcaucugugccagcuaccagacacagacaaacagccccagacgggcuagaagcguggccagccagagcaucauugccuacacaaugucucugggcgccgagaacagcguggccuacuccaacaacucuaucgcuauccccaccaacuucaccaucagcgugaccaccgagauccugccuguguccaugaccaagaccagcguggacugcaccauguacaucugcggcgauuccaccgagugcuccaaccugcugcugcaguacggcagcuucugcacccagcugaauagagcccugacagggaucgccguggaacaggacaagaacacccaagagguguucgcccaagugaagcaaaucuacaagaccccuccuaucaaggacuucggcggcuucaauuucagccagauucugcccgauccuagcaagcccagcaagcggagcuucaucgaggaccugcuguucaacaaagugacacuggccgacgccggcuucaucaagcaguauggcgauugucugggcgacauugccgccagggaucugauuugcgcccagaaguuuaacggacugacagugcugccuccucugcugaccgaugagaugaucgcccaguacacaucugcccugcuggccggcacaaucacaagcggcuggacauuuggagcuggcgccgcucugcagauccccuuugcuaugcagauggccuaccgguucaacggcugcggagugacccagaaugugcuguacgagaaccagaagcugaucgccaaccaguucaacagcgccaucggcaagauccaggacagccugagcagcacagcaagcgcccugggaaagcugcaggacguggucaaccagaaugcccaggcacugaacacccuggucaagcagcuguccuccaacuucggcgccaucagcucugugcugaacgauauccugagcagacuggacaaggucgaggccgaggugcagaucgacagacugaucacaggcagacugcagagccuccagacauacgugacccagcagcugaucagagccgccgagauuagagccucugccaaucuggccgccaccaagaugucugagugugugcugggccagagcaagagaguggacuuuugcggcaagggcugucaccugaugagcuucccucagucugccccucacggcgugguguuucugcacgugacauaugugcccgcucaagagaagaauuucaccaccgcuccagccaucugccacgacggcaaagcccacuuuccuagagaaggcguguucguguccaacggcacccauugguucgugacacagcggaacuucuacgagccccagaucaucaccaccgacaacaccuucgugucuggcaacugcgacguugugaucggcauugugaacaauaccguguacgacccucugcagcccgagcuggacagcuucaaagaggaacuggacaaguacuuuaagaaccacacaagccccgacguggaccugggcgauaucagcggaaucaaugccagcgucgugaacauccagaaagagaucgaccggcugaacgagguggccaagaaucugaacgagagccugaucgaccugcaagaacuggggaaguacgagcaguacaucaagggcggaggaucuggcggaggacagaucuacgagggcaagcugacagccgagggccugagauuuggaaucguggccagccgguucaaucacgcccugguggauagacugguggaaggcgccaucgaugccauugucagacacggcggcagagaagaggacaucacccucguuagagugcccggcucuugggagauuccuguggcugcuggcgagcuggcccggaaagaagauaucgacgccguuaucgccaucggcgugcugaucagaggcgccacaccucacuucgacuauaucgccagcgagguguccaaaggccuggccgaucugagccuggaacugagaaagcccaucaccuucggcgugaucaccgcugacacacuggaacaggccauugagagagccggcaccaagcacggcaacaaaggaugggaagccgcucuguccgccaucgagauggccaaccuguucaagagccugcgguga

SEQ ID NO: 12094 - RNA, 4116 nt, Artificial Sequence
  SARS-CoV-2/Wuhan/WIV05/2019__EPI_ISL_402128 spike protein CDS gc mod (1-1211)(Q965C_S1003C) LumSynth construct
auguucguguuucuggugcugcugccccugguguccagccagugugugaaccugaccaccagaacacagcugccuccagccuacaccaacagcuucaccagaggcguguacuaccccgacaagguguucagauccagcgugcugcacucuacccaggaccuguuccugccuuucuucagcaacgugaccugguuccacgccauccacguguccggcaccaauggcaccaagagauucgacaaccccgugcugcccuucaacgacgggguguacuuugccagcaccgagaaguccaacaucaucagaggcuggaucuucggcaccacacuggacagcaagacccagagccugcugaucgugaacaacgccaccaacguggucaucaaagugugcgaguuccaguucugcaacgaccccuuccugggcgucuacuaccacaagaacaacaagagcuggauggaaagcgaguuccggguguacagcagcgccaacaacugcaccuucgaguacgugucccagccuuuccugauggaccuggaaggcaagcagggcaacuucaagaaccugcgcgaguucguguucaagaacaucgacggcuacuucaaaaucuacagcaagcacaccccuaucaaccucgugcgggaucugccucagggcuucucugcucuggaaccccugguggaucugcccaucggcaucaacaucacccgguuucagacacugcuggcccugcacagaagcuaccugacaccuggcgauagcagcagcggauggacagcuggugccgccgcuuacuaugugggcuaccugcagccuagaaccuuccugcugaaguacaacgagaacggcaccaucaccgacgccguggauugugcucuggauccucugagcgagacaaagugcacccugaaguccuucaccguggaaaagggcaucuaccagaccagcaacuuccgggugcagcccaccgaauccaucgugcgguuccccaauaucaccaaucugugccccuucggcgagguguucaaugccaccagauucgccucuguguacgccuggaaccggaagcggaucagcaauugcguggccgacuacuccgugcuguacaacuccgccagcuucagcaccuucaagugcuacggcguguccccuaccaagcugaacgaccugugcuucacaaacguguacgccgacagcuucgugauccggggagaugaagugcggcagauugccccuggacagacaggcaagaucgccgacuacaacuacaagcugcccgacgacuucaccggcugugugauugccuggaacagcaacaaccuggacuccaaagucggcggcaacuacaauuaccuguaccggcuguuccggaaguccaaucugaagcccuucgagcgggacaucagcaccgaaaucuaucaggccggcagcaccccuugcaacggcguggaaggcuucaacugcuacuucccacugcaguccuacggcuuucagcccacaaauggcgugggcuaucagcccuacagagugguggugcugagcuucgaacugcugcaugcuccugccacagugugcggcccuaagaaaagcaccaaucucgugaagaacaaaugcgugaacuucaacuucaacggccugaccggcaccggcgugcugacagagagcaacaagaaguuccugccauuccagcaguuuggccgggauaucgccgauaccacagacgccguuagagauccccagacacuggaaauccuggacaucaccccaugcagcuucggcggagugucugugaucaccccuggcaccaacaccagcaaucagguggcagugcuguaccaggacgugaacuguaccgaagugcccguggccauucacgccgaucagcugacaccuacauggcggguguacuccaccggcagcaauguguuucagaccagagccggcugucugaucggagccgagcacgugaacaauagcuacgagugcgacauccccaucggcgcuggcaucugugccagcuaccagacacagacaaacagccccagacgggcuagaagcguggccagccagagcaucauugccuacacaaugucucugggcgccgagaacagcguggccuacuccaacaacucuaucgcuauccccaccaacuucaccaucagcgugaccaccgagauccugccuguguccaugaccaagaccagcguggacugcaccauguacaucugcggcgauuccaccgagugcuccaaccugcugcugcaguacggcagcuucugcacccagcugaauagagcccugacagggaucgccguggaacaggacaagaacacccaagagguguucgcccaagugaagcaaaucuacaagaccccuccuaucaaggacuucggcggcuucaauuucagccagauucugcccgauccuagcaagcccagcaagcggagcuucaucgaggaccugcuguucaacaaagugacacuggccgacgccggcuucaucaagcaguauggcgauugucugggcgacauugccgccagggaucugauuugcgcccagaaguuuaacggacugacagugcugccuccucugcugaccgaugagaugaucgcccaguacacaucugcccugcuggccggcacaaucacaagcggcuggacauuuggagcuggcgccgcucugcagauccccuuugcuaugcagauggccuaccgguucaacggcaucggagugacccagaaugugcuguacgagaaccagaagcugaucgccaaccaguucaacagcgccaucggcaagauccaggacagccugagcagcacagcaagcgcccugggaaagcugcaggacguggucaaccagaaugcccaggcacugaacacccuggucaagugccuguccuccaacuucggcgccaucagcucugugcugaacgauauccugagcagacuggacaaggucgaggccgaggugcagaucgacagacugaucacaggcagacugcagugucuccagacauacgugacccagcagcugaucagagccgccgagauuagagccucugccaaucuggccgccaccaagaugucugagugugugcugggccagagcaagagaguggacuuuugcggcaagggcuaccaccugaugagcuucccucagucugccccucacggcgugguguuucugcacgugacauaugugcccgcucaagagaagaauuucaccaccgcuccagccaucugccacgacggcaaagcccacuuuccuagagaaggcguguucguguccaacggcacccauugguucgugacacagcggaacuucuacgagccccagaucaucaccaccgacaacaccuucgugucuggcaacugcgacguugugaucggcauugugaacaauaccguguacgacccucugcagcccgagcuggacagcuucaaagaggaacuggacaaguacuuuaagaaccacacaagccccgacguggaccugggcgauaucagcggaaucaaugccagcgucgugaacauccagaaagagaucgaccggcugaacgagguggccaagaaucugaacgagagccugaucgaccugcaagaacuggggaaguacgagcaguacaucaagggcggaggaucuggcggaggacagaucuacgagggcaagcugacagccgagggccugagauuuggaaucguggccagccgguucaaucacgcccugguggauagacugguggaaggcgccaucgaugccauugucagacacggcggcagagaagaggacaucacccucguuagagugcccggcucuugggagauuccuguggcugcuggcgagcuggcccggaaagaagauaucgacgccguuaucgccaucggcgugcugaucagaggcgccacaccucacuucgacuauaucgccagcgagguguccaaaggccuggccgaucugagccuggaacugagaaagcccaucaccuucggcgugaucaccgcugacacacuggaacaggccauugagagagccggcaccaagcacggcaacaaaggaugggaagccgcucuguccgccaucgagauggccaaccuguucaagagccugcgguga

SEQ ID NO: 12095 - RNA, 4116 nt, Artificial Sequence
  SARS-CoV-2/Wuhan/WIV05/2019__EPI_ISL_402128 spike protein CDS gc mod (1-1211)(F970C_G999C) LumSynth construct
auguucguguuucuggugcugcugccccugguguccagccagugugugaaccugaccaccagaacacagcugccuccagccuacaccaacagcuucaccagaggcguguacuaccccgacaagguguucagauccagcgugcugcacucuacccaggaccuguuccugccuuucuucagcaacgugaccugguuccacgccauccacguguccggcaccaauggcaccaagagauucgacaaccccgugcugcccuucaacgacgggguguacuuugccagcaccgagaaguccaacaucaucagaggcuggaucuucggcaccacacuggacagcaagacccagagccugcugaucgugaacaacgccaccaacguggucaucaaagugugcgaguuccaguucugcaacgaccccuuccugggcgucuacuaccacaagaacaacaagagcuggauggaaagcgaguuccggguguacagcagcgccaacaacugcaccuucgaguacgugucccagccuuuccugauggaccuggaaggcaagcagggcaacuucaagaaccugcgcgaguucguguucaagaacaucgacggcuacuucaaaaucuacagcaagcacaccccuaucaaccucgugcgggaucugccucagggcuucucugcucuggaaccccugguggaucugcccaucggcaucaacaucacccgguuucagacacugcuggcccugcacagaagcuaccugacaccuggcgauagcagcagcggauggacagcuggugccgccgcuuacuaugugggcuaccugcagccuagaaccuuccugcugaaguacaacgagaacggcaccaucaccgacgccguggauugugcucuggauccucugagcgagacaaagugcacccugaaguccuucaccguggaaaagggcaucuaccagaccagcaacuuccgggugcagcccaccgaauccaucgugcgguuccccaauaucaccaaucugugccccuucggcgagguguucaaugccaccagauucgccucuguguacgccuggaaccggaagcggaucagcaauugcguggccgacuacuccgugcuguacaacuccgccagcuucagcaccuucaagugcuacggcguguccccuaccaagcugaacgaccugugcuucacaaacguguacgccgacagcuucgugauccggggagaugaagugcggcagauugccccuggacagacaggcaagaucgccgacuacaacuacaagcugcccgacgacuucaccggcugugugauugccuggaacagcaacaaccuggacuccaaagucggcggcaacuacaauuaccuguaccggcuguuccggaaguccaaucugaagcccuucgagcgggacaucagcaccgaaaucuaucaggccggcagcaccccuugcaacggcguggaaggcuucaacugcuacuucccacugcaguccuacggcuuucagcccacaaauggcgugggcuaucagcccuacagagugguggugcugagcuucgaacugcugcaugcuccugccacagugugcggcccuaagaaaagcaccaaucucgugaagaacaaaugcgugaacuucaacuucaacggccugaccggcaccggcgugcugacagagagcaacaagaaguuccugccauuccagcaguuuggccgggauaucgccgauaccacagacgccguuagagauccccagacacuggaaauccuggacaucaccccaugcagcuucggcggagugucugugaucaccccuggcaccaacaccagcaaucagguggcagugcuguaccaggacgugaacuguaccgaagugcccguggccauucacgccgaucagcugacaccuacauggcggguguacuccaccggcagcaauguguuucagaccagagccggcugucugaucggagccgagcacgugaacaauagcuacgagugcgacauccccaucggcgcuggcaucugugccagcuaccagacacagacaaacagccccagacgggcuagaagcguggccagccagagcaucauugccuacacaaugucucugggcgccgagaacagcguggccuacuccaacaacucuaucgcuauccccaccaacuucaccaucagcgugaccaccgagauccugccuguguccaugaccaagaccagcguggacugcaccauguacaucugcggcgauuccaccgagugcuccaaccugcugcugcaguacggcagcuucugcacccagcugaauagagcccugacagggaucgccguggaacaggacaagaacacccaagagguguucgcccaagugaagcaaaucuacaagaccccuccuaucaaggacuucggcggcuucaauuucagccagauucugcccgauccuagcaagcccagcaagcggagcuucaucgaggaccugcuguucaacaaagugacacuggccgacgccggcuucaucaagcaguauggcgauugucugggcgacauugccgccagggaucugauuugcgcccagaaguuuaacggacugacagugcugccuccucugcugaccgaugagaugaucgcccaguacacaucugcccugcuggccggcacaaucacaagcggcuggacauuuggagcuggcgccgcucugcagauccccuuugcuaugcagauggccuaccgguucaacggcaucggagugacccagaaugugcuguacgagaaccagaagcugaucgccaaccaguucaacagcgccaucggcaagauccaggacagccugagcagcacagcaagcgcccugggaaagcugcaggacguggucaaccagaaugcccaggcacugaacacccuggucaagcagcuguccuccaacugcggcgccaucagcucugugcugaacgauauccugagcagacuggacaaggucgaggccgaggugcagaucgacagacugaucacauguagacugcagagccuccagacauacgugacccagcagcugaucagagccgccgagauuagagccucugccaaucuggccgccaccaagaugucugagugugugcugggccagagcaagagaguggacuuuugcggcaagggcuaccaccugaugagcuucccucagucugccccucacggcgugguguuucugcacgugacauaugugcccgcucaagagaagaauuucaccaccgcuccagccaucugccacgacggcaaagcccacuuuccuagagaaggcguguucguguccaacggcacccauugguucgugacacagcggaacuucuacgagccccagaucaucaccaccgacaacaccuucgugucuggcaacugcgacguugugaucggcauugugaacaauaccguguacgacccucugcagcccgagcuggacagcuucaaagaggaacuggacaaguacuuuaagaaccacacaagccccgacguggaccugggcgauaucagcggaaucaaugccagcgucgugaacauccagaaagagaucgaccggcugaacgagguggccaagaaucugaacgagagccugaucgaccugcaagaacuggggaaguacgagcaguacaucaagggcggaggaucuggcggaggacagaucuacgagggcaagcugacagccgagggccugagauuuggaaucguggccagccgguucaaucacgcccugguggauagacugguggaaggcgccaucgaugccauugucagacacggcggcagagaagaggacaucacccucguuagagugcccggcucuugggagauuccuguggcugcuggcgagcuggcccggaaagaagauaucgacgccguuaucgccaucggcgugcugaucagaggcgccacaccucacuucgacuauaucgccagcgagguguccaaaggccuggccgaucugagccuggaacugagaaagcccaucaccuucggcgugaucaccgcugacacacuggaacaggccauugagagagccggcaccaagcacggcaacaaaggaugggaagccgcucuguccgccaucgagauggccaaccuguucaagagccugcgguga

SEQ ID NO: 12096 - RNA, 4116 nt, Artificial Sequence
  SARS-CoV-2/Wuhan/WIV05/2019__EPI_ISL_402128 spike protein CDS gc mod (1-1211)(A972C_R995C) LumSynth construct
auguucguguuucuggugcugcugccccugguguccagccagugugugaaccugaccaccagaacacagcugccuccagccuacaccaacagcuucaccagaggcguguacuaccccgacaagguguucagauccagcgugcugcacucuacccaggaccuguuccugccuuucuucagcaacgugaccugguuccacgccauccacguguccggcaccaauggcaccaagagauucgacaaccccgugcugcccuucaacgacgggguguacuuugccagcaccgagaaguccaacaucaucagaggcuggaucuucggcaccacacuggacagcaagacccagagccugcugaucgugaacaacgccaccaacguggucaucaaagugugcgaguuccaguucugcaacgaccccuuccugggcgucuacuaccacaagaacaacaagagcuggauggaaagcgaguuccggguguacagcagcgccaacaacugcaccuucgaguacgugucccagccuuuccugauggaccuggaaggcaagcagggcaacuucaagaaccugcgcgaguucguguucaagaacaucgacggcuacuucaaaaucuacagcaagcacaccccuaucaaccucgugcgggaucugccucagggcuucucugcucuggaaccccugguggaucugcccaucggcaucaacaucacccgguuucagacacugcuggcccugcacagaagcuaccugacaccuggcgauagcagcagcggauggacagcuggugccgccgcuuacuaugugggcuaccugcagccuagaaccuuccugcugaaguacaacgagaacggcaccaucaccgacgccguggauugugcucuggauccucugagcgagacaaagugcacccugaaguccuucaccguggaaaagggcaucuaccagaccagcaacuuccgggugcagcccaccgaauccaucgugcgguuccccaauaucaccaaucugugccccuucggcgagguguucaaugccaccagauucgccucuguguacgccuggaaccggaagcggaucagcaauugcguggccgacuacuccgugcuguacaacuccgccagcuucagcaccuucaagugcuacggcguguccccuaccaagcugaacgaccugugcuucacaaacguguacgccgacagcuucgugauccggggagaugaagugcggcagauugccccuggacagacaggcaagaucgccgacuacaacuacaagcugcccgacgacuucaccggcugugugauugccuggaacagcaacaaccuggacuccaaagucggcggcaacuacaauuaccuguaccggcuguuccggaaguccaaucugaagcccuucgagcgggacaucagcaccgaaaucuaucaggccggcagcaccccuugcaacggcguggaaggcuucaacugcuacuucccacugcaguccuacggcuuucagcccacaaauggcgugggcuaucagcccuacagagugguggugcugagcuucgaacugcugcaugcuccugccacagugugcggcccuaagaaaagcaccaaucucgugaagaacaaaugcgugaacuucaacuucaacggccugaccggcaccggcgugcugacagagagcaacaagaaguuccugccauuccagcaguuuggccgggauaucgccgauaccacagacgccguuagagauccccagacacuggaaauccuggacaucaccccaugcagcuucggcggagugucugugaucaccccuggcaccaacaccagcaaucagguggcagugcuguaccaggacgugaacuguaccgaagugcccguggccauucacgccgaucagcugacaccuacauggcggguguacuccaccggcagcaauguguuucagaccagagccggcugucugaucggagccgagcacgugaacaauagcuacgagugcgacauccccaucggcgcuggcaucugugccagcuaccagacacagacaaacagccccagacgggcuagaagcguggccagccagagcaucauugccuacacaaugucucugggcgccgagaacagcguggccuacuccaacaacucuaucgcuauccccaccaacuucaccaucagcgugaccaccgagauccugccuguguccaugaccaagaccagcguggacugcaccauguacaucugcggcgauuccaccgagugcuccaaccugcugcugcaguacggcagcuucugcacccagcugaauagagcccugacagggaucgccguggaacaggacaagaacacccaagagguguucgcccaagugaagcaaaucuacaagaccccuccuaucaaggacuucggcggcuucaauuucagccagauucugcccgauccuagcaagcccagcaagcggagcuucaucgaggaccugcuguucaacaaagugacacuggccgacgccggcuucaucaagcaguauggcgauugucugggcgacauugccgccagggaucugauuugcgcccagaaguuuaacggacugacagugcugccuccucugcugaccgaugagaugaucgcccaguacacaucugcccugcuggccggcacaaucacaagcggcuggacauuuggagcuggcgccgcucugcagauccccuuugcuaugcagauggccuaccgguucaacggcaucggagugacccagaaugugcuguacgagaaccagaagcugaucgccaaccaguucaacagcgccaucggcaagauccaggacagccugagcagcacagcaagcgcccugggaaagcugcaggacguggucaaccagaaugcccaggcacugaacacccuggucaagcagcuguccuccaacuucggcugcaucagcucugugcugaacgauauccugagcagacuggacaaggucgaggccgaggugcagaucgacugucugaucacaggcagacugcagagccuccagacauacgugacccagcagcugaucagagccgccgagauuagagccucugccaaucuggccgccaccaagaugucugagugugugcugggccagagcaagagaguggacuuuugcggcaagggcuaccaccugaugagcuucccucagucugccccucacggcgugguguuucugcacgugacauaugugcccgcucaagagaagaauuucaccaccgcuccagccaucugccacgacggcaaagcccacuuuccuagagaaggcguguucguguccaacggcacccauugguucgugacacagcggaacuucuacgagccccagaucaucaccaccgacaacaccuucgugucuggcaacugcgacguugugaucggcauugugaacaauaccguguacgacccucugcagcccgagcuggacagcuucaaagaggaacuggacaaguacuuuaagaaccacacaagccccgacguggaccugggcgauaucagcggaaucaaugccagcgucgugaacauccagaaagagaucgaccggcugaacgagguggccaagaaucugaacgagagccugaucgaccugcaagaacuggggaaguacgagcaguacaucaagggcggaggaucuggcggaggacagaucuacgagggcaagcugacagccgagggccugagauuuggaaucguggccagccgguucaaucacgcccugguggauagacugguggaaggcgccaucgaugccauugucagacacggcggcagagaagaggacaucacccucguuagagugcccggcucuugggagauuccuguggcugcuggcgagcuggcccggaaagaagauaucgacgccguuaucgccaucggcgugcugaucagaggcgccacaccucacuucgacuauaucgccagcgagguguccaaaggccuggccgaucugagccuggaacugagaaagcccaucaccuucggcgugaucaccgcugacacacuggaacaggccauugagagagccggcaccaagcacggcaacaaaggaugggaagccgcucuguccgccaucgagauggccaaccuguucaagagccugcgguga

SEQ ID NO: 12097 - RNA, 4116 nt, Artificial Sequence
  SARS-CoV-2/Wuhan/WIV05/2019__EPI_ISL_402128 spike protein CDS gc mod (1-1211)(A890C_V1040C) LumSynth construct
auguucguguuucuggugcugcugccccugguguccagccagugugugaaccugaccaccagaacacagcugccuccagccuacaccaacagcuucaccagaggcguguacuaccccgacaagguguucagauccagcgugcugcacucuacccaggaccuguuccugccuuucuucagcaacgugaccugguuccacgccauccacguguccggcaccaauggcaccaagagauucgacaaccccgugcugcccuucaacgacgggguguacuuugccagcaccgagaaguccaacaucaucagaggcuggaucuucggcaccacacuggacagcaagacccagagccugcugaucgugaacaacgccaccaacguggucaucaaagugugcgaguuccaguucugcaacgaccccuuccugggcgucuacuaccacaagaacaacaagagcuggauggaaagcgaguuccggguguacagcagcgccaacaacugcaccuucgaguacgugucccagccuuuccugauggaccuggaaggcaagcagggcaacuucaagaaccugcgcgaguucguguucaagaacaucgacggcuacuucaaaaucuacagcaagcacaccccuaucaaccucgugcgggaucugccucagggcuucucugcucuggaaccccugguggaucugcccaucggcaucaacaucacccgguuucagacacugcuggcccugcacagaagcuaccugacaccuggcgauagcagcagcggauggacagcuggugccgccgcuuacuaugugggcuaccugcagccuagaaccuuccugcugaaguacaacgagaacggcaccaucaccgacgccguggauugugcucuggauccucugagcgagacaaagugcacccugaaguccuucaccguggaaaagggcaucuaccagaccagcaacuuccgggugcagcccaccgaauccaucgugcgguuccccaauaucaccaaucugugccccuucggcgagguguucaaugccaccagauucgccucuguguacgccuggaaccggaagcggaucagcaauugcguggccgacuacuccgugcuguacaacuccgccagcuucagcaccuucaagugcuacggcguguccccuaccaagcugaacgaccugugcuucacaaacguguacgccgacagcuucgugauccggggagaugaagugcggcagauugccccuggacagacaggcaagaucgccgacuacaacuacaagcugcccgacgacuucaccggcugugugauugccuggaacagcaacaaccuggacuccaaagucggcggcaacuacaauuaccuguaccggcuguuccggaaguccaaucugaagcccuucgagcgggacaucagcaccgaaaucuaucaggccggcagcaccccuugcaacggcguggaaggcuucaacugcuacuucccacugcaguccuacggcuuucagcccacaaauggcgugggcuaucagcccuacagagugguggugcugagcuucgaacugcugcaugcuccugccacagugugcggcccuaagaaaagcaccaaucucgugaagaacaaaugcgugaacuucaacuucaacggccugaccggcaccggcgugcugacagagagcaacaagaaguuccugccauuccagcaguuuggccgggauaucgccgauaccacagacgccguuagagauccccagacacuggaaauccuggacaucaccccaugcagcuucggcggagugucugugaucaccccuggcaccaacaccagcaaucagguggcagugcuguaccaggacgugaacuguaccgaagugcccguggccauucacgccgaucagcugacaccuacauggcggguguacuccaccggcagcaauguguuucagaccagagccggcugucugaucggagccgagcacgugaacaauagcuacgagugcgacauccccaucggcgcuggcaucugugccagcuaccagacacagacaaacagccccagacgggcuagaagcguggccagccagagcaucauugccuacacaaugucucugggcgccgagaacagcguggccuacuccaacaacucuaucgcuauccccaccaacuucaccaucagcgugaccaccgagauccugccuguguccaugaccaagaccagcguggacugcaccauguacaucugcggcgauuccaccgagugcuccaaccugcugcugcaguacggcagcuucugcacccagcugaauagagcccugacagggaucgccguggaacaggacaagaacacccaagagguguucgcccaagugaagcaaaucuacaagaccccuccuaucaaggacuucggcggcuucaauuucagccagauucugcccgauccuagcaagcccagcaagcggagcuucaucgaggaccugcuguucaacaaagugacacuggccgacgccggcuucaucaagcaguauggcgauugucugggcgacauugccgccagggaucugauuugcgcccagaaguuuaacggacugacagugcugccuccucugcugaccgaugagaugaucgcccaguacacaucugcccugcuggccggcacaaucacaagcggcuggacauuuggaugcggcgccgcucugcagauccccuuugcuaugcagauggccuaccgguucaacggcaucggagugacccagaaugugcuguacgagaaccagaagcugaucgccaaccaguucaacagcgccaucggcaagauccaggacagccugagcagcacagcaagcgcccugggaaagcugcaggacguggucaaccagaaugcccaggcacugaacacccuggucaagcagcuguccuccaacuucggcgccaucagcucugugcugaacgauauccugagcagacuggacaaggucgaggccgaggugcagaucgacagacugaucacaggcagacugcagagccuccagacauacgugacccagcagcugaucagagccgccgagauuagagccucugccaaucuggccgccaccaagaugucugagugugugcugggccagagcaagagaugugacuuuugcggcaagggcuaccaccugaugagcuucccucagucugccccucacggcgugguguuucugcacgugacauaugugcccgcucaagagaagaauuucaccaccgcuccagccaucugccacgacggcaaagcccacuuuccuagagaaggcguguucguguccaacggcacccauugguucgugacacagcggaacuucuacgagccccagaucaucaccaccgacaacaccuucgugucuggcaacugcgacguugugaucggcauugugaacaauaccguguacgacccucugcagcccgagcuggacagcuucaaagaggaacuggacaaguacuuuaagaaccacacaagccccgacguggaccugggcgauaucagcggaaucaaugccagcgucgugaacauccagaaagagaucgaccggcugaacgagguggccaagaaucugaacgagagccugaucgaccugcaagaacuggggaaguacgagcaguacaucaagggcggaggaucuggcggaggacagaucuacgagggcaagcugacagccgagggccugagauuuggaaucguggccagccgguucaaucacgcccugguggauagacugguggaaggcgccaucgaugccauugucagacacggcggcagagaagaggacaucacccucguuagagugcccggcucuugggagauuccuguggcugcuggcgagcuggcccggaaagaagauaucgacgccguuaucgccaucggcgugcugaucagaggcgccacaccucacuucgacuauaucgccagcgagguguccaaaggccuggccgaucugagccuggaacugagaaagcccaucaccuucggcgugaucaccgcugacacacuggaacaggccauugagagagccggcaccaagcacggcaacaaaggaugggaagccgcucuguccgccaucgagauggccaaccuguucaagagccugcgguga

SEQ ID NO: 12098 - RNA, 4116 nt, Artificial Sequence
  SARS-CoV-2/Wuhan/WIV05/2019__EPI_ISL_402128 spike protein CDS gc mod (1-1211)(T874C_S1055C) LumSynth construct
auguucguguuucuggugcugcugccccugguguccagccagugugugaaccugaccaccagaacacagcugccuccagccuacaccaacagcuucaccagaggcguguacuaccccgacaagguguucagauccagcgugcugcacucuacccaggaccuguuccugccuuucuucagcaacgugaccugguuccacgccauccacguguccggcaccaauggcaccaagagauucgacaaccccgugcugcccuucaacgacgggguguacuuugccagcaccgagaaguccaacaucaucagaggcuggaucuucggcaccacacuggacagcaagacccagagccugcugaucgugaacaacgccaccaacguggucaucaaagugugcgaguuccaguucugcaacgaccccuuccugggcgucuacuaccacaagaacaacaagagcuggauggaaagcgaguuccggguguacagcagcgccaacaacugcaccuucgaguacgugucccagccuuuccugauggaccuggaaggcaagcagggcaacuucaagaaccugcgcgaguucguguucaagaacaucgacggcuacuucaaaaucuacagcaagcacaccccuaucaaccucgugcgggaucugccucagggcuucucugcucuggaaccccugguggaucugcccaucggcaucaacaucacccgguuucagacacugcuggcccugcacagaagcuaccugacaccuggcgauagcagcagcggauggacagcuggugccgccgcuuacuaugugggcuaccugcagccuagaaccuuccugcugaaguacaacgagaacggcaccaucaccgacgccguggauugugcucuggauccucugagcgagacaaagugcacccugaaguccuucaccguggaaaagggcaucuaccagaccagcaacuuccgggugcagcccaccgaauccaucgugcgguuccccaauaucaccaaucugugccccuucggcgagguguucaaugccaccagauucgccucuguguacgccuggaaccggaagcggaucagcaauugcguggccgacuacuccgugcuguacaacuccgccagcuucagcaccuucaagugcuacggcguguccccuaccaagcugaacgaccugugcuucacaaacguguacgccgacagcuucgugauccggggagaugaagugcggcagauugccccuggacagacaggcaagaucgccgacuacaacuacaagcugcccgacgacuucaccggcugugugauugccuggaacagcaacaaccuggacuccaaagucggcggcaacuacaauuaccuguaccggcuguuccggaaguccaaucugaagcccuucgagcgggacaucagcaccgaaaucuaucaggccggcagcaccccuugcaacggcguggaaggcuucaacugcuacuucccacugcaguccuacggcuuucagcccacaaauggcgugggcuaucagcccuacagagugguggugcugagcuucgaacugcugcaugcuccugccacagugugcggcccuaagaaaagcaccaaucucgugaagaacaaaugcgugaacuucaacuucaacggccugaccggcaccggcgugcugacagagagcaacaagaaguuccugccauuccagcaguuuggccgggauaucgccgauaccacagacgccguuagagauccccagacacuggaaauccuggacaucaccccaugcagcuucggcggagugucugugaucaccccuggcaccaacaccagcaaucagguggcagugcuguaccaggacgugaacuguaccgaagugcccguggccauucacgccgaucagcugacaccuacauggcggguguacuccaccggcagcaauguguuucagaccagagccggcugucugaucggagccgagcacgugaacaauagcuacgagugcgacauccccaucggcgcuggcaucugugccagcuaccagacacagacaaacagccccagacgggcuagaagcguggccagccagagcaucauugccuacacaaugucucugggcgccgagaacagcguggccuacuccaacaacucuaucgcuauccccaccaacuucaccaucagcgugaccaccgagauccugccuguguccaugaccaagaccagcguggacugcaccauguacaucugcggcgauuccaccgagugcuccaaccugcugcugcaguacggcagcuucugcacccagcugaauagagcccugacagggaucgccguggaacaggacaagaacacccaagagguguucgcccaagugaagcaaaucuacaagaccccuccuaucaaggacuucggcggcuucaauuucagccagauucugcccgauccuagcaagcccagcaagcggagcuucaucgaggaccugcuguucaacaaagugacacuggccgacgccggcuucaucaagcaguauggcgauugucugggcgacauugccgccagggaucugauuugcgcccagaaguuuaacggacugacagugcugccuccucugcugaccgaugagaugaucgcccaguacugcucugcccugcuggccggcacaaucacaagcggcuggacauuuggagcuggcgccgcucugcagauccccuuugcuaugcagauggccuaccgguucaacggcaucggagugacccagaaugugcuguacgagaaccagaagcugaucgccaaccaguucaacagcgccaucggcaagauccaggacagccugagcagcacagcaagcgcccugggaaagcugcaggacguggucaaccagaaugcccaggcacugaacacccuggucaagcagcuguccuccaacuucggcgccaucagcucugugcugaacgauauccugagcagacuggacaaggucgaggccgaggugcagaucgacagacugaucacaggcagacugcagagccuccagacauacgugacccagcagcugaucagagccgccgagauuagagccucugccaaucuggccgccaccaagaugucugagugugugcugggccagagcaagagaguggacuuuugcggcaagggcuaccaccugaugagcuucccucagugcgccccucacggcgugguguuucugcacgugacauaugugcccgcucaagagaagaauuucaccaccgcuccagccaucugccacgacggcaaagcccacuuuccuagagaaggcguguucguguccaacggcacccauugguucgugacacagcggaacuucuacgagccccagaucaucaccaccgacaacaccuucgugucuggcaacugcgacguugugaucggcauugugaacaauaccguguacgacccucugcagcccgagcuggacagcuucaaagaggaacuggacaaguacuuuaagaaccacacaagccccgacguggaccugggcgauaucagcggaaucaaugccagcgucgugaacauccagaaagagaucgaccggcugaacgagguggccaagaaucugaacgagagccugaucgaccugcaagaacuggggaaguacgagcaguacaucaagggcggaggaucuggcggaggacagaucuacgagggcaagcugacagccgagggccugagauuuggaaucguggccagccgguucaaucacgcccugguggauagacugguggaaggcgccaucgaugccauugucagacacggcggcagagaagaggacaucacccucguuagagugcccggcucuugggagauuccuguggcugcuggcgagcuggcccggaaagaagauaucgacgccguuaucgccaucggcgugcugaucagaggcgccacaccucacuucgacuauaucgccagcgagguguccaaaggccuggccgaucugagccuggaacugagaaagcccaucaccuucggcgugaucaccgcugacacacuggaacaggccauugagagagccggcaccaagcacggcaacaaaggaugggaagccgcucuguccgccaucgagauggccaaccuguucaagagccugcgguga

SEQ ID NO: 12099 - RNA, 4140 nt, Artificial Sequence
  SARS-CoV-2/Wuhan/WIV05/2019__EPI_ISL_402128 spike protein CDS gc mod (1-1211) Ferritin construct
auguucguguuucuggugcugcugccccugguguccagccagugugugaaccugaccaccagaacacagcugccuccagccuacaccaacagcuucaccagaggcguguacuaccccgacaagguguucagauccagcgugcugcacucuacccaggaccuguuccugccuuucuucagcaacgugaccugguuccacgccauccacguguccggcaccaauggcaccaagagauucgacaaccccgugcugcccuucaacgacgggguguacuuugccagcaccgagaaguccaacaucaucagaggcuggaucuucggcaccacacuggacagcaagacccagagccugcugaucgugaacaacgccaccaacguggucaucaaagugugcgaguuccaguucugcaacgaccccuuccugggcgucuacuaccacaagaacaacaagagcuggauggaaagcgaguuccggguguacagcagcgccaacaacugcaccuucgaguacgugucccagccuuuccugauggaccuggaaggcaagcagggcaacuucaagaaccugcgcgaguucguguucaagaacaucgacggcuacuucaaaaucuacagcaagcacaccccuaucaaccucgugcgggaucugccucagggcuucucugcucuggaaccccugguggaucugcccaucggcaucaacaucacccgguuucagacacugcuggcccugcacagaagcuaccugacaccuggcgauagcagcagcggauggacagcuggugccgccgcuuacuaugugggcuaccugcagccuagaaccuuccugcugaaguacaacgagaacggcaccaucaccgacgccguggauugugcucuggauccucugagcgagacaaagugcacccugaaguccuucaccguggaaaagggcaucuaccagaccagcaacuuccgggugcagcccaccgaauccaucgugcgguuccccaauaucaccaaucugugccccuucggcgagguguucaaugccaccagauucgccucuguguacgccuggaaccggaagcggaucagcaauugcguggccgacuacuccgugcuguacaacuccgccagcuucagcaccuucaagugcuacggcguguccccuaccaagcugaacgaccugugcuucacaaacguguacgccgacagcuucgugauccggggagaugaagugcggcagauugccccuggacagacaggcaagaucgccgacuacaacuacaagcugcccgacgacuucaccggcugugugauugccuggaacagcaacaaccuggacuccaaagucggcggcaacuacaauuaccuguaccggcuguuccggaaguccaaucugaagcccuucgagcgggacaucagcaccgaaaucuaucaggccggcagcaccccuugcaacggcguggaaggcuucaacugcuacuucccacugcaguccuacggcuuucagcccacaaauggcgugggcuaucagcccuacagagugguggugcugagcuucgaacugcugcaugcuccugccacagugugcggcccuaagaaaagcaccaaucucgugaagaacaaaugcgugaacuucaacuucaacggccugaccggcaccggcgugcugacagagagcaacaagaaguuccugccauuccagcaguuuggccgggauaucgccgauaccacagacgccguuagagauccccagacacuggaaauccuggacaucaccccaugcagcuucggcggagugucugugaucaccccuggcaccaacaccagcaaucagguggcagugcuguaccaggacgugaacuguaccgaagugcccguggccauucacgccgaucagcugacaccuacauggcggguguacuccaccggcagcaauguguuucagaccagagccggcugucugaucggagccgagcacgugaacaauagcuacgagugcgacauccccaucggcgcuggcaucugugccagcuaccagacacagacaaacagccccagacgggcuagaagcguggccagccagagcaucauugccuacacaaugucucugggcgccgagaacagcguggccuacuccaacaacucuaucgcuauccccaccaacuucaccaucagcgugaccaccgagauccugccuguguccaugaccaagaccagcguggacugcaccauguacaucugcggcgauuccaccgagugcuccaaccugcugcugcaguacggcagcuucugcacccagcugaauagagcccugacagggaucgccguggaacaggacaagaacacccaagagguguucgcccaagugaagcaaaucuacaagaccccuccuaucaaggacuucggcggcuucaauuucagccagauucugcccgauccuagcaagcccagcaagcggagcuucaucgaggaccugcuguucaacaaagugacacuggccgacgccggcuucaucaagcaguauggcgauugucugggcgacauugccgccagggaucugauuugcgcccagaaguuuaacggacugacagugcugccuccucugcugaccgaugagaugaucgcccaguacacaucugcccugcuggccggcacaaucacaagcggcuggacauuuggagcuggcgccgcucugcagauccccuuugcuaugcagauggccuaccgguucaacggcaucggagugacccagaaugugcuguacgagaaccagaagcugaucgccaaccaguucaacagcgccaucggcaagauccaggacagccugagcagcacagcaagcgcccugggaaagcugcaggacguggucaaccagaaugcccaggcacugaacacccuggucaagcagcuguccuccaacuucggcgccaucagcucugugcugaacgauauccugagcagacuggacaaggucgaggccgaggugcagaucgacagacugaucacaggcagacugcagagccuccagacauacgugacccagcagcugaucagagccgccgagauuagagccucugccaaucuggccgccaccaagaugucugagugugugcugggccagagcaagagaguggacuuuugcggcaagggcuaccaccugaugagcuucccucagucugccccucacggcgugguguuucugcacgugacauaugugcccgcucaagagaagaauuucaccaccgcuccagccaucugccacgacggcaaagcccacuuuccuagagaaggcguguucguguccaacggcacccauugguucgugacacagcggaacuucuacgagccccagaucaucaccaccgacaacaccuucgugucuggcaacugcgacguugugaucggcauugugaacaauaccguguacgacccucugcagcccgagcuggacagcuucaaagaggaacuggacaaguacuuuaagaaccacacaagccccgacguggaccugggcgauaucagcggaaucaaugccagcgucgugaacauccagaaagagaucgaccggcugaacgagguggccaagaaucugaacgagagccugaucgaccugcaagaacuggggaaguacgagcaguacaucaagggaggcggaggaucugacaucaucaagcugcugaacgagcaagugaacaaagagaugcagagcagcaaccuguacaugagcaugagcagcuggugcuacacccacagccuugauggcgccggacuguuccuguuugaucacgccgccgaggaauacgagcacgccaagaagcugaucaucuuccugaacgagaacaacgugcccgugcagcugaccagcauuucugccccugagcacaaguucgagggccugacacagaucuuccagaaggccuacgaacacgagcagcacaucagcgagagcaucaacaacaucguggaccacgccauuaagagcaaggaucacgccaccuucaacuuucugcagugguacguggccgaacagcacgaggaagaggugcuguucaaggacauccuggacaagaucgagcugaucggcaacgagaaccacggccuguaucuggccgaccaguacgugaagggaaucgccaagagcagaaagagcuga

SEQ ID NO: 12100 - RNA, 4140 nt, Artificial Sequence
  SARS-CoV-2/Wuhan/WIV05/2019__EPI_ISL_402128 spike protein CDS gc mod (1-1211)(K986P_V987P) Ferritin construct
auguucguguuucuggugcugcugccccugguguccagccagugugugaaccugaccaccagaacacagcugccuccagccuacaccaacagcuucaccagaggcguguacuaccccgacaagguguucagauccagcgugcugcacucuacccaggaccuguuccugccuuucuucagcaacgugaccugguuccacgccauccacguguccggcaccaauggcaccaagagauucgacaaccccgugcugcccuucaacgacgggguguacuuugccagcaccgagaaguccaacaucaucagaggcuggaucuucggcaccacacuggacagcaagacccagagccugcugaucgugaacaacgccaccaacguggucaucaaagugugcgaguuccaguucugcaacgaccccuuccugggcgucuacuaccacaagaacaacaagagcuggauggaaagcgaguuccggguguacagcagcgccaacaacugcaccuucgaguacgugucccagccuuuccugauggaccuggaaggcaagcagggcaacuucaagaaccugcgcgaguucguguucaagaacaucgacggcuacuucaaaaucuacagcaagcacaccccuaucaaccucgugcgggaucugccucagggcuucucugcucuggaaccccugguggaucugcccaucggcaucaacaucacccgguuucagacacugcuggcccugcacagaagcuaccugacaccuggcgauagcagcagcggauggacagcuggugccgccgcuuacuaugugggcuaccugcagccuagaaccuuccugcugaaguacaacgagaacggcaccaucaccgacgccguggauugugcucuggauccucugagcgagacaaagugcacccugaaguccuucaccguggaaaagggcaucuaccagaccagcaacuuccgggugcagcccaccgaauccaucgugcgguuccccaauaucaccaaucugugccccuucggcgagguguucaaugccaccagauucgccucuguguacgccuggaaccggaagcggaucagcaauugcguggccgacuacuccgugcuguacaacuccgccagcuucagcaccuucaagugcuacggcguguccccuaccaagcugaacgaccugugcuucacaaacguguacgccgacagcuucgugauccggggagaugaagugcggcagauugccccuggacagacaggcaagaucgccgacuacaacuacaagcugcccgacgacuucaccggcugugugauugccuggaacagcaacaaccuggacuccaaagucggcggcaacuacaauuaccuguaccggcuguuccggaaguccaaucugaagcccuucgagcgggacaucagcaccgaaaucuaucaggccggcagcaccccuugcaacggcguggaaggcuucaacugcuacuucccacugcaguccuacggcuuucagcccacaaauggcgugggcuaucagcccuacagagugguggugcugagcuucgaacugcugcaugcuccugccacagugugcggcccuaagaaaagcaccaaucucgugaagaacaaaugcgugaacuucaacuucaacggccugaccggcaccggcgugcugacagagagcaacaagaaguuccugccauuccagcaguuuggccgggauaucgccgauaccacagacgccguuagagauccccagacacuggaaauccuggacaucaccccaugcagcuucggcggagugucugugaucaccccuggcaccaacaccagcaaucagguggcagugcuguaccaggacgugaacuguaccgaagugcccguggccauucacgccgaucagcugacaccuacauggcggguguacuccaccggcagcaauguguuucagaccagagccggcugucugaucggagccgagcacgugaacaauagcuacgagugcgacauccccaucggcgcuggcaucugugccagcuaccagacacagacaaacagccccagacgggcuagaagcguggccagccagagcaucauugccuacacaaugucucugggcgccgagaacagcguggccuacuccaacaacucuaucgcuauccccaccaacuucaccaucagcgugaccaccgagauccugccuguguccaugaccaagaccagcguggacugcaccauguacaucugcggcgauuccaccgagugcuccaaccugcugcugcaguacggcagcuucugcacccagcugaauagagcccugacagggaucgccguggaacaggacaagaacacccaagagguguucgcccaagugaagcaaaucuacaagaccccuccuaucaaggacuucggcggcuucaauuucagccagauucugcccgauccuagcaagcccagcaagcggagcuucaucgaggaccugcuguucaacaaagugacacuggccgacgccggcuucaucaagcaguauggcgauugucugggcgacauugccgccagggaucugauuugcgcccagaaguuuaacggacugacagugcugccuccucugcugaccgaugagaugaucgcccaguacacaucugcccugcuggccggcacaaucacaagcggcuggacauuuggagcuggcgccgcucugcagauccccuuugcuaugcagauggccuaccgguucaacggcaucggagugacccagaaugugcuguacgagaaccagaagcugaucgccaaccaguucaacagcgccaucggcaagauccaggacagccugagcagcacagcaagcgcccugggaaagcugcaggacguggucaaccagaaugcccaggcacugaacacccuggucaagcagcuguccuccaacuucggcgccaucagcucugugcugaacgauauccugagcagacuggacccuccugaggccgaggugcagaucgacagacugaucacaggcagacugcagagccuccagacauacgugacccagcagcugaucagagccgccgagauuagagccucugccaaucuggccgccaccaagaugucugagugugugcugggccagagcaagagaguggacuuuugcggcaagggcuaccaccugaugagcuucccucagucugccccucacggcgugguguuucugcacgugacauaugugcccgcucaagagaagaauuucaccaccgcuccagccaucugccacgacggcaaagcccacuuuccuagagaaggcguguucguguccaacggcacccauugguucgugacacagcggaacuucuacgagccccagaucaucaccaccgacaacaccuucgugucuggcaacugcgacguugugaucggcauugugaacaauaccguguacgacccucugcagcccgagcuggacagcuucaaagaggaacuggacaaguacuuuaagaaccacacaagccccgacguggaccugggcgauaucagcggaaucaaugccagcgucgugaacauccagaaagagaucgaccggcugaacgagguggccaagaaucugaacgagagccugaucgaccugcaagaacuggggaaguacgagcaguacaucaagggaggcggaggaucugacaucaucaagcugcugaacgagcaagugaacaaagagaugcagagcagcaaccuguacaugagcaugagcagcuggugcuacacccacagccuugauggcgccggacuguuccuguuugaucacgccgccgaggaauacgagcacgccaagaagcugaucaucuuccugaacgagaacaacgugcccgugcagcugaccagcauuucugccccugagcacaaguucgagggccugacacagaucuuccagaaggccuacgaacacgagcagcacaucagcgagagcaucaacaacaucguggaccacgccauuaagagcaaggaucacgccaccuucaacuuucugcagugguacguggccgaacagcacgaggaagaggugcuguucaaggacauccuggacaagaucgagcugaucggcaacgagaaccacggccuguaucuggccgaccaguacgugaagggaaucgccaagagcagaaagagcuga

SEQ ID NO: 12101 - RNA, 4140 nt, Artificial Sequence
  SARS-CoV-2/Wuhan/WIV05/2019__EPI_ISL_402128 spike protein CDS gc mod (1-1211)(K986P_V987P_T887WN_A1020W) Ferritin construct
auguucguguuucuggugcugcugccccugguguccagccagugugugaaccugaccaccagaacacagcugccuccagccuacaccaacagcuucaccagaggcguguacuaccccgacaagguguucagauccagcgugcugcacucuacccaggaccuguuccugccuuucuucagcaacgugaccugguuccacgccauccacguguccggcaccaauggcaccaagagauucgacaaccccgugcugcccuucaacgacgggguguacuuugccagcaccgagaaguccaacaucaucagaggcuggaucuucggcaccacacuggacagcaagacccagagccugcugaucgugaacaacgccaccaacguggucaucaaagugugcgaguuccaguucugcaacgaccccuuccugggcgucuacuaccacaagaacaacaagagcuggauggaaagcgaguuccggguguacagcagcgccaacaacugcaccuucgaguacgugucccagccuuuccugauggaccuggaaggcaagcagggcaacuucaagaaccugcgcgaguucguguucaagaacaucgacggcuacuucaaaaucuacagcaagcacaccccuaucaaccucgugcgggaucugccucagggcuucucugcucuggaaccccugguggaucugcccaucggcaucaacaucacccgguuucagacacugcuggcccugcacagaagcuaccugacaccuggcgauagcagcagcggauggacagcuggugccgccgcuuacuaugugggcuaccugcagccuagaaccuuccugcugaaguacaacgagaacggcaccaucaccgacgccguggauugugcucuggauccucugagcgagacaaagugcacccugaaguccuucaccguggaaaagggcaucuaccagaccagcaacuuccgggugcagcccaccgaauccaucgugcgguuccccaauaucaccaaucugugccccuucggcgagguguucaaugccaccagauucgccucuguguacgccuggaaccggaagcggaucagcaauugcguggccgacuacuccgugcuguacaacuccgccagcuucagcaccuucaagugcuacggcguguccccuaccaagcugaacgaccugugcuucacaaacguguacgccgacagcuucgugauccggggagaugaagugcggcagauugccccuggacagacaggcaagaucgccgacuacaacuacaagcugcccgacgacuucaccggcugugugauugccuggaacagcaacaaccuggacuccaaagucggcggcaacuacaauuaccuguaccggcuguuccggaaguccaaucugaagcccuucgagcgggacaucagcaccgaaaucuaucaggccggcagcaccccuugcaacggcguggaaggcuucaacugcuacuucccacugcaguccuacggcuuucagcccacaaauggcgugggcuaucagcccuacagagugguggugcugagcuucgaacugcugcaugcuccugccacagugugcggcccuaagaaaagcaccaaucucgugaagaacaaaugcgugaacuucaacuucaacggccugaccggcaccggcgugcugacagagagcaacaagaaguuccugccauuccagcaguuuggccgggauaucgccgauaccacagacgccguuagagauccccagacacuggaaauccuggacaucaccccaugcagcuucggcggagugucugugaucaccccuggcaccaacaccagcaaucagguggcagugcuguaccaggacgugaacuguaccgaagugcccguggccauucacgccgaucagcugacaccuacauggcggguguacuccaccggcagcaauguguuucagaccagagccggcugucugaucggagccgagcacgugaacaauagcuacgagugcgacauccccaucggcgcuggcaucugugccagcuaccagacacagacaaacagccccagacgggcuagaagcguggccagccagagcaucauugccuacacaaugucucugggcgccgagaacagcguggccuacuccaacaacucuaucgcuauccccaccaacuucaccaucagcgugaccaccgagauccugccuguguccaugaccaagaccagcguggacugcaccauguacaucugcggcgauuccaccgagugcuccaaccugcugcugcaguacggcagcuucugcacccagcugaauagagcccugacagggaucgccguggaacaggacaagaacacccaagagguguucgcccaagugaagcaaaucuacaagaccccuccuaucaaggacuucggcggcuucaauuucagccagauucugcccgauccuagcaagcccagcaagcggagcuucaucgaggaccugcuguucaacaaagugacacuggccgacgccggcuucaucaagcaguauggcgauugucugggcgacauugccgccagggaucugauuugcgcccagaaguuuaacggacugacagugcugccuccucugcugaccgaugagaugaucgcccaguacacaucugcccugcuggccggcacaaucacaagcggcuggugguuuggagcuggcgccgcucugcagauccccuuugcuaugcagauggccuaccgguucaacggcaucggagugacccagaaugugcuguacgagaaccagaagcugaucgccaaccaguucaacagcgccaucggcaagauccaggacagccugagcagcacagcaagcgcccugggaaagcugcaggacguggucaaccagaaugcccaggcacugaacacccuggucaagcagcuguccuccaacuucggcgccaucagcucugugcugaacgauauccugagcagacuggacccuccugaggccgaggugcagaucgacagacugaucacaggcagacugcagagccuccagacauacgugacccagcagcugaucagagccgccgagauuagauggucugccaaucuggccgccaccaagaugucugagugugugcugggccagagcaagagaguggacuuuugcggcaagggcuaccaccugaugagcuucccucagucugccccucacggcgugguguuucugcacgugacauaugugcccgcucaagagaagaauuucaccaccgcuccagccaucugccacgacggcaaagcccacuuuccuagagaaggcguguucguguccaacggcacccauugguucgugacacagcggaacuucuacgagccccagaucaucaccaccgacaacaccuucgugucuggcaacugcgacguugugaucggcauugugaacaauaccguguacgacccucugcagcccgagcuggacagcuucaaagaggaacuggacaaguacuuuaagaaccacacaagccccgacguggaccugggcgauaucagcggaaucaaugccagcgucgugaacauccagaaagagaucgaccggcugaacgagguggccaagaaucugaacgagagccugaucgaccugcaagaacuggggaaguacgagcaguacaucaagggaggcggaggaucugacaucaucaagcugcugaacgagcaagugaacaaagagaugcagagcagcaaccuguacaugagcaugagcagcuggugcuacacccacagccuugauggcgccggacuguuccuguuugaucacgccgccgaggaauacgagcacgccaagaagcugaucaucuuccugaacgagaacaacgugcccgugcagcugaccagcauuucugccccugagcacaaguucgagggccugacacagaucuuccagaaggccuacgaacacgagcagcacaucagcgagagcaucaacaacaucguggaccacgccauuaagagcaaggaucacgccaccuucaacuuucugcagugguacguggccgaacagcacgaggaagaggugcuguucaaggacauccuggacaagaucgagcugaucggcaacgagaaccacggccuguaucuggccgaccaguacgugaagggaaucgccaagagcagaaagagcuga

SEQ ID NO: 12102 - RNA, 4140 nt, Artificial Sequence
  SARS-CoV-2/Wuhan/WIV05/2019__EPI_ISL_402128 spike protein CDS gc mod (1-1211)(K986P_V987P_P1069F) Ferritin construct
auguucguguuucuggugcugcugccccugguguccagccagugugugaaccugaccaccagaacacagcugccuccagccuacaccaacagcuucaccagaggcguguacuaccccgacaagguguucagauccagcgugcugcacucuacccaggaccuguuccugccuuucuucagcaacgugaccugguuccacgccauccacguguccggcaccaauggcaccaagagauucgacaaccccgugcugcccuucaacgacgggguguacuuugccagcaccgagaaguccaacaucaucagaggcuggaucuucggcaccacacuggacagcaagacccagagccugcugaucgugaacaacgccaccaacguggucaucaaagugugcgaguuccaguucugcaacgaccccuuccugggcgucuacuaccacaagaacaacaagagcuggauggaaagcgaguuccggguguacagcagcgccaacaacugcaccuucgaguacgugucccagccuuuccugauggaccuggaaggcaagcagggcaacuucaagaaccugcgcgaguucguguucaagaacaucgacggcuacuucaaaaucuacagcaagcacaccccuaucaaccucgugcgggaucugccucagggcuucucugcucuggaaccccugguggaucugcccaucggcaucaacaucacccgguuucagacacugcuggcccugcacagaagcuaccugacaccuggcgauagcagcagcggauggacagcuggugccgccgcuuacuaugugggcuaccugcagccuagaaccuuccugcugaaguacaacgagaacggcaccaucaccgacgccguggauugugcucuggauccucugagcgagacaaagugcacccugaaguccuucaccguggaaaagggcaucuaccagaccagcaacuuccgggugcagcccaccgaauccaucgugcgguuccccaauaucaccaaucugugccccuucggcgagguguucaaugccaccagauucgccucuguguacgccuggaaccggaagcggaucagcaauugcguggccgacuacuccgugcuguacaacuccgccagcuucagcaccuucaagugcuacggcguguccccuaccaagcugaacgaccugugcuucacaaacguguacgccgacagcuucgugauccggggagaugaagugcggcagauugccccuggacagacaggcaagaucgccgacuacaacuacaagcugcccgacgacuucaccggcugugugauugccuggaacagcaacaaccuggacuccaaagucggcggcaacuacaauuaccuguaccggcuguuccggaaguccaaucugaagcccuucgagcgggacaucagcaccgaaaucuaucaggccggcagcaccccuugcaacggcguggaaggcuucaacugcuacuucccacugcaguccuacggcuuucagcccacaaauggcgugggcuaucagcccuacagagugguggugcugagcuucgaacugcugcaugcuccugccacagugugcggcccuaagaaaagcaccaaucucgugaagaacaaaugcgugaacuucaacuucaacggccugaccggcaccggcgugcugacagagagcaacaagaaguuccugccauuccagcaguuuggccgggauaucgccgauaccacagacgccguuagagauccccagacacuggaaauccuggacaucaccccaugcagcuucggcggagugucugugaucaccccuggcaccaacaccagcaaucagguggcagugcuguaccaggacgugaacuguaccgaagugcccguggccauucacgccgaucagcugacaccuacauggcggguguacuccaccggcagcaauguguuucagaccagagccggcugucugaucggagccgagcacgugaacaauagcuacgagugcgacauccccaucggcgcuggcaucugugccagcuaccagacacagacaaacagccccagacgggcuagaagcguggccagccagagcaucauugccuacacaaugucucugggcgccgagaacagcguggccuacuccaacaacucuaucgcuauccccaccaacuucaccaucagcgugaccaccgagauccugccuguguccaugaccaagaccagcguggacugcaccauguacaucugcggcgauuccaccgagugcuccaaccugcugcugcaguacggcagcuucugcacccagcugaauagagcccugacagggaucgccguggaacaggacaagaacacccaagagguguucgcccaagugaagcaaaucuacaagaccccuccuaucaaggacuucggcggcuucaauuucagccagauucugcccgauccuagcaagcccagcaagcggagcuucaucgaggaccugcuguucaacaaagugacacuggccgacgccggcuucaucaagcaguauggcgauugucugggcgacauugccgccagggaucugauuugcgcccagaaguuuaacggacugacagugcugccuccucugcugaccgaugagaugaucgcccaguacacaucugcccugcuggccggcacaaucacaagcggcuggacauuuggagcuggcgccgcucugcagauccccuuugcuaugcagauggccuaccgguucaacggcaucggagugacccagaaugugcuguacgagaaccagaagcugaucgccaaccaguucaacagcgccaucggcaagauccaggacagccugagcagcacagcaagcgcccugggaaagcugcaggacguggucaaccagaaugcccaggcacugaacacccuggucaagcagcuguccuccaacuucggcgccaucagcucugugcugaacgauauccugagcagacuggacccuccugaggccgaggugcagaucgacagacugaucacaggcagacugcagagccuccagacauacgugacccagcagcugaucagagccgccgagauuagagccucugccaaucuggccgccaccaagaugucugagugugugcugggccagagcaagagaguggacuuuugcggcaagggcuaccaccugaugagcuucccucagucugccccucacggcgugguguuucugcacgugacauauguguucgcucaagagaagaauuucaccaccgcuccagccaucugccacgacggcaaagcccacuuuccuagagaaggcguguucguguccaacggcacccauugguucgugacacagcggaacuucuacgagccccagaucaucaccaccgacaacaccuucgugucuggcaacugcgacguugugaucggcauugugaacaauaccguguacgacccucugcagcccgagcuggacagcuucaaagaggaacuggacaaguacuuuaagaaccacacaagccccgacguggaccugggcgauaucagcggaaucaaugccagcgucgugaacauccagaaagagaucgaccggcugaacgagguggccaagaaucugaacgagagccugaucgaccugcaagaacuggggaaguacgagcaguacaucaagggaggcggaggaucugacaucaucaagcugcugaacgagcaagugaacaaagagaugcagagcagcaaccuguacaugagcaugagcagcuggugcuacacccacagccuugauggcgccggacuguuccuguuugaucacgccgccgaggaauacgagcacgccaagaagcugaucaucuuccugaacgagaacaacgugcccgugcagcugaccagcauuucugccccugagcacaaguucgagggccugacacagaucuuccagaaggccuacgaacacgagcagcacaucagcgagagcaucaacaacaucguggaccacgccauuaagagcaaggaucacgccaccuucaacuuucugcagugguacguggccgaacagcacgaggaagaggugcuguucaaggacauccuggacaagaucgagcugaucggcaacgagaaccacggccuguaucuggccgaccaguacgugaagggaaucgccaagagcagaaagagcuga

SEQ ID NO: 12103 - RNA, 4140 nt, Artificial Sequence
  SARS-CoV-2/Wuhan/WIV05/2019__EPI_ISL_402128 spike protein CDS gc mod (1-1211)(K986P_V987P_ H1048Q_H1064N_ H1083N_H1101N) Ferritin construct
auguucguguuucuggugcugcugccccugguguccagccagugugugaaccugaccaccagaacacagcugccuccagccuacaccaacagcuucaccagaggcguguacuaccccgacaagguguucagauccagcgugcugcacucuacccaggaccuguuccugccuuucuucagcaacgugaccugguuccacgccauccacguguccggcaccaauggcaccaagagauucgacaaccccgugcugcccuucaacgacgggguguacuuugccagcaccgagaaguccaacaucaucagaggcuggaucuucggcaccacacuggacagcaagacccagagccugcugaucgugaacaacgccaccaacguggucaucaaagugugcgaguuccaguucugcaacgaccccuuccugggcgucuacuaccacaagaacaacaagagcuggauggaaagcgaguuccggguguacagcagcgccaacaacugcaccuucgaguacgugucccagccuuuccugauggaccuggaaggcaagcagggcaacuucaagaaccugcgcgaguucguguucaagaacaucgacggcuacuucaaaaucuacagcaagcacaccccuaucaaccucgugcgggaucugccucagggcuucucugcucuggaaccccugguggaucugcccaucggcaucaacaucacccgguuucagacacugcuggcccugcacagaagcuaccugacaccuggcgauagcagcagcggauggacagcuggugccgccgcuuacuaugugggcuaccugcagccuagaaccuuccugcugaaguacaacgagaacggcaccaucaccgacgccguggauugugcucuggauccucugagcgagacaaagugcacccugaaguccuucaccguggaaaagggcaucuaccagaccagcaacuuccgggugcagcccaccgaauccaucgugcgguuccccaauaucaccaaucugugccccuucggcgagguguucaaugccaccagauucgccucuguguacgccuggaaccggaagcggaucagcaauugcguggccgacuacuccgugcuguacaacuccgccagcuucagcaccuucaagugcuacggcguguccccuaccaagcugaacgaccugugcuucacaaacguguacgccgacagcuucgugauccggggagaugaagugcggcagauugccccuggacagacaggcaagaucgccgacuacaacuacaagcugcccgacgacuucaccggcugugugauugccuggaacagcaacaaccuggacuccaaagucggcggcaacuacaauuaccuguaccggcuguuccggaaguccaaucugaagcccuucgagcgggacaucagcaccgaaaucuaucaggccggcagcaccccuugcaacggcguggaaggcuucaacugcuacuucccacugcaguccuacggcuuucagcccacaaauggcgugggcuaucagcccuacagagugguggugcugagcuucgaacugcugcaugcuccugccacagugugcggcccuaagaaaagcaccaaucucgugaagaacaaaugcgugaacuucaacuucaacggccugaccggcaccggcgugcugacagagagcaacaagaaguuccugccauuccagcaguuuggccgggauaucgccgauaccacagacgccguuagagauccccagacacuggaaauccuggacaucaccccaugcagcuucggcggagugucugugaucaccccuggcaccaacaccagcaaucagguggcagugcuguaccaggacgugaacuguaccgaagugcccguggccauucacgccgaucagcugacaccuacauggcggguguacuccaccggcagcaauguguuucagaccagagccggcugucugaucggagccgagcacgugaacaauagcuacgagugcgacauccccaucggcgcuggcaucugugccagcuaccagacacagacaaacagccccagacgggcuagaagcguggccagccagagcaucauugccuacacaaugucucugggcgccgagaacagcguggccuacuccaacaacucuaucgcuauccccaccaacuucaccaucagcgugaccaccgagauccugccuguguccaugaccaagaccagcguggacugcaccauguacaucugcggcgauuccaccgagugcuccaaccugcugcugcaguacggcagcuucugcacccagcugaauagagcccugacagggaucgccguggaacaggacaagaacacccaagagguguucgcccaagugaagcaaaucuacaagaccccuccuaucaaggacuucggcggcuucaauuucagccagauucugcccgauccuagcaagcccagcaagcggagcuucaucgaggaccugcuguucaacaaagugacacuggccgacgccggcuucaucaagcaguauggcgauugucugggcgacauugccgccagggaucugauuugcgcccagaaguuuaacggacugacagugcugccuccucugcugaccgaugagaugaucgcccaguacacaucugcccugcuggccggcacaaucacaagcggcuggacauuuggagcuggcgccgcucugcagauccccuuugcuaugcagauggccuaccgguucaacggcaucggagugacccagaaugugcuguacgagaaccagaagcugaucgccaaccaguucaacagcgccaucggcaagauccaggacagccugagcagcacagcaagcgcccugggaaagcugcaggacguggucaaccagaaugcccaggcacugaacacccuggucaagcagcuguccuccaacuucggcgccaucagcucugugcugaacgauauccugagcagacuggacccuccugaggccgaggugcagaucgacagacugaucacaggcagacugcagagccuccagacauacgugacccagcagcugaucagagccgccgagauuagagccucugccaaucuggccgccaccaagaugucugagugugugcugggccagagcaagagaguggacuuuugcggcaagggcuaccagcugaugagcuucccucagucugccccucacggcgugguguuucugaacgugacauaugugcccgcucaagagaagaauuucaccaccgcuccagccaucugcaacgacggcaaagcccacuuuccuagagaaggcguguucguguccaacggcaccaacugguucgugacacagcggaacuucuacgagccccagaucaucaccaccgacaacaccuucgugucuggcaacugcgacguugugaucggcauugugaacaauaccguguacgacccucugcagcccgagcuggacagcuucaaagaggaacuggacaaguacuuuaagaaccacacaagccccgacguggaccugggcgauaucagcggaaucaaugccagcgucgugaacauccagaaagagaucgaccggcugaacgagguggccaagaaucugaacgagagccugaucgaccugcaagaacuggggaaguacgagcaguacaucaagggaggcggaggaucugacaucaucaagcugcugaacgagcaagugaacaaagagaugcagagcagcaaccuguacaugagcaugagcagcuggugcuacacccacagccuugauggcgccggacuguuccuguuugaucacgccgccgaggaauacgagcacgccaagaagcugaucaucuuccugaacgagaacaacgugcccgugcagcugaccagcauuucugccccugagcacaaguucgagggccugacacagaucuuccagaaggccuacgaacacgagcagcacaucagcgagagcaucaacaacaucguggaccacgccauuaagagcaaggaucacgccaccuucaacuuucugcagugguacguggccgaacagcacgaggaagaggugcuguucaaggacauccuggacaagaucgagcugaucggcaacgagaaccacggccuguaucuggccgaccaguacgugaagggaaucgccaagagcagaaagagcuga

SEQ ID NO: 12104 - RNA, 4140 nt, Artificial Sequence
  SARS-CoV-2/Wuhan/WIV05/2019__EPI_ISL_402128 spike protein CDS gc mod (1-1211)(I712C_T1077C) Ferritin construct
auguucguguuucuggugcugcugccccugguguccagccagugugugaaccugaccaccagaacacagcugccuccagccuacaccaacagcuucaccagaggcguguacuaccccgacaagguguucagauccagcgugcugcacucuacccaggaccuguuccugccuuucuucagcaacgugaccugguuccacgccauccacguguccggcaccaauggcaccaagagauucgacaaccccgugcugcccuucaacgacgggguguacuuugccagcaccgagaaguccaacaucaucagaggcuggaucuucggcaccacacuggacagcaagacccagagccugcugaucgugaacaacgccaccaacguggucaucaaagugugcgaguuccaguucugcaacgaccccuuccugggcgucuacuaccacaagaacaacaagagcuggauggaaagcgaguuccggguguacagcagcgccaacaacugcaccuucgaguacgugucccagccuuuccugauggaccuggaaggcaagcagggcaacuucaagaaccugcgcgaguucguguucaagaacaucgacggcuacuucaaaaucuacagcaagcacaccccuaucaaccucgugcgggaucugccucagggcuucucugcucuggaaccccugguggaucugcccaucggcaucaacaucacccgguuucagacacugcuggcccugcacagaagcuaccugacaccuggcgauagcagcagcggauggacagcuggugccgccgcuuacuaugugggcuaccugcagccuagaaccuuccugcugaaguacaacgagaacggcaccaucaccgacgccguggauugugcucuggauccucugagcgagacaaagugcacccugaaguccuucaccguggaaaagggcaucuaccagaccagcaacuuccgggugcagcccaccgaauccaucgugcgguuccccaauaucaccaaucugugccccuucggcgagguguucaaugccaccagauucgccucuguguacgccuggaaccggaagcggaucagcaauugcguggccgacuacuccgugcuguacaacuccgccagcuucagcaccuucaagugcuacggcguguccccuaccaagcugaacgaccugugcuucacaaacguguacgccgacagcuucgugauccggggagaugaagugcggcagauugccccuggacagacaggcaagaucgccgacuacaacuacaagcugcccgacgacuucaccggcugugugauugccuggaacagcaacaaccuggacuccaaagucggcggcaacuacaauuaccuguaccggcuguuccggaaguccaaucugaagcccuucgagcgggacaucagcaccgaaaucuaucaggccggcagcaccccuugcaacggcguggaaggcuucaacugcuacuucccacugcaguccuacggcuuucagcccacaaauggcgugggcuaucagcccuacagagugguggugcugagcuucgaacugcugcaugcuccugccacagugugcggcccuaagaaaagcaccaaucucgugaagaacaaaugcgugaacuucaacuucaacggccugaccggcaccggcgugcugacagagagcaacaagaaguuccugccauuccagcaguuuggccgggauaucgccgauaccacagacgccguuagagauccccagacacuggaaauccuggacaucaccccaugcagcuucggcggagugucugugaucaccccuggcaccaacaccagcaaucagguggcagugcuguaccaggacgugaacuguaccgaagugcccguggccauucacgccgaucagcugacaccuacauggcggguguacuccaccggcagcaauguguuucagaccagagccggcugucugaucggagccgagcacgugaacaauagcuacgagugcgacauccccaucggcgcuggcaucugugccagcuaccagacacagacaaacagccccagacgggcuagaagcguggccagccagagcaucauugccuacacaaugucucugggcgccgagaacagcguggccuacuccaacaacucuugcgcuauccccaccaacuucaccaucagcgugaccaccgagauccugccuguguccaugaccaagaccagcguggacugcaccauguacaucugcggcgauuccaccgagugcuccaaccugcugcugcaguacggcagcuucugcacccagcugaauagagcccugacagggaucgccguggaacaggacaagaacacccaagagguguucgcccaagugaagcaaaucuacaagaccccuccuaucaaggacuucggcggcuucaauuucagccagauucugcccgauccuagcaagcccagcaagcggagcuucaucgaggaccugcuguucaacaaagugacacuggccgacgccggcuucaucaagcaguauggcgauugucugggcgacauugccgccagggaucugauuugcgcccagaaguuuaacggacugacagugcugccuccucugcugaccgaugagaugaucgcccaguacacaucugcccugcuggccggcacaaucacaagcggcuggacauuuggagcuggcgccgcucugcagauccccuuugcuaugcagauggccuaccgguucaacggcaucggagugacccagaaugugcuguacgagaaccagaagcugaucgccaaccaguucaacagcgccaucggcaagauccaggacagccugagcagcacagcaagcgcccugggaaagcugcaggacguggucaaccagaaugcccaggcacugaacacccuggucaagcagcuguccuccaacuucggcgccaucagcucugugcugaacgauauccugagcagacuggacaaggucgaggccgaggugcagaucgacagacugaucacaggcagacugcagagccuccagacauacgugacccagcagcugaucagagccgccgagauuagagccucugccaaucuggccgccaccaagaugucugagugugugcugggccagagcaagagaguggacuuuugcggcaagggcuaccaccugaugagcuucccucagucugccccucacggcgugguguuucugcacgugacauaugugcccgcucaagagaagaauuucaccugugcuccagccaucugccacgacggcaaagcccacuuuccuagagaaggcguguucguguccaacggcacccauugguucgugacacagcggaacuucuacgagccccagaucaucaccaccgacaacaccuucgugucuggcaacugcgacguugugaucggcauugugaacaauaccguguacgacccucugcagcccgagcuggacagcuucaaagaggaacuggacaaguacuuuaagaaccacacaagccccgacguggaccugggcgauaucagcggaaucaaugccagcgucgugaacauccagaaagagaucgaccggcugaacgagguggccaagaaucugaacgagagccugaucgaccugcaagaacuggggaaguacgagcaguacaucaagggaggcggaggaucugacaucaucaagcugcugaacgagcaagugaacaaagagaugcagagcagcaaccuguacaugagcaugagcagcuggugcuacacccacagccuugauggcgccggacuguuccuguuugaucacgccgccgaggaauacgagcacgccaagaagcugaucaucuuccugaacgagaacaacgugcccgugcagcugaccagcauuucugccccugagcacaaguucgagggccugacacagaucuuccagaaggccuacgaacacgagcagcacaucagcgagagcaucaacaacaucguggaccacgccauuaagagcaaggaucacgccaccuucaacuuucugcagugguacguggccgaacagcacgaggaagaggugcuguucaaggacauccuggacaagaucgagcugaucggcaacgagaaccacggccuguaucuggccgaccaguacgugaagggaaucgccaagagcagaaagagcuga

SEQ ID NO: 12105 - RNA, 4140 nt, Artificial Sequence
  SARS-CoV-2/Wuhan/WIV05/2019__EPI_ISL_402128 spike protein CDS gc mod (1-1211)(I714C_Y1110C) Ferritin construct
auguucguguuucuggugcugcugccccugguguccagccagugugugaaccugaccaccagaacacagcugccuccagccuacaccaacagcuucaccagaggcguguacuaccccgacaagguguucagauccagcgugcugcacucuacccaggaccuguuccugccuuucuucagcaacgugaccugguuccacgccauccacguguccggcaccaauggcaccaagagauucgacaaccccgugcugcccuucaacgacgggguguacuuugccagcaccgagaaguccaacaucaucagaggcuggaucuucggcaccacacuggacagcaagacccagagccugcugaucgugaacaacgccaccaacguggucaucaaagugugcgaguuccaguucugcaacgaccccuuccugggcgucuacuaccacaagaacaacaagagcuggauggaaagcgaguuccggguguacagcagcgccaacaacugcaccuucgaguacgugucccagccuuuccugauggaccuggaaggcaagcagggcaacuucaagaaccugcgcgaguucguguucaagaacaucgacggcuacuucaaaaucuacagcaagcacaccccuaucaaccucgugcgggaucugccucagggcuucucugcucuggaaccccugguggaucugcccaucggcaucaacaucacccgguuucagacacugcuggcccugcacagaagcuaccugacaccuggcgauagcagcagcggauggacagcuggugccgccgcuuacuaugugggcuaccugcagccuagaaccuuccugcugaaguacaacgagaacggcaccaucaccgacgccguggauugugcucuggauccucugagcgagacaaagugcacccugaaguccuucaccguggaaaagggcaucuaccagaccagcaacuuccgggugcagcccaccgaauccaucgugcgguuccccaauaucaccaaucugugccccuucggcgagguguucaaugccaccagauucgccucuguguacgccuggaaccggaagcggaucagcaauugcguggccgacuacuccgugcuguacaacuccgccagcuucagcaccuucaagugcuacggcguguccccuaccaagcugaacgaccugugcuucacaaacguguacgccgacagcuucgugauccggggagaugaagugcggcagauugccccuggacagacaggcaagaucgccgacuacaacuacaagcugcccgacgacuucaccggcugugugauugccuggaacagcaacaaccuggacuccaaagucggcggcaacuacaauuaccuguaccggcuguuccggaaguccaaucugaagcccuucgagcgggacaucagcaccgaaaucuaucaggccggcagcaccccuugcaacggcguggaaggcuucaacugcuacuucccacugcaguccuacggcuuucagcccacaaauggcgugggcuaucagcccuacagagugguggugcugagcuucgaacugcugcaugcuccugccacagugugcggcccuaagaaaagcaccaaucucgugaagaacaaaugcgugaacuucaacuucaacggccugaccggcaccggcgugcugacagagagcaacaagaaguuccugccauuccagcaguuuggccgggauaucgccgauaccacagacgccguuagagauccccagacacuggaaauccuggacaucaccccaugcagcuucggcggagugucugugaucaccccuggcaccaacaccagcaaucagguggcagugcuguaccaggacgugaacuguaccgaagugcccguggccauucacgccgaucagcugacaccuacauggcggguguacuccaccggcagcaauguguuucagaccagagccggcugucugaucggagccgagcacgugaacaauagcuacgagugcgacauccccaucggcgcuggcaucugugccagcuaccagacacagacaaacagccccagacgggcuagaagcguggccagccagagcaucauugccuacacaaugucucugggcgccgagaacagcguggccuacuccaacaacucuaucgcuugccccaccaacuucaccaucagcgugaccaccgagauccugccuguguccaugaccaagaccagcguggacugcaccauguacaucugcggcgauuccaccgagugcuccaaccugcugcugcaguacggcagcuucugcacccagcugaauagagcccugacagggaucgccguggaacaggacaagaacacccaagagguguucgcccaagugaagcaaaucuacaagaccccuccuaucaaggacuucggcggcuucaauuucagccagauucugcccgauccuagcaagcccagcaagcggagcuucaucgaggaccugcuguucaacaaagugacacuggccgacgccggcuucaucaagcaguauggcgauugucugggcgacauugccgccagggaucugauuugcgcccagaaguuuaacggacugacagugcugccuccucugcugaccgaugagaugaucgcccaguacacaucugcccugcuggccggcacaaucacaagcggcuggacauuuggagcuggcgccgcucugcagauccccuuugcuaugcagauggccuaccgguucaacggcaucggagugacccagaaugugcuguacgagaaccagaagcugaucgccaaccaguucaacagcgccaucggcaagauccaggacagccugagcagcacagcaagcgcccugggaaagcugcaggacguggucaaccagaaugcccaggcacugaacacccuggucaagcagcuguccuccaacuucggcgccaucagcucugugcugaacgauauccugagcagacuggacaaggucgaggccgaggugcagaucgacagacugaucacaggcagacugcagagccuccagacauacgugacccagcagcugaucagagccgccgagauuagagccucugccaaucuggccgccaccaagaugucugagugugugcugggccagagcaagagaguggacuuuugcggcaagggcuaccaccugaugagcuucccucagucugccccucacggcgugguguuucugcacgugacauaugugcccgcucaagagaagaauuucaccaccgcuccagccaucugccacgacggcaaagcccacuuuccuagagaaggcguguucguguccaacggcacccauugguucgugacacagcggaacuucugugagccccagaucaucaccaccgacaacaccuucgugucuggcaacugcgacguugugaucggcauugugaacaauaccguguacgacccucugcagcccgagcuggacagcuucaaagaggaacuggacaaguacuuuaagaaccacacaagccccgacguggaccugggcgauaucagcggaaucaaugccagcgucgugaacauccagaaagagaucgaccggcugaacgagguggccaagaaucugaacgagagccugaucgaccugcaagaacuggggaaguacgagcaguacaucaagggaggcggaggaucugacaucaucaagcugcugaacgagcaagugaacaaagagaugcagagcagcaaccuguacaugagcaugagcagcuggugcuacacccacagccuugauggcgccggacuguuccuguuugaucacgccgccgaggaauacgagcacgccaagaagcugaucaucuuccugaacgagaacaacgugcccgugcagcugaccagcauuucugccccugagcacaaguucgagggccugacacagaucuuccagaaggccuacgaacacgagcagcacaucagcgagagcaucaacaacaucguggaccacgccauuaagagcaaggaucacgccaccuucaacuuucugcagugguacguggccgaacagcacgaggaagaggugcuguucaaggacauccuggacaagaucgagcugaucggcaacgagaaccacggccuguaucuggccgaccaguacgugaagggaaucgccaagagcagaaagagcuga

SEQ ID NO: 12106 - RNA, 4140 nt, Artificial Sequence
  SARS-CoV-2/Wuhan/WIV05/2019__EPI_ISL_402128 spike protein CDS gc mod (1-1211)(P715C_P1069C) Ferritin construct
auguucguguuucuggugcugcugccccugguguccagccagugugugaaccugaccaccagaacacagcugccuccagccuacaccaacagcuucaccagaggcguguacuaccccgacaagguguucagauccagcgugcugcacucuacccaggaccuguuccugccuuucuucagcaacgugaccugguuccacgccauccacguguccggcaccaauggcaccaagagauucgacaaccccgugcugcccuucaacgacgggguguacuuugccagcaccgagaaguccaacaucaucagaggcuggaucuucggcaccacacuggacagcaagacccagagccugcugaucgugaacaacgccaccaacguggucaucaaagugugcgaguuccaguucugcaacgaccccuuccugggcgucuacuaccacaagaacaacaagagcuggauggaaagcgaguuccggguguacagcagcgccaacaacugcaccuucgaguacgugucccagccuuuccugauggaccuggaaggcaagcagggcaacuucaagaaccugcgcgaguucguguucaagaacaucgacggcuacuucaaaaucuacagcaagcacaccccuaucaaccucgugcgggaucugccucagggcuucucugcucuggaaccccugguggaucugcccaucggcaucaacaucacccgguuucagacacugcuggcccugcacagaagcuaccugacaccuggcgauagcagcagcggauggacagcuggugccgccgcuuacuaugugggcuaccugcagccuagaaccuuccugcugaaguacaacgagaacggcaccaucaccgacgccguggauugugcucuggauccucugagcgagacaaagugcacccugaaguccuucaccguggaaaagggcaucuaccagaccagcaacuuccgggugcagcccaccgaauccaucgugcgguuccccaauaucaccaaucugugccccuucggcgagguguucaaugccaccagauucgccucuguguacgccuggaaccggaagcggaucagcaauugcguggccgacuacuccgugcuguacaacuccgccagcuucagcaccuucaagugcuacggcguguccccuaccaagcugaacgaccugugcuucacaaacguguacgccgacagcuucgugauccggggagaugaagugcggcagauugccccuggacagacaggcaagaucgccgacuacaacuacaagcugcccgacgacuucaccggcugugugauugccuggaacagcaacaaccuggacuccaaagucggcggcaacuacaauuaccuguaccggcuguuccggaaguccaaucugaagcccuucgagcgggacaucagcaccgaaaucuaucaggccggcagcaccccuugcaacggcguggaaggcuucaacugcuacuucccacugcaguccuacggcuuucagcccacaaauggcgugggcuaucagcccuacagagugguggugcugagcuucgaacugcugcaugcuccugccacagugugcggcccuaagaaaagcaccaaucucgugaagaacaaaugcgugaacuucaacuucaacggccugaccggcaccggcgugcugacagagagcaacaagaaguuccugccauuccagcaguuuggccgggauaucgccgauaccacagacgccguuagagauccccagacacuggaaauccuggacaucaccccaugcagcuucggcggagugucugugaucaccccuggcaccaacaccagcaaucagguggcagugcuguaccaggacgugaacuguaccgaagugcccguggccauucacgccgaucagcugacaccuacauggcggguguacuccaccggcagcaauguguuucagaccagagccggcugucugaucggagccgagcacgugaacaauagcuacgagugcgacauccccaucggcgcuggcaucugugccagcuaccagacacagacaaacagccccagacgggcuagaagcguggccagccagagcaucauugccuacacaaugucucugggcgccgagaacagcguggccuacuccaacaacucuaucgcuaucugcaccaacuucaccaucagcgugaccaccgagauccugccuguguccaugaccaagaccagcguggacugcaccauguacaucugcggcgauuccaccgagugcuccaaccugcugcugcaguacggcagcuucugcacccagcugaauagagcccugacagggaucgccguggaacaggacaagaacacccaagagguguucgcccaagugaagcaaaucuacaagaccccuccuaucaaggacuucggcggcuucaauuucagccagauucugcccgauccuagcaagcccagcaagcggagcuucaucgaggaccugcuguucaacaaagugacacuggccgacgccggcuucaucaagcaguauggcgauugucugggcgacauugccgccagggaucugauuugcgcccagaaguuuaacggacugacagugcugccuccucugcugaccgaugagaugaucgcccaguacacaucugcccugcuggccggcacaaucacaagcggcuggacauuuggagcuggcgccgcucugcagauccccuuugcuaugcagauggccuaccgguucaacggcaucggagugacccagaaugugcuguacgagaaccagaagcugaucgccaaccaguucaacagcgccaucggcaagauccaggacagccugagcagcacagcaagcgcccugggaaagcugcaggacguggucaaccagaaugcccaggcacugaacacccuggucaagcagcuguccuccaacuucggcgccaucagcucugugcugaacgauauccugagcagacuggacaaggucgaggccgaggugcagaucgacagacugaucacaggcagacugcagagccuccagacauacgugacccagcagcugaucagagccgccgagauuagagccucugccaaucuggccgccaccaagaugucugagugugugcugggccagagcaagagaguggacuuuugcggcaagggcuaccaccugaugagcuucccucagucugccccucacggcgugguguuucugcacgugacauaugugugugcucaagagaagaauuucaccaccgcuccagccaucugccacgacggcaaagcccacuuuccuagagaaggcguguucguguccaacggcacccauugguucgugacacagcggaacuucuacgagccccagaucaucaccaccgacaacaccuucgugucuggcaacugcgacguugugaucggcauugugaacaauaccguguacgacccucugcagcccgagcuggacagcuucaaagaggaacuggacaaguacuuuaagaaccacacaagccccgacguggaccugggcgauaucagcggaaucaaugccagcgucgugaacauccagaaagagaucgaccggcugaacgagguggccaagaaucugaacgagagccugaucgaccugcaagaacuggggaaguacgagcaguacaucaagggaggcggaggaucugacaucaucaagcugcugaacgagcaagugaacaaagagaugcagagcagcaaccuguacaugagcaugagcagcuggugcuacacccacagccuugauggcgccggacuguuccuguuugaucacgccgccgaggaauacgagcacgccaagaagcugaucaucuuccugaacgagaacaacgugcccgugcagcugaccagcauuucugccccugagcacaaguucgagggccugacacagaucuuccagaaggccuacgaacacgagcagcacaucagcgagagcaucaacaacaucguggaccacgccauuaagagcaaggaucacgccaccuucaacuuucugcagugguacguggccgaacagcacgaggaagaggugcuguucaaggacauccuggacaagaucgagcugaucggcaacgagaaccacggccuguaucuggccgaccaguacgugaagggaaucgccaagagcagaaagagcuga

SEQ ID NO: 12107 - RNA, 4140 nt, Artificial Sequence
  SARS-CoV-2/Wuhan/WIV05/2019__EPI_ISL_402128 spike protein CDS gc mod (1-1211)(G889C_L1034C) Ferritin construct
auguucguguuucuggugcugcugccccugguguccagccagugugugaaccugaccaccagaacacagcugccuccagccuacaccaacagcuucaccagaggcguguacuaccccgacaagguguucagauccagcgugcugcacucuacccaggaccuguuccugccuuucuucagcaacgugaccugguuccacgccauccacguguccggcaccaauggcaccaagagauucgacaaccccgugcugcccuucaacgacgggguguacuuugccagcaccgagaaguccaacaucaucagaggcuggaucuucggcaccacacuggacagcaagacccagagccugcugaucgugaacaacgccaccaacguggucaucaaagugugcgaguuccaguucugcaacgaccccuuccugggcgucuacuaccacaagaacaacaagagcuggauggaaagcgaguuccggguguacagcagcgccaacaacugcaccuucgaguacgugucccagccuuuccugauggaccuggaaggcaagcagggcaacuucaagaaccugcgcgaguucguguucaagaacaucgacggcuacuucaaaaucuacagcaagcacaccccuaucaaccucgugcgggaucugccucagggcuucucugcucuggaaccccugguggaucugcccaucggcaucaacaucacccgguuucagacacugcuggcccugcacagaagcuaccugacaccuggcgauagcagcagcggauggacagcuggugccgccgcuuacuaugugggcuaccugcagccuagaaccuuccugcugaaguacaacgagaacggcaccaucaccgacgccguggauugugcucuggauccucugagcgagacaaagugcacccugaaguccuucaccguggaaaagggcaucuaccagaccagcaacuuccgggugcagcccaccgaauccaucgugcgguuccccaauaucaccaaucugugccccuucggcgagguguucaaugccaccagauucgccucuguguacgccuggaaccggaagcggaucagcaauugcguggccgacuacuccgugcuguacaacuccgccagcuucagcaccuucaagugcuacggcguguccccuaccaagcugaacgaccugugcuucacaaacguguacgccgacagcuucgugauccggggagaugaagugcggcagauugccccuggacagacaggcaagaucgccgacuacaacuacaagcugcccgacgacuucaccggcugugugauugccuggaacagcaacaaccuggacuccaaagucggcggcaacuacaauuaccuguaccggcuguuccggaaguccaaucugaagcccuucgagcgggacaucagcaccgaaaucuaucaggccggcagcaccccuugcaacggcguggaaggcuucaacugcuacuucccacugcaguccuacggcuuucagcccacaaauggcgugggcuaucagcccuacagagugguggugcugagcuucgaacugcugcaugcuccugccacagugugcggcccuaagaaaagcaccaaucucgugaagaacaaaugcgugaacuucaacuucaacggccugaccggcaccggcgugcugacagagagcaacaagaaguuccugccauuccagcaguuuggccgggauaucgccgauaccacagacgccguuagagauccccagacacuggaaauccuggacaucaccccaugcagcuucggcggagugucugugaucaccccuggcaccaacaccagcaaucagguggcagugcuguaccaggacgugaacuguaccgaagugcccguggccauucacgccgaucagcugacaccuacauggcggguguacuccaccggcagcaauguguuucagaccagagccggcugucugaucggagccgagcacgugaacaauagcuacgagugcgacauccccaucggcgcuggcaucugugccagcuaccagacacagacaaacagccccagacgggcuagaagcguggccagccagagcaucauugccuacacaaugucucugggcgccgagaacagcguggccuacuccaacaacucuaucgcuauccccaccaacuucaccaucagcgugaccaccgagauccugccuguguccaugaccaagaccagcguggacugcaccauguacaucugcggcgauuccaccgagugcuccaaccugcugcugcaguacggcagcuucugcacccagcugaauagagcccugacagggaucgccguggaacaggacaagaacacccaagagguguucgcccaagugaagcaaaucuacaagaccccuccuaucaaggacuucggcggcuucaauuucagccagauucugcccgauccuagcaagcccagcaagcggagcuucaucgaggaccugcuguucaacaaagugacacuggccgacgccggcuucaucaagcaguauggcgauugucugggcgacauugccgccagggaucugauuugcgcccagaaguuuaacggacugacagugcugccuccucugcugaccgaugagaugaucgcccaguacacaucugcccugcuggccggcacaaucacaagcggcuggacauuuugcgcuggcgccgcucugcagauccccuuugcuaugcagauggccuaccgguucaacggcaucggagugacccagaaugugcuguacgagaaccagaagcugaucgccaaccaguucaacagcgccaucggcaagauccaggacagccugagcagcacagcaagcgcccugggaaagcugcaggacguggucaaccagaaugcccaggcacugaacacccuggucaagcagcuguccuccaacuucggcgccaucagcucugugcugaacgauauccugagcagacuggacaaggucgaggccgaggugcagaucgacagacugaucacaggcagacugcagagccuccagacauacgugacccagcagcugaucagagccgccgagauuagagccucugccaaucuggccgccaccaagaugucugaguguguguguggccagagcaagagaguggacuuuugcggcaagggcuaccaccugaugagcuucccucagucugccccucacggcgugguguuucugcacgugacauaugugcccgcucaagagaagaauuucaccaccgcuccagccaucugccacgacggcaaagcccacuuuccuagagaaggcguguucguguccaacggcacccauugguucgugacacagcggaacuucuacgagccccagaucaucaccaccgacaacaccuucgugucuggcaacugcgacguugugaucggcauugugaacaauaccguguacgacccucugcagcccgagcuggacagcuucaaagaggaacuggacaaguacuuuaagaaccacacaagccccgacguggaccugggcgauaucagcggaaucaaugccagcgucgugaacauccagaaagagaucgaccggcugaacgagguggccaagaaucugaacgagagccugaucgaccugcaagaacuggggaaguacgagcaguacaucaagggaggcggaggaucugacaucaucaagcugcugaacgagcaagugaacaaagagaugcagagcagcaaccuguacaugagcaugagcagcuggugcuacacccacagccuugauggcgccggacuguuccuguuugaucacgccgccgaggaauacgagcacgccaagaagcugaucaucuuccugaacgagaacaacgugcccgugcagcugaccagcauuucugccccugagcacaaguucgagggccugacacagaucuuccagaaggccuacgaacacgagcagcacaucagcgagagcaucaacaacaucguggaccacgccauuaagagcaaggaucacgccaccuucaacuuucugcagugguacguggccgaacagcacgaggaagaggugcuguucaaggacauccuggacaagaucgagcugaucggcaacgagaaccacggccuguaucuggccgaccaguacgugaagggaaucgccaagagcagaaagagcuga

SEQ ID NO: 12108 - RNA, 4140 nt, Artificial Sequence
  SARS-CoV-2/Wuhan/WIV05/2019__EPI_ISL_402128 spike protein CDS gc mod (1-1211)(I909C_Y1047C) Ferritin construct
auguucguguuucuggugcugcugccccugguguccagccagugugugaaccugaccaccagaacacagcugccuccagccuacaccaacagcuucaccagaggcguguacuaccccgacaagguguucagauccagcgugcugcacucuacccaggaccuguuccugccuuucuucagcaacgugaccugguuccacgccauccacguguccggcaccaauggcaccaagagauucgacaaccccgugcugcccuucaacgacgggguguacuuugccagcaccgagaaguccaacaucaucagaggcuggaucuucggcaccacacuggacagcaagacccagagccugcugaucgugaacaacgccaccaacguggucaucaaagugugcgaguuccaguucugcaacgaccccuuccugggcgucuacuaccacaagaacaacaagagcuggauggaaagcgaguuccggguguacagcagcgccaacaacugcaccuucgaguacgugucccagccuuuccugauggaccuggaaggcaagcagggcaacuucaagaaccugcgcgaguucguguucaagaacaucgacggcuacuucaaaaucuacagcaagcacaccccuaucaaccucgugcgggaucugccucagggcuucucugcucuggaaccccugguggaucugcccaucggcaucaacaucacccgguuucagacacugcuggcccugcacagaagcuaccugacaccuggcgauagcagcagcggauggacagcuggugccgccgcuuacuaugugggcuaccugcagccuagaaccuuccugcugaaguacaacgagaacggcaccaucaccgacgccguggauugugcucuggauccucugagcgagacaaagugcacccugaaguccuucaccguggaaaagggcaucuaccagaccagcaacuuccgggugcagcccaccgaauccaucgugcgguuccccaauaucaccaaucugugccccuucggcgagguguucaaugccaccagauucgccucuguguacgccuggaaccggaagcggaucagcaauugcguggccgacuacuccgugcuguacaacuccgccagcuucagcaccuucaagugcuacggcguguccccuaccaagcugaacgaccugugcuucacaaacguguacgccgacagcuucgugauccggggagaugaagugcggcagauugccccuggacagacaggcaagaucgccgacuacaacuacaagcugcccgacgacuucaccggcugugugauugccuggaacagcaacaaccuggacuccaaagucggcggcaacuacaauuaccuguaccggcuguuccggaaguccaaucugaagcccuucgagcgggacaucagcaccgaaaucuaucaggccggcagcaccccuugcaacggcguggaaggcuucaacugcuacuucccacugcaguccuacggcuuucagcccacaaauggcgugggcuaucagcccuacagagugguggugcugagcuucgaacugcugcaugcuccugccacagugugcggcccuaagaaaagcaccaaucucgugaagaacaaaugcgugaacuucaacuucaacggccugaccggcaccggcgugcugacagagagcaacaagaaguuccugccauuccagcaguuuggccgggauaucgccgauaccacagacgccguuagagauccccagacacuggaaauccuggacaucaccccaugcagcuucggcggagugucugugaucaccccuggcaccaacaccagcaaucagguggcagugcuguaccaggacgugaacuguaccgaagugcccguggccauucacgccgaucagcugacaccuacauggcggguguacuccaccggcagcaauguguuucagaccagagccggcugucugaucggagccgagcacgugaacaauagcuacgagugcgacauccccaucggcgcuggcaucugugccagcuaccagacacagacaaacagccccagacgggcuagaagcguggccagccagagcaucauugccuacacaaugucucugggcgccgagaacagcguggccuacuccaacaacucuaucgcuauccccaccaacuucaccaucagcgugaccaccgagauccugccuguguccaugaccaagaccagcguggacugcaccauguacaucugcggcgauuccaccgagugcuccaaccugcugcugcaguacggcagcuucugcacccagcugaauagagcccugacagggaucgccguggaacaggacaagaacacccaagagguguucgcccaagugaagcaaaucuacaagaccccuccuaucaaggacuucggcggcuucaauuucagccagauucugcccgauccuagcaagcccagcaagcggagcuucaucgaggaccugcuguucaacaaagugacacuggccgacgccggcuucaucaagcaguauggcgauugucugggcgacauugccgccagggaucugauuugcgcccagaaguuuaacggacugacagugcugccuccucugcugaccgaugagaugaucgcccaguacacaucugcccugcuggccggcacaaucacaagcggcuggacauuuggagcuggcgccgcucugcagauccccuuugcuaugcagauggccuaccgguucaacggcugcggagugacccagaaugugcuguacgagaaccagaagcugaucgccaaccaguucaacagcgccaucggcaagauccaggacagccugagcagcacagcaagcgcccugggaaagcugcaggacguggucaaccagaaugcccaggcacugaacacccuggucaagcagcuguccuccaacuucggcgccaucagcucugugcugaacgauauccugagcagacuggacaaggucgaggccgaggugcagaucgacagacugaucacaggcagacugcagagccuccagacauacgugacccagcagcugaucagagccgccgagauuagagccucugccaaucuggccgccaccaagaugucugagugugugcugggccagagcaagagaguggacuuuugcggcaagggcugucaccugaugagcuucccucagucugccccucacggcgugguguuucugcacgugacauaugugcccgcucaagagaagaauuucaccaccgcuccagccaucugccacgacggcaaagcccacuuuccuagagaaggcguguucguguccaacggcacccauugguucgugacacagcggaacuucuacgagccccagaucaucaccaccgacaacaccuucgugucuggcaacugcgacguugugaucggcauugugaacaauaccguguacgacccucugcagcccgagcuggacagcuucaaagaggaacuggacaaguacuuuaagaaccacacaagccccgacguggaccugggcgauaucagcggaaucaaugccagcgucgugaacauccagaaagagaucgaccggcugaacgagguggccaagaaucugaacgagagccugaucgaccugcaagaacuggggaaguacgagcaguacaucaagggaggcggaggaucugacaucaucaagcugcugaacgagcaagugaacaaagagaugcagagcagcaaccuguacaugagcaugagcagcuggugcuacacccacagccuugauggcgccggacuguuccuguuugaucacgccgccgaggaauacgagcacgccaagaagcugaucaucuuccugaacgagaacaacgugcccgugcagcugaccagcauuucugccccugagcacaaguucgagggccugacacagaucuuccagaaggccuacgaacacgagcagcacaucagcgagagcaucaacaacaucguggaccacgccauuaagagcaaggaucacgccaccuucaacuuucugcagugguacguggccgaacagcacgaggaagaggugcuguucaaggacauccuggacaagaucgagcugaucggcaacgagaaccacggccuguaucuggccgaccaguacgugaagggaaucgccaagagcagaaagagcuga

SEQ ID NO: 12109 - RNA, 4140 nt, Artificial Sequence
  SARS-CoV-2/Wuhan/WIV05/2019__EPI_ISL_402128 spike protein CDS gc mod (1-1211)(Q965C_S1003C) Ferritin construct
auguucguguuucuggugcugcugccccugguguccagccagugugugaaccugaccaccagaacacagcugccuccagccuacaccaacagcuucaccagaggcguguacuaccccgacaagguguucagauccagcgugcugcacucuacccaggaccuguuccugccuuucuucagcaacgugaccugguuccacgccauccacguguccggcaccaauggcaccaagagauucgacaaccccgugcugcccuucaacgacgggguguacuuugccagcaccgagaaguccaacaucaucagaggcuggaucuucggcaccacacuggacagcaagacccagagccugcugaucgugaacaacgccaccaacguggucaucaaagugugcgaguuccaguucugcaacgaccccuuccugggcgucuacuaccacaagaacaacaagagcuggauggaaagcgaguuccggguguacagcagcgccaacaacugcaccuucgaguacgugucccagccuuuccugauggaccuggaaggcaagcagggcaacuucaagaaccugcgcgaguucguguucaagaacaucgacggcuacuucaaaaucuacagcaagcacaccccuaucaaccucgugcgggaucugccucagggcuucucugcucuggaaccccugguggaucugcccaucggcaucaacaucacccgguuucagacacugcuggcccugcacagaagcuaccugacaccuggcgauagcagcagcggauggacagcuggugccgccgcuuacuaugugggcuaccugcagccuagaaccuuccugcugaaguacaacgagaacggcaccaucaccgacgccguggauugugcucuggauccucugagcgagacaaagugcacccugaaguccuucaccguggaaaagggcaucuaccagaccagcaacuuccgggugcagcccaccgaauccaucgugcgguuccccaauaucaccaaucugugccccuucggcgagguguucaaugccaccagauucgccucuguguacgccuggaaccggaagcggaucagcaauugcguggccgacuacuccgugcuguacaacuccgccagcuucagcaccuucaagugcuacggcguguccccuaccaagcugaacgaccugugcuucacaaacguguacgccgacagcuucgugauccggggagaugaagugcggcagauugccccuggacagacaggcaagaucgccgacuacaacuacaagcugcccgacgacuucaccggcugugugauugccuggaacagcaacaaccuggacuccaaagucggcggcaacuacaauuaccuguaccggcuguuccggaaguccaaucugaagcccuucgagcgggacaucagcaccgaaaucuaucaggccggcagcaccccuugcaacggcguggaaggcuucaacugcuacuucccacugcaguccuacggcuuucagcccacaaauggcgugggcuaucagcccuacagagugguggugcugagcuucgaacugcugcaugcuccugccacagugugcggcccuaagaaaagcaccaaucucgugaagaacaaaugcgugaacuucaacuucaacggccugaccggcaccggcgugcugacagagagcaacaagaaguuccugccauuccagcaguuuggccgggauaucgccgauaccacagacgccguuagagauccccagacacuggaaauccuggacaucaccccaugcagcuucggcggagugucugugaucaccccuggcaccaacaccagcaaucagguggcagugcuguaccaggacgugaacuguaccgaagugcccguggccauucacgccgaucagcugacaccuacauggcggguguacuccaccggcagcaauguguuucagaccagagccggcugucugaucggagccgagcacgugaacaauagcuacgagugcgacauccccaucggcgcuggcaucugugccagcuaccagacacagacaaacagccccagacgggcuagaagcguggccagccagagcaucauugccuacacaaugucucugggcgccgagaacagcguggccuacuccaacaacucuaucgcuauccccaccaacuucaccaucagcgugaccaccgagauccugccuguguccaugaccaagaccagcguggacugcaccauguacaucugcggcgauuccaccgagugcuccaaccugcugcugcaguacggcagcuucugcacccagcugaauagagcccugacagggaucgccguggaacaggacaagaacacccaagagguguucgcccaagugaagcaaaucuacaagaccccuccuaucaaggacuucggcggcuucaauuucagccagauucugcccgauccuagcaagcccagcaagcggagcuucaucgaggaccugcuguucaacaaagugacacuggccgacgccggcuucaucaagcaguauggcgauugucugggcgacauugccgccagggaucugauuugcgcccagaaguuuaacggacugacagugcugccuccucugcugaccgaugagaugaucgcccaguacacaucugcccugcuggccggcacaaucacaagcggcuggacauuuggagcuggcgccgcucugcagauccccuuugcuaugcagauggccuaccgguucaacggcaucggagugacccagaaugugcuguacgagaaccagaagcugaucgccaaccaguucaacagcgccaucggcaagauccaggacagccugagcagcacagcaagcgcccugggaaagcugcaggacguggucaaccagaaugcccaggcacugaacacccuggucaagugccuguccuccaacuucggcgccaucagcucugugcugaacgauauccugagcagacuggacaaggucgaggccgaggugcagaucgacagacugaucacaggcagacugcagugucuccagacauacgugacccagcagcugaucagagccgccgagauuagagccucugccaaucuggccgccaccaagaugucugagugugugcugggccagagcaagagaguggacuuuugcggcaagggcuaccaccugaugagcuucccucagucugccccucacggcgugguguuucugcacgugacauaugugcccgcucaagagaagaauuucaccaccgcuccagccaucugccacgacggcaaagcccacuuuccuagagaaggcguguucguguccaacggcacccauugguucgugacacagcggaacuucuacgagccccagaucaucaccaccgacaacaccuucgugucuggcaacugcgacguugugaucggcauugugaacaauaccguguacgacccucugcagcccgagcuggacagcuucaaagaggaacuggacaaguacuuuaagaaccacacaagccccgacguggaccugggcgauaucagcggaaucaaugccagcgucgugaacauccagaaagagaucgaccggcugaacgagguggccaagaaucugaacgagagccugaucgaccugcaagaacuggggaaguacgagcaguacaucaagggaggcggaggaucugacaucaucaagcugcugaacgagcaagugaacaaagagaugcagagcagcaaccuguacaugagcaugagcagcuggugcuacacccacagccuugauggcgccggacuguuccuguuugaucacgccgccgaggaauacgagcacgccaagaagcugaucaucuuccugaacgagaacaacgugcccgugcagcugaccagcauuucugccccugagcacaaguucgagggccugacacagaucuuccagaaggccuacgaacacgagcagcacaucagcgagagcaucaacaacaucguggaccacgccauuaagagcaaggaucacgccaccuucaacuuucugcagugguacguggccgaacagcacgaggaagaggugcuguucaaggacauccuggacaagaucgagcugaucggcaacgagaaccacggccuguaucuggccgaccaguacgugaagggaaucgccaagagcagaaagagcuga

SEQ ID NO: 12110 - RNA, 4140 nt, Artificial Sequence
  SARS-CoV-2/Wuhan/WIV05/2019__EPI_ISL_402128 spike protein CDS gc mod (1-1211)(F970C_G999C) Ferritin construct
auguucguguuucuggugcugcugccccugguguccagccagugugugaaccugaccaccagaacacagcugccuccagccuacaccaacagcuucaccagaggcguguacuaccccgacaagguguucagauccagcgugcugcacucuacccaggaccuguuccugccuuucuucagcaacgugaccugguuccacgccauccacguguccggcaccaauggcaccaagagauucgacaaccccgugcugcccuucaacgacgggguguacuuugccagcaccgagaaguccaacaucaucagaggcuggaucuucggcaccacacuggacagcaagacccagagccugcugaucgugaacaacgccaccaacguggucaucaaagugugcgaguuccaguucugcaacgaccccuuccugggcgucuacuaccacaagaacaacaagagcuggauggaaagcgaguuccggguguacagcagcgccaacaacugcaccuucgaguacgugucccagccuuuccugauggaccuggaaggcaagcagggcaacuucaagaaccugcgcgaguucguguucaagaacaucgacggcuacuucaaaaucuacagcaagcacaccccuaucaaccucgugcgggaucugccucagggcuucucugcucuggaaccccugguggaucugcccaucggcaucaacaucacccgguuucagacacugcuggcccugcacagaagcuaccugacaccuggcgauagcagcagcggauggacagcuggugccgccgcuuacuaugugggcuaccugcagccuagaaccuuccugcugaaguacaacgagaacggcaccaucaccgacgccguggauugugcucuggauccucugagcgagacaaagugcacccugaaguccuucaccguggaaaagggcaucuaccagaccagcaacuuccgggugcagcccaccgaauccaucgugcgguuccccaauaucaccaaucugugccccuucggcgagguguucaaugccaccagauucgccucuguguacgccuggaaccggaagcggaucagcaauugcguggccgacuacuccgugcuguacaacuccgccagcuucagcaccuucaagugcuacggcguguccccuaccaagcugaacgaccugugcuucacaaacguguacgccgacagcuucgugauccggggagaugaagugcggcagauugccccuggacagacaggcaagaucgccgacuacaacuacaagcugcccgacgacuucaccggcugugugauugccuggaacagcaacaaccuggacuccaaagucggcggcaacuacaauuaccuguaccggcuguuccggaaguccaaucugaagcccuucgagcgggacaucagcaccgaaaucuaucaggccggcagcaccccuugcaacggcguggaaggcuucaacugcuacuucccacugcaguccuacggcuuucagcccacaaauggcgugggcuaucagcccuacagagugguggugcugagcuucgaacugcugcaugcuccugccacagugugcggcccuaagaaaagcaccaaucucgugaagaacaaaugcgugaacuucaacuucaacggccugaccggcaccggcgugcugacagagagcaacaagaaguuccugccauuccagcaguuuggccgggauaucgccgauaccacagacgccguuagagauccccagacacuggaaauccuggacaucaccccaugcagcuucggcggagugucugugaucaccccuggcaccaacaccagcaaucagguggcagugcuguaccaggacgugaacuguaccgaagugcccguggccauucacgccgaucagcugacaccuacauggcggguguacuccaccggcagcaauguguuucagaccagagccggcugucugaucggagccgagcacgugaacaauagcuacgagugcgacauccccaucggcgcuggcaucugugccagcuaccagacacagacaaacagccccagacgggcuagaagcguggccagccagagcaucauugccuacacaaugucucugggcgccgagaacagcguggccuacuccaacaacucuaucgcuauccccaccaacuucaccaucagcgugaccaccgagauccugccuguguccaugaccaagaccagcguggacugcaccauguacaucugcggcgauuccaccgagugcuccaaccugcugcugcaguacggcagcuucugcacccagcugaauagagcccugacagggaucgccguggaacaggacaagaacacccaagagguguucgcccaagugaagcaaaucuacaagaccccuccuaucaaggacuucggcggcuucaauuucagccagauucugcccgauccuagcaagcccagcaagcggagcuucaucgaggaccugcuguucaacaaagugacacuggccgacgccggcuucaucaagcaguauggcgauugucugggcgacauugccgccagggaucugauuugcgcccagaaguuuaacggacugacagugcugccuccucugcugaccgaugagaugaucgcccaguacacaucugcccugcuggccggcacaaucacaagcggcuggacauuuggagcuggcgccgcucugcagauccccuuugcuaugcagauggccuaccgguucaacggcaucggagugacccagaaugugcuguacgagaaccagaagcugaucgccaaccaguucaacagcgccaucggcaagauccaggacagccugagcagcacagcaagcgcccugggaaagcugcaggacguggucaaccagaaugcccaggcacugaacacccuggucaagcagcuguccuccaacugcggcgccaucagcucugugcugaacgauauccugagcagacuggacaaggucgaggccgaggugcagaucgacagacugaucacauguagacugcagagccuccagacauacgugacccagcagcugaucagagccgccgagauuagagccucugccaaucuggccgccaccaagaugucugagugugugcugggccagagcaagagaguggacuuuugcggcaagggcuaccaccugaugagcuucccucagucugccccucacggcgugguguuucugcacgugacauaugugcccgcucaagagaagaauuucaccaccgcuccagccaucugccacgacggcaaagcccacuuuccuagagaaggcguguucguguccaacggcacccauugguucgugacacagcggaacuucuacgagccccagaucaucaccaccgacaacaccuucgugucuggcaacugcgacguugugaucggcauugugaacaauaccguguacgacccucugcagcccgagcuggacagcuucaaagaggaacuggacaaguacuuuaagaaccacacaagccccgacguggaccugggcgauaucagcggaaucaaugccagcgucgugaacauccagaaagagaucgaccggcugaacgagguggccaagaaucugaacgagagccugaucgaccugcaagaacuggggaaguacgagcaguacaucaagggaggcggaggaucugacaucaucaagcugcugaacgagcaagugaacaaagagaugcagagcagcaaccuguacaugagcaugagcagcuggugcuacacccacagccuugauggcgccggacuguuccuguuugaucacgccgccgaggaauacgagcacgccaagaagcugaucaucuuccugaacgagaacaacgugcccgugcagcugaccagcauuucugccccugagcacaaguucgagggccugacacagaucuuccagaaggccuacgaacacgagcagcacaucagcgagagcaucaacaacaucguggaccacgccauuaagagcaaggaucacgccaccuucaacuuucugcagugguacguggccgaacagcacgaggaagaggugcuguucaaggacauccuggacaagaucgagcugaucggcaacgagaaccacggccuguaucuggccgaccaguacgugaagggaaucgccaagagcagaaagagcuga

SEQ ID NO: 12111 - RNA, 4140 nt, Artificial Sequence
  SARS-CoV-2/Wuhan/WIV05/2019__EPI_ISL_402128 spike protein CDS gc mod (1-1211)(A972C_R995C) Ferritin construct
auguucguguuucuggugcugcugccccugguguccagccagugugugaaccugaccaccagaacacagcugccuccagccuacaccaacagcuucaccagaggcguguacuaccccgacaagguguucagauccagcgugcugcacucuacccaggaccuguuccugccuuucuucagcaacgugaccugguuccacgccauccacguguccggcaccaauggcaccaagagauucgacaaccccgugcugcccuucaacgacgggguguacuuugccagcaccgagaaguccaacaucaucagaggcuggaucuucggcaccacacuggacagcaagacccagagccugcugaucgugaacaacgccaccaacguggucaucaaagugugcgaguuccaguucugcaacgaccccuuccugggcgucuacuaccacaagaacaacaagagcuggauggaaagcgaguuccggguguacagcagcgccaacaacugcaccuucgaguacgugucccagccuuuccugauggaccuggaaggcaagcagggcaacuucaagaaccugcgcgaguucguguucaagaacaucgacggcuacuucaaaaucuacagcaagcacaccccuaucaaccucgugcgggaucugccucagggcuucucugcucuggaaccccugguggaucugcccaucggcaucaacaucacccgguuucagacacugcuggcccugcacagaagcuaccugacaccuggcgauagcagcagcggauggacagcuggugccgccgcuuacuaugugggcuaccugcagccuagaaccuuccugcugaaguacaacgagaacggcaccaucaccgacgccguggauugugcucuggauccucugagcgagacaaagugcacccugaaguccuucaccguggaaaagggcaucuaccagaccagcaacuuccgggugcagcccaccgaauccaucgugcgguuccccaauaucaccaaucugugccccuucggcgagguguucaaugccaccagauucgccucuguguacgccuggaaccggaagcggaucagcaauugcguggccgacuacuccgugcuguacaacuccgccagcuucagcaccuucaagugcuacggcguguccccuaccaagcugaacgaccugugcuucacaaacguguacgccgacagcuucgugauccggggagaugaagugcggcagauugccccuggacagacaggcaagaucgccgacuacaacuacaagcugcccgacgacuucaccggcugugugauugccuggaacagcaacaaccuggacuccaaagucggcggcaacuacaauuaccuguaccggcuguuccggaaguccaaucugaagcccuucgagcgggacaucagcaccgaaaucuaucaggccggcagcaccccuugcaacggcguggaaggcuucaacugcuacuucccacugcaguccuacggcuuucagcccacaaauggcgugggcuaucagcccuacagagugguggugcugagcuucgaacugcugcaugcuccugccacagugugcggcccuaagaaaagcaccaaucucgugaagaacaaaugcgugaacuucaacuucaacggccugaccggcaccggcgugcugacagagagcaacaagaaguuccugccauuccagcaguuuggccgggauaucgccgauaccacagacgccguuagagauccccagacacuggaaauccuggacaucaccccaugcagcuucggcggagugucugugaucaccccuggcaccaacaccagcaaucagguggcagugcuguaccaggacgugaacuguaccgaagugcccguggccauucacgccgaucagcugacaccuacauggcggguguacuccaccggcagcaauguguuucagaccagagccggcugucugaucggagccgagcacgugaacaauagcuacgagugcgacauccccaucggcgcuggcaucugugccagcuaccagacacagacaaacagccccagacgggcuagaagcguggccagccagagcaucauugccuacacaaugucucugggcgccgagaacagcguggccuacuccaacaacucuaucgcuauccccaccaacuucaccaucagcgugaccaccgagauccugccuguguccaugaccaagaccagcguggacugcaccauguacaucugcggcgauuccaccgagugcuccaaccugcugcugcaguacggcagcuucugcacccagcugaauagagcccugacagggaucgccguggaacaggacaagaacacccaagagguguucgcccaagugaagcaaaucuacaagaccccuccuaucaaggacuucggcggcuucaauuucagccagauucugcccgauccuagcaagcccagcaagcggagcuucaucgaggaccugcuguucaacaaagugacacuggccgacgccggcuucaucaagcaguauggcgauugucugggcgacauugccgccagggaucugauuugcgcccagaaguuuaacggacugacagugcugccuccucugcugaccgaugagaugaucgcccaguacacaucugcccugcuggccggcacaaucacaagcggcuggacauuuggagcuggcgccgcucugcagauccccuuugcuaugcagauggccuaccgguucaacggcaucggagugacccagaaugugcuguacgagaaccagaagcugaucgccaaccaguucaacagcgccaucggcaagauccaggacagccugagcagcacagcaagcgcccugggaaagcugcaggacguggucaaccagaaugcccaggcacugaacacccuggucaagcagcuguccuccaacuucggcugcaucagcucugugcugaacgauauccugagcagacuggacaaggucgaggccgaggugcagaucgacugucugaucacaggcagacugcagagccuccagacauacgugacccagcagcugaucagagccgccgagauuagagccucugccaaucuggccgccaccaagaugucugagugugugcugggccagagcaagagaguggacuuuugcggcaagggcuaccaccugaugagcuucccucagucugccccucacggcgugguguuucugcacgugacauaugugcccgcucaagagaagaauuucaccaccgcuccagccaucugccacgacggcaaagcccacuuuccuagagaaggcguguucguguccaacggcacccauugguucgugacacagcggaacuucuacgagccccagaucaucaccaccgacaacaccuucgugucuggcaacugcgacguugugaucggcauugugaacaauaccguguacgacccucugcagcccgagcuggacagcuucaaagaggaacuggacaaguacuuuaagaaccacacaagccccgacguggaccugggcgauaucagcggaaucaaugccagcgucgugaacauccagaaagagaucgaccggcugaacgagguggccaagaaucugaacgagagccugaucgaccugcaagaacuggggaaguacgagcaguacaucaagggaggcggaggaucugacaucaucaagcugcugaacgagcaagugaacaaagagaugcagagcagcaaccuguacaugagcaugagcagcuggugcuacacccacagccuugauggcgccggacuguuccuguuugaucacgccgccgaggaauacgagcacgccaagaagcugaucaucuuccugaacgagaacaacgugcccgugcagcugaccagcauuucugccccugagcacaaguucgagggccugacacagaucuuccagaaggccuacgaacacgagcagcacaucagcgagagcaucaacaacaucguggaccacgccauuaagagcaaggaucacgccaccuucaacuuucugcagugguacguggccgaacagcacgaggaagaggugcuguucaaggacauccuggacaagaucgagcugaucggcaacgagaaccacggccuguaucuggccgaccaguacgugaagggaaucgccaagagcagaaagagcuga

SEQ ID NO: 12112 - RNA, 4140 nt, Artificial Sequence
  SARS-CoV-2/Wuhan/WIV05/2019__EPI_ISL_402128 spike protein CDS gc mod (1-1211)(A890C_V1040C) Ferritin construct
auguucguguuucuggugcugcugccccugguguccagccagugugugaaccugaccaccagaacacagcugccuccagccuacaccaacagcuucaccagaggcguguacuaccccgacaagguguucagauccagcgugcugcacucuacccaggaccuguuccugccuuucuucagcaacgugaccugguuccacgccauccacguguccggcaccaauggcaccaagagauucgacaaccccgugcugcccuucaacgacgggguguacuuugccagcaccgagaaguccaacaucaucagaggcuggaucuucggcaccacacuggacagcaagacccagagccugcugaucgugaacaacgccaccaacguggucaucaaagugugcgaguuccaguucugcaacgaccccuuccugggcgucuacuaccacaagaacaacaagagcuggauggaaagcgaguuccggguguacagcagcgccaacaacugcaccuucgaguacgugucccagccuuuccugauggaccuggaaggcaagcagggcaacuucaagaaccugcgcgaguucguguucaagaacaucgacggcuacuucaaaaucuacagcaagcacaccccuaucaaccucgugcgggaucugccucagggcuucucugcucuggaaccccugguggaucugcccaucggcaucaacaucacccgguuucagacacugcuggcccugcacagaagcuaccugacaccuggcgauagcagcagcggauggacagcuggugccgccgcuuacuaugugggcuaccugcagccuagaaccuuccugcugaaguacaacgagaacggcaccaucaccgacgccguggauugugcucuggauccucugagcgagacaaagugcacccugaaguccuucaccguggaaaagggcaucuaccagaccagcaacuuccgggugcagcccaccgaauccaucgugcgguuccccaauaucaccaaucugugccccuucggcgagguguucaaugccaccagauucgccucuguguacgccuggaaccggaagcggaucagcaauugcguggccgacuacuccgugcuguacaacuccgccagcuucagcaccuucaagugcuacggcguguccccuaccaagcugaacgaccugugcuucacaaacguguacgccgacagcuucgugauccggggagaugaagugcggcagauugccccuggacagacaggcaagaucgccgacuacaacuacaagcugcccgacgacuucaccggcugugugauugccuggaacagcaacaaccuggacuccaaagucggcggcaacuacaauuaccuguaccggcuguuccggaaguccaaucugaagcccuucgagcgggacaucagcaccgaaaucuaucaggccggcagcaccccuugcaacggcguggaaggcuucaacugcuacuucccacugcaguccuacggcuuucagcccacaaauggcgugggcuaucagcccuacagagugguggugcugagcuucgaacugcugcaugcuccugccacagugugcggcccuaagaaaagcaccaaucucgugaagaacaaaugcgugaacuucaacuucaacggccugaccggcaccggcgugcugacagagagcaacaagaaguuccugccauuccagcaguuuggccgggauaucgccgauaccacagacgccguuagagauccccagacacuggaaauccuggacaucaccccaugcagcuucggcggagugucugugaucaccccuggcaccaacaccagcaaucagguggcagugcuguaccaggacgugaacuguaccgaagugcccguggccauucacgccgaucagcugacaccuacauggcggguguacuccaccggcagcaauguguuucagaccagagccggcugucugaucggagccgagcacgugaacaauagcuacgagugcgacauccccaucggcgcuggcaucugugccagcuaccagacacagacaaacagccccagacgggcuagaagcguggccagccagagcaucauugccuacacaaugucucugggcgccgagaacagcguggccuacuccaacaacucuaucgcuauccccaccaacuucaccaucagcgugaccaccgagauccugccuguguccaugaccaagaccagcguggacugcaccauguacaucugcggcgauuccaccgagugcuccaaccugcugcugcaguacggcagcuucugcacccagcugaauagagcccugacagggaucgccguggaacaggacaagaacacccaagagguguucgcccaagugaagcaaaucuacaagaccccuccuaucaaggacuucggcggcuucaauuucagccagauucugcccgauccuagcaagcccagcaagcggagcuucaucgaggaccugcuguucaacaaagugacacuggccgacgccggcuucaucaagcaguauggcgauugucugggcgacauugccgccagggaucugauuugcgcccagaaguuuaacggacugacagugcugccuccucugcugaccgaugagaugaucgcccaguacacaucugcccugcuggccggcacaaucacaagcggcuggacauuuggaugcggcgccgcucugcagauccccuuugcuaugcagauggccuaccgguucaacggcaucggagugacccagaaugugcuguacgagaaccagaagcugaucgccaaccaguucaacagcgccaucggcaagauccaggacagccugagcagcacagcaagcgcccugggaaagcugcaggacguggucaaccagaaugcccaggcacugaacacccuggucaagcagcuguccuccaacuucggcgccaucagcucugugcugaacgauauccugagcagacuggacaaggucgaggccgaggugcagaucgacagacugaucacaggcagacugcagagccuccagacauacgugacccagcagcugaucagagccgccgagauuagagccucugccaaucuggccgccaccaagaugucugagugugugcugggccagagcaagagaugugacuuuugcggcaagggcuaccaccugaugagcuucccucagucugccccucacggcgugguguuucugcacgugacauaugugcccgcucaagagaagaauuucaccaccgcuccagccaucugccacgacggcaaagcccacuuuccuagagaaggcguguucguguccaacggcacccauugguucgugacacagcggaacuucuacgagccccagaucaucaccaccgacaacaccuucgugucuggcaacugcgacguugugaucggcauugugaacaauaccguguacgacccucugcagcccgagcuggacagcuucaaagaggaacuggacaaguacuuuaagaaccacacaagccccgacguggaccugggcgauaucagcggaaucaaugccagcgucgugaacauccagaaagagaucgaccggcugaacgagguggccaagaaucugaacgagagccugaucgaccugcaagaacuggggaaguacgagcaguacaucaagggaggcggaggaucugacaucaucaagcugcugaacgagcaagugaacaaagagaugcagagcagcaaccuguacaugagcaugagcagcuggugcuacacccacagccuugauggcgccggacuguuccuguuugaucacgccgccgaggaauacgagcacgccaagaagcugaucaucuuccugaacgagaacaacgugcccgugcagcugaccagcauuucugccccugagcacaaguucgagggccugacacagaucuuccagaaggccuacgaacacgagcagcacaucagcgagagcaucaacaacaucguggaccacgccauuaagagcaaggaucacgccaccuucaacuuucugcagugguacguggccgaacagcacgaggaagaggugcuguucaaggacauccuggacaagaucgagcugaucggcaacgagaaccacggccuguaucuggccgaccaguacgugaagggaaucgccaagagcagaaagagcuga

SEQ ID NO: 12113 - RNA, 4140 nt, Artificial Sequence
  SARS-CoV-2/Wuhan/WIV05/2019__EPI_ISL_402128 spike protein CDS gc mod (1-1211)(T874C_S1055C) Ferritin construct
auguucguguuucuggugcugcugccccugguguccagccagugugugaaccugaccaccagaacacagcugccuccagccuacaccaacagcuucaccagaggcguguacuaccccgacaagguguucagauccagcgugcugcacucuacccaggaccuguuccugccuuucuucagcaacgugaccugguuccacgccauccacguguccggcaccaauggcaccaagagauucgacaaccccgugcugcccuucaacgacgggguguacuuugccagcaccgagaaguccaacaucaucagaggcuggaucuucggcaccacacuggacagcaagacccagagccugcugaucgugaacaacgccaccaacguggucaucaaagugugcgaguuccaguucugcaacgaccccuuccugggcgucuacuaccacaagaacaacaagagcuggauggaaagcgaguuccggguguacagcagcgccaacaacugcaccuucgaguacgugucccagccuuuccugauggaccuggaaggcaagcagggcaacuucaagaaccugcgcgaguucguguucaagaacaucgacggcuacuucaaaaucuacagcaagcacaccccuaucaaccucgugcgggaucugccucagggcuucucugcucuggaaccccugguggaucugcccaucggcaucaacaucacccgguuucagacacugcuggcccugcacagaagcuaccugacaccuggcgauagcagcagcggauggacagcuggugccgccgcuuacuaugugggcuaccugcagccuagaaccuuccugcugaaguacaacgagaacggcaccaucaccgacgccguggauugugcucuggauccucugagcgagacaaagugcacccugaaguccuucaccguggaaaagggcaucuaccagaccagcaacuuccgggugcagcccaccgaauccaucgugcgguuccccaauaucaccaaucugugccccuucggcgagguguucaaugccaccagauucgccucuguguacgccuggaaccggaagcggaucagcaauugcguggccgacuacuccgugcuguacaacuccgccagcuucagcaccuucaagugcuacggcguguccccuaccaagcugaacgaccugugcuucacaaacguguacgccgacagcuucgugauccggggagaugaagugcggcagauugccccuggacagacaggcaagaucgccgacuacaacuacaagcugcccgacgacuucaccggcugugugauugccuggaacagcaacaaccuggacuccaaagucggcggcaacuacaauuaccuguaccggcuguuccggaaguccaaucugaagcccuucgagcgggacaucagcaccgaaaucuaucaggccggcagcaccccuugcaacggcguggaaggcuucaacugcuacuucccacugcaguccuacggcuuucagcccacaaauggcgugggcuaucagcccuacagagugguggugcugagcuucgaacugcugcaugcuccugccacagugugcggcccuaagaaaagcaccaaucucgugaagaacaaaugcgugaacuucaacuucaacggccugaccggcaccggcgugcugacagagagcaacaagaaguuccugccauuccagcaguuuggccgggauaucgccgauaccacagacgccguuagagauccccagacacuggaaauccuggacaucaccccaugcagcuucggcggagugucugugaucaccccuggcaccaacaccagcaaucagguggcagugcuguaccaggacgugaacuguaccgaagugcccguggccauucacgccgaucagcugacaccuacauggcggguguacuccaccggcagcaauguguuucagaccagagccggcugucugaucggagccgagcacgugaacaauagcuacgagugcgacauccccaucggcgcuggcaucugugccagcuaccagacacagacaaacagccccagacgggcuagaagcguggccagccagagcaucauugccuacacaaugucucugggcgccgagaacagcguggccuacuccaacaacucuaucgcuauccccaccaacuucaccaucagcgugaccaccgagauccugccuguguccaugaccaagaccagcguggacugcaccauguacaucugcggcgauuccaccgagugcuccaaccugcugcugcaguacggcagcuucugcacccagcugaauagagcccugacagggaucgccguggaacaggacaagaacacccaagagguguucgcccaagugaagcaaaucuacaagaccccuccuaucaaggacuucggcggcuucaauuucagccagauucugcccgauccuagcaagcccagcaagcggagcuucaucgaggaccugcuguucaacaaagugacacuggccgacgccggcuucaucaagcaguauggcgauugucugggcgacauugccgccagggaucugauuugcgcccagaaguuuaacggacugacagugcugccuccucugcugaccgaugagaugaucgcccaguacugcucugcccugcuggccggcacaaucacaagcggcuggacauuuggagcuggcgccgcucugcagauccccuuugcuaugcagauggccuaccgguucaacggcaucggagugacccagaaugugcuguacgagaaccagaagcugaucgccaaccaguucaacagcgccaucggcaagauccaggacagccugagcagcacagcaagcgcccugggaaagcugcaggacguggucaaccagaaugcccaggcacugaacacccuggucaagcagcuguccuccaacuucggcgccaucagcucugugcugaacgauauccugagcagacuggacaaggucgaggccgaggugcagaucgacagacugaucacaggcagacugcagagccuccagacauacgugacccagcagcugaucagagccgccgagauuagagccucugccaaucuggccgccaccaagaugucugagugugugcugggccagagcaagagaguggacuuuugcggcaagggcuaccaccugaugagcuucccucagugcgccccucacggcgugguguuucugcacgugacauaugugcccgcucaagagaagaauuucaccaccgcuccagccaucugccacgacggcaaagcccacuuuccuagagaaggcguguucguguccaacggcacccauugguucgugacacagcggaacuucuacgagccccagaucaucaccaccgacaacaccuucgugucuggcaacugcgacguugugaucggcauugugaacaauaccguguacgacccucugcagcccgagcuggacagcuucaaagaggaacuggacaaguacuuuaagaaccacacaagccccgacguggaccugggcgauaucagcggaaucaaugccagcgucgugaacauccagaaagagaucgaccggcugaacgagguggccaagaaucugaacgagagccugaucgaccugcaagaacuggggaaguacgagcaguacaucaagggaggcggaggaucugacaucaucaagcugcugaacgagcaagugaacaaagagaugcagagcagcaaccuguacaugagcaugagcagcuggugcuacacccacagccuugauggcgccggacuguuccuguuugaucacgccgccgaggaauacgagcacgccaagaagcugaucaucuuccugaacgagaacaacgugcccgugcagcugaccagcauuucugccccugagcacaaguucgagggccugacacagaucuuccagaaggccuacgaacacgagcagcacaucagcgagagcaucaacaacaucguggaccacgccauuaagagcaaggaucacgccaccuucaacuuucugcagugguacguggccgaacagcacgaggaagaggugcuguucaaggacauccuggacaagaucgagcugaucggcaacgagaaccacggccuguaucuggccgaccaguacgugaagggaaucgccaagagcagaaagagcuga

SEQ ID NO: 12114 - RNA, 3726 nt, Artificial Sequence
  SARS-CoV-2/Wuhan/WIV05/2019__EPI_ISL_402128 spike protein CDS gc mod (1-1211) Foldon construct
auguucguguuucuggugcugcugccccugguguccagccagugugugaaccugaccaccagaacacagcugccuccagccuacaccaacagcuucaccagaggcguguacuaccccgacaagguguucagauccagcgugcugcacucuacccaggaccuguuccugccuuucuucagcaacgugaccugguuccacgccauccacguguccggcaccaauggcaccaagagauucgacaaccccgugcugcccuucaacgacgggguguacuuugccagcaccgagaaguccaacaucaucagaggcuggaucuucggcaccacacuggacagcaagacccagagccugcugaucgugaacaacgccaccaacguggucaucaaagugugcgaguuccaguucugcaacgaccccuuccugggcgucuacuaccacaagaacaacaagagcuggauggaaagcgaguuccggguguacagcagcgccaacaacugcaccuucgaguacgugucccagccuuuccugauggaccuggaaggcaagcagggcaacuucaagaaccugcgcgaguucguguucaagaacaucgacggcuacuucaaaaucuacagcaagcacaccccuaucaaccucgugcgggaucugccucagggcuucucugcucuggaaccccugguggaucugcccaucggcaucaacaucacccgguuucagacacugcuggcccugcacagaagcuaccugacaccuggcgauagcagcagcggauggacagcuggugccgccgcuuacuaugugggcuaccugcagccuagaaccuuccugcugaaguacaacgagaacggcaccaucaccgacgccguggauugugcucuggauccucugagcgagacaaagugcacccugaaguccuucaccguggaaaagggcaucuaccagaccagcaacuuccgggugcagcccaccgaauccaucgugcgguuccccaauaucaccaaucugugccccuucggcgagguguucaaugccaccagauucgccucuguguacgccuggaaccggaagcggaucagcaauugcguggccgacuacuccgugcuguacaacuccgccagcuucagcaccuucaagugcuacggcguguccccuaccaagcugaacgaccugugcuucacaaacguguacgccgacagcuucgugauccggggagaugaagugcggcagauugccccuggacagacaggcaagaucgccgacuacaacuacaagcugcccgacgacuucaccggcugugugauugccuggaacagcaacaaccuggacuccaaagucggcggcaacuacaauuaccuguaccggcuguuccggaaguccaaucugaagcccuucgagcgggacaucagcaccgaaaucuaucaggccggcagcaccccuugcaacggcguggaaggcuucaacugcuacuucccacugcaguccuacggcuuucagcccacaaauggcgugggcuaucagcccuacagagugguggugcugagcuucgaacugcugcaugcuccugccacagugugcggcccuaagaaaagcaccaaucucgugaagaacaaaugcgugaacuucaacuucaacggccugaccggcaccggcgugcugacagagagcaacaagaaguuccugccauuccagcaguuuggccgggauaucgccgauaccacagacgccguuagagauccccagacacuggaaauccuggacaucaccccaugcagcuucggcggagugucugugaucaccccuggcaccaacaccagcaaucagguggcagugcuguaccaggacgugaacuguaccgaagugcccguggccauucacgccgaucagcugacaccuacauggcggguguacuccaccggcagcaauguguuucagaccagagccggcugucugaucggagccgagcacgugaacaauagcuacgagugcgacauccccaucggcgcuggcaucugugccagcuaccagacacagacaaacagccccagacgggcuagaagcguggccagccagagcaucauugccuacacaaugucucugggcgccgagaacagcguggccuacuccaacaacucuaucgcuauccccaccaacuucaccaucagcgugaccaccgagauccugccuguguccaugaccaagaccagcguggacugcaccauguacaucugcggcgauuccaccgagugcuccaaccugcugcugcaguacggcagcuucugcacccagcugaauagagcccugacagggaucgccguggaacaggacaagaacacccaagagguguucgcccaagugaagcaaaucuacaagaccccuccuaucaaggacuucggcggcuucaauuucagccagauucugcccgauccuagcaagcccagcaagcggagcuucaucgaggaccugcuguucaacaaagugacacuggccgacgccggcuucaucaagcaguauggcgauugucugggcgacauugccgccagggaucugauuugcgcccagaaguuuaacggacugacagugcugccuccucugcugaccgaugagaugaucgcccaguacacaucugcccugcuggccggcacaaucacaagcggcuggacauuuggagcuggcgccgcucugcagauccccuuugcuaugcagauggccuaccgguucaacggcaucggagugacccagaaugugcuguacgagaaccagaagcugaucgccaaccaguucaacagcgccaucggcaagauccaggacagccugagcagcacagcaagcgcccugggaaagcugcaggacguggucaaccagaaugcccaggcacugaacacccuggucaagcagcuguccuccaacuucggcgccaucagcucugugcugaacgauauccugagcagacuggacaaggucgaggccgaggugcagaucgacagacugaucacaggcagacugcagagccuccagacauacgugacccagcagcugaucagagccgccgagauuagagccucugccaaucuggccgccaccaagaugucugagugugugcugggccagagcaagagaguggacuuuugcggcaagggcuaccaccugaugagcuucccucagucugccccucacggcgugguguuucugcacgugacauaugugcccgcucaagagaagaauuucaccaccgcuccagccaucugccacgacggcaaagcccacuuuccuagagaaggcguguucguguccaacggcacccauugguucgugacacagcggaacuucuacgagccccagaucaucaccaccgacaacaccuucgugucuggcaacugcgacguugugaucggcauugugaacaauaccguguacgacccucugcagcccgagcuggacagcuucaaagaggaacuggacaaguacuuuaagaaccacacaagccccgacguggaccugggcgauaucagcggaaucaaugccagcgucgugaacauccagaaagagaucgaccggcugaacgagguggccaagaaucugaacgagagccugaucgaccugcaagaacuggggaaguacgagcaguacaucaagggaggaucuggcuauauccccgaggcuccuagagauggccaggccuauguucggaaggauggcgaaugggugcugcugagcaccuuccuuuga

SEQ ID NO: 12115 - RNA, 3726 nt, Artificial Sequence
  SARS-CoV-2/Wuhan/WIV05/2019__EPI_ISL_402128 spike protein CDS gc mod (1-1211)(K986P_V987P) Foldon construct
auguucguguuucuggugcugcugccccugguguccagccagugugugaaccugaccaccagaacacagcugccuccagccuacaccaacagcuucaccagaggcguguacuaccccgacaagguguucagauccagcgugcugcacucuacccaggaccuguuccugccuuucuucagcaacgugaccugguuccacgccauccacguguccggcaccaauggcaccaagagauucgacaaccccgugcugcccuucaacgacgggguguacuuugccagcaccgagaaguccaacaucaucagaggcuggaucuucggcaccacacuggacagcaagacccagagccugcugaucgugaacaacgccaccaacguggucaucaaagugugcgaguuccaguucugcaacgaccccuuccugggcgucuacuaccacaagaacaacaagagcuggauggaaagcgaguuccggguguacagcagcgccaacaacugcaccuucgaguacgugucccagccuuuccugauggaccuggaaggcaagcagggcaacuucaagaaccugcgcgaguucguguucaagaacaucgacggcuacuucaaaaucuacagcaagcacaccccuaucaaccucgugcgggaucugccucagggcuucucugcucuggaaccccugguggaucugcccaucggcaucaacaucacccgguuucagacacugcuggcccugcacagaagcuaccugacaccuggcgauagcagcagcggauggacagcuggugccgccgcuuacuaugugggcuaccugcagccuagaaccuuccugcugaaguacaacgagaacggcaccaucaccgacgccguggauugugcucuggauccucugagcgagacaaagugcacccugaaguccuucaccguggaaaagggcaucuaccagaccagcaacuuccgggugcagcccaccgaauccaucgugcgguuccccaauaucaccaaucugugccccuucggcgagguguucaaugccaccagauucgccucuguguacgccuggaaccggaagcggaucagcaauugcguggccgacuacuccgugcuguacaacuccgccagcuucagcaccuucaagugcuacggcguguccccuaccaagcugaacgaccugugcuucacaaacguguacgccgacagcuucgugauccggggagaugaagugcggcagauugccccuggacagacaggcaagaucgccgacuacaacuacaagcugcccgacgacuucaccggcugugugauugccuggaacagcaacaaccuggacuccaaagucggcggcaacuacaauuaccuguaccggcuguuccggaaguccaaucugaagcccuucgagcgggacaucagcaccgaaaucuaucaggccggcagcaccccuugcaacggcguggaaggcuucaacugcuacuucccacugcaguccuacggcuuucagcccacaaauggcgugggcuaucagcccuacagagugguggugcugagcuucgaacugcugcaugcuccugccacagugugcggcccuaagaaaagcaccaaucucgugaagaacaaaugcgugaacuucaacuucaacggccugaccggcaccggcgugcugacagagagcaacaagaaguuccugccauuccagcaguuuggccgggauaucgccgauaccacagacgccguuagagauccccagacacuggaaauccuggacaucaccccaugcagcuucggcggagugucugugaucaccccuggcaccaacaccagcaaucagguggcagugcuguaccaggacgugaacuguaccgaagugcccguggccauucacgccgaucagcugacaccuacauggcggguguacuccaccggcagcaauguguuucagaccagagccggcugucugaucggagccgagcacgugaacaauagcuacgagugcgacauccccaucggcgcuggcaucugugccagcuaccagacacagacaaacagccccagacgggcuagaagcguggccagccagagcaucauugccuacacaaugucucugggcgccgagaacagcguggccuacuccaacaacucuaucgcuauccccaccaacuucaccaucagcgugaccaccgagauccugccuguguccaugaccaagaccagcguggacugcaccauguacaucugcggcgauuccaccgagugcuccaaccugcugcugcaguacggcagcuucugcacccagcugaauagagcccugacagggaucgccguggaacaggacaagaacacccaagagguguucgcccaagugaagcaaaucuacaagaccccuccuaucaaggacuucggcggcuucaauuucagccagauucugcccgauccuagcaagcccagcaagcggagcuucaucgaggaccugcuguucaacaaagugacacuggccgacgccggcuucaucaagcaguauggcgauugucugggcgacauugccgccagggaucugauuugcgcccagaaguuuaacggacugacagugcugccuccucugcugaccgaugagaugaucgcccaguacacaucugcccugcuggccggcacaaucacaagcggcuggacauuuggagcuggcgccgcucugcagauccccuuugcuaugcagauggccuaccgguucaacggcaucggagugacccagaaugugcuguacgagaaccagaagcugaucgccaaccaguucaacagcgccaucggcaagauccaggacagccugagcagcacagcaagcgcccugggaaagcugcaggacguggucaaccagaaugcccaggcacugaacacccuggucaagcagcuguccuccaacuucggcgccaucagcucugugcugaacgauauccugagcagacuggacccuccugaggccgaggugcagaucgacagacugaucacaggcagacugcagagccuccagacauacgugacccagcagcugaucagagccgccgagauuagagccucugccaaucuggccgccaccaagaugucugagugugugcugggccagagcaagagaguggacuuuugcggcaagggcuaccaccugaugagcuucccucagucugccccucacggcgugguguuucugcacgugacauaugugcccgcucaagagaagaauuucaccaccgcuccagccaucugccacgacggcaaagcccacuuuccuagagaaggcguguucguguccaacggcacccauugguucgugacacagcggaacuucuacgagccccagaucaucaccaccgacaacaccuucgugucuggcaacugcgacguugugaucggcauugugaacaauaccguguacgacccucugcagcccgagcuggacagcuucaaagaggaacuggacaaguacuuuaagaaccacacaagccccgacguggaccugggcgauaucagcggaaucaaugccagcgucgugaacauccagaaagagaucgaccggcugaacgagguggccaagaaucugaacgagagccugaucgaccugcaagaacuggggaaguacgagcaguacaucaagggaggaucuggcuauauccccgaggcuccuagagauggccaggccuauguucggaaggauggcgaaugggugcugcugagcaccuuccuuuga

SEQ ID NO: 12116 - RNA, 3726 nt, Artificial Sequence
  SARS-CoV-2/Wuhan/WIV05/2019__EPI_ISL_402128 spike protein CDS gc mod (1-1211)(K986P_V987P_T887WN_A1020W) Foldon construct
auguucguguuucuggugcugcugccccugguguccagccagugugugaaccugaccaccagaacacagcugccuccagccuacaccaacagcuucaccagaggcguguacuaccccgacaagguguucagauccagcgugcugcacucuacccaggaccuguuccugccuuucuucagcaacgugaccugguuccacgccauccacguguccggcaccaauggcaccaagagauucgacaaccccgugcugcccuucaacgacgggguguacuuugccagcaccgagaaguccaacaucaucagaggcuggaucuucggcaccacacuggacagcaagacccagagccugcugaucgugaacaacgccaccaacguggucaucaaagugugcgaguuccaguucugcaacgaccccuuccugggcgucuacuaccacaagaacaacaagagcuggauggaaagcgaguuccggguguacagcagcgccaacaacugcaccuucgaguacgugucccagccuuuccugauggaccuggaaggcaagcagggcaacuucaagaaccugcgcgaguucguguucaagaacaucgacggcuacuucaaaaucuacagcaagcacaccccuaucaaccucgugcgggaucugccucagggcuucucugcucuggaaccccugguggaucugcccaucggcaucaacaucacccgguuucagacacugcuggcccugcacagaagcuaccugacaccuggcgauagcagcagcggauggacagcuggugccgccgcuuacuaugugggcuaccugcagccuagaaccuuccugcugaaguacaacgagaacggcaccaucaccgacgccguggauugugcucuggauccucugagcgagacaaagugcacccugaaguccuucaccguggaaaagggcaucuaccagaccagcaacuuccgggugcagcccaccgaauccaucgugcgguuccccaauaucaccaaucugugccccuucggcgagguguucaaugccaccagauucgccucuguguacgccuggaaccggaagcggaucagcaauugcguggccgacuacuccgugcuguacaacuccgccagcuucagcaccuucaagugcuacggcguguccccuaccaagcugaacgaccugugcuucacaaacguguacgccgacagcuucgugauccggggagaugaagugcggcagauugccccuggacagacaggcaagaucgccgacuacaacuacaagcugcccgacgacuucaccggcugugugauugccuggaacagcaacaaccuggacuccaaagucggcggcaacuacaauuaccuguaccggcuguuccggaaguccaaucugaagcccuucgagcgggacaucagcaccgaaaucuaucaggccggcagcaccccuugcaacggcguggaaggcuucaacugcuacuucccacugcaguccuacggcuuucagcccacaaauggcgugggcuaucagcccuacagagugguggugcugagcuucgaacugcugcaugcuccugccacagugugcggcccuaagaaaagcaccaaucucgugaagaacaaaugcgugaacuucaacuucaacggccugaccggcaccggcgugcugacagagagcaacaagaaguuccugccauuccagcaguuuggccgggauaucgccgauaccacagacgccguuagagauccccagacacuggaaauccuggacaucaccccaugcagcuucggcggagugucugugaucaccccuggcaccaacaccagcaaucagguggcagugcuguaccaggacgugaacuguaccgaagugcccguggccauucacgccgaucagcugacaccuacauggcggguguacuccaccggcagcaauguguuucagaccagagccggcugucugaucggagccgagcacgugaacaauagcuacgagugcgacauccccaucggcgcuggcaucugugccagcuaccagacacagacaaacagccccagacgggcuagaagcguggccagccagagcaucauugccuacacaaugucucugggcgccgagaacagcguggccuacuccaacaacucuaucgcuauccccaccaacuucaccaucagcgugaccaccgagauccugccuguguccaugaccaagaccagcguggacugcaccauguacaucugcggcgauuccaccgagugcuccaaccugcugcugcaguacggcagcuucugcacccagcugaauagagcccugacagggaucgccguggaacaggacaagaacacccaagagguguucgcccaagugaagcaaaucuacaagaccccuccuaucaaggacuucggcggcuucaauuucagccagauucugcccgauccuagcaagcccagcaagcggagcuucaucgaggaccugcuguucaacaaagugacacuggccgacgccggcuucaucaagcaguauggcgauugucugggcgacauugccgccagggaucugauuugcgcccagaaguuuaacggacugacagugcugccuccucugcugaccgaugagaugaucgcccaguacacaucugcccugcuggccggcacaaucacaagcggcuggugguuuggagcuggcgccgcucugcagauccccuuugcuaugcagauggccuaccgguucaacggcaucggagugacccagaaugugcuguacgagaaccagaagcugaucgccaaccaguucaacagcgccaucggcaagauccaggacagccugagcagcacagcaagcgcccugggaaagcugcaggacguggucaaccagaaugcccaggcacugaacacccuggucaagcagcuguccuccaacuucggcgccaucagcucugugcugaacgauauccugagcagacuggacccuccugaggccgaggugcagaucgacagacugaucacaggcagacugcagagccuccagacauacgugacccagcagcugaucagagccgccgagauuagauggucugccaaucuggccgccaccaagaugucugagugugugcugggccagagcaagagaguggacuuuugcggcaagggcuaccaccugaugagcuucccucagucugccccucacggcgugguguuucugcacgugacauaugugcccgcucaagagaagaauuucaccaccgcuccagccaucugccacgacggcaaagcccacuuuccuagagaaggcguguucguguccaacggcacccauugguucgugacacagcggaacuucuacgagccccagaucaucaccaccgacaacaccuucgugucuggcaacugcgacguugugaucggcauugugaacaauaccguguacgacccucugcagcccgagcuggacagcuucaaagaggaacuggacaaguacuuuaagaaccacacaagccccgacguggaccugggcgauaucagcggaaucaaugccagcgucgugaacauccagaaagagaucgaccggcugaacgagguggccaagaaucugaacgagagccugaucgaccugcaagaacuggggaaguacgagcaguacaucaagggaggaucuggcuauauccccgaggcuccuagagauggccaggccuauguucggaaggauggcgaaugggugcugcugagcaccuuccuuuga

SEQ ID NO: 12117 - RNA, 3726 nt, Artificial Sequence
  SARS-CoV-2/Wuhan/WIV05/2019__EPI_ISL_402128 spike protein CDS gc mod (1-1211)(K986P_V987P_P1069F) Foldon construct
auguucguguuucuggugcugcugccccugguguccagccagugugugaaccugaccaccagaacacagcugccuccagccuacaccaacagcuucaccagaggcguguacuaccccgacaagguguucagauccagcgugcugcacucuacccaggaccuguuccugccuuucuucagcaacgugaccugguuccacgccauccacguguccggcaccaauggcaccaagagauucgacaaccccgugcugcccuucaacgacgggguguacuuugccagcaccgagaaguccaacaucaucagaggcuggaucuucggcaccacacuggacagcaagacccagagccugcugaucgugaacaacgccaccaacguggucaucaaagugugcgaguuccaguucugcaacgaccccuuccugggcgucuacuaccacaagaacaacaagagcuggauggaaagcgaguuccggguguacagcagcgccaacaacugcaccuucgaguacgugucccagccuuuccugauggaccuggaaggcaagcagggcaacuucaagaaccugcgcgaguucguguucaagaacaucgacggcuacuucaaaaucuacagcaagcacaccccuaucaaccucgugcgggaucugccucagggcuucucugcucuggaaccccugguggaucugcccaucggcaucaacaucacccgguuucagacacugcuggcccugcacagaagcuaccugacaccuggcgauagcagcagcggauggacagcuggugccgccgcuuacuaugugggcuaccugcagccuagaaccuuccugcugaaguacaacgagaacggcaccaucaccgacgccguggauugugcucuggauccucugagcgagacaaagugcacccugaaguccuucaccguggaaaagggcaucuaccagaccagcaacuuccgggugcagcccaccgaauccaucgugcgguuccccaauaucaccaaucugugccccuucggcgagguguucaaugccaccagauucgccucuguguacgccuggaaccggaagcggaucagcaauugcguggccgacuacuccgugcuguacaacuccgccagcuucagcaccuucaagugcuacggcguguccccuaccaagcugaacgaccugugcuucacaaacguguacgccgacagcuucgugauccggggagaugaagugcggcagauugccccuggacagacaggcaagaucgccgacuacaacuacaagcugcccgacgacuucaccggcugugugauugccuggaacagcaacaaccuggacuccaaagucggcggcaacuacaauuaccuguaccggcuguuccggaaguccaaucugaagcccuucgagcgggacaucagcaccgaaaucuaucaggccggcagcaccccuugcaacggcguggaaggcuucaacugcuacuucccacugcaguccuacggcuuucagcccacaaauggcgugggcuaucagcccuacagagugguggugcugagcuucgaacugcugcaugcuccugccacagugugcggcccuaagaaaagcaccaaucucgugaagaacaaaugcgugaacuucaacuucaacggccugaccggcaccggcgugcugacagagagcaacaagaaguuccugccauuccagcaguuuggccgggauaucgccgauaccacagacgccguuagagauccccagacacuggaaauccuggacaucaccccaugcagcuucggcggagugucugugaucaccccuggcaccaacaccagcaaucagguggcagugcuguaccaggacgugaacuguaccgaagugcccguggccauucacgccgaucagcugacaccuacauggcggguguacuccaccggcagcaauguguuucagaccagagccggcugucugaucggagccgagcacgugaacaauagcuacgagugcgacauccccaucggcgcuggcaucugugccagcuaccagacacagacaaacagccccagacgggcuagaagcguggccagccagagcaucauugccuacacaaugucucugggcgccgagaacagcguggccuacuccaacaacucuaucgcuauccccaccaacuucaccaucagcgugaccaccgagauccugccuguguccaugaccaagaccagcguggacugcaccauguacaucugcggcgauuccaccgagugcuccaaccugcugcugcaguacggcagcuucugcacccagcugaauagagcccugacagggaucgccguggaacaggacaagaacacccaagagguguucgcccaagugaagcaaaucuacaagaccccuccuaucaaggacuucggcggcuucaauuucagccagauucugcccgauccuagcaagcccagcaagcggagcuucaucgaggaccugcuguucaacaaagugacacuggccgacgccggcuucaucaagcaguauggcgauugucugggcgacauugccgccagggaucugauuugcgcccagaaguuuaacggacugacagugcugccuccucugcugaccgaugagaugaucgcccaguacacaucugcccugcuggccggcacaaucacaagcggcuggacauuuggagcuggcgccgcucugcagauccccuuugcuaugcagauggccuaccgguucaacggcaucggagugacccagaaugugcuguacgagaaccagaagcugaucgccaaccaguucaacagcgccaucggcaagauccaggacagccugagcagcacagcaagcgcccugggaaagcugcaggacguggucaaccagaaugcccaggcacugaacacccuggucaagcagcuguccuccaacuucggcgccaucagcucugugcugaacgauauccugagcagacuggacccuccugaggccgaggugcagaucgacagacugaucacaggcagacugcagagccuccagacauacgugacccagcagcugaucagagccgccgagauuagagccucugccaaucuggccgccaccaagaugucugagugugugcugggccagagcaagagaguggacuuuugcggcaagggcuaccaccugaugagcuucccucagucugccccucacggcgugguguuucugcacgugacauauguguucgcucaagagaagaauuucaccaccgcuccagccaucugccacgacggcaaagcccacuuuccuagagaaggcguguucguguccaacggcacccauugguucgugacacagcggaacuucuacgagccccagaucaucaccaccgacaacaccuucgugucuggcaacugcgacguugugaucggcauugugaacaauaccguguacgacccucugcagcccgagcuggacagcuucaaagaggaacuggacaaguacuuuaagaaccacacaagccccgacguggaccugggcgauaucagcggaaucaaugccagcgucgugaacauccagaaagagaucgaccggcugaacgagguggccaagaaucugaacgagagccugaucgaccugcaagaacuggggaaguacgagcaguacaucaagggaggaucuggcuauauccccgaggcuccuagagauggccaggccuauguucggaaggauggcgaaugggugcugcugagcaccuuccuuuga

SEQ ID NO: 12118 - RNA, 3726 nt, Artificial Sequence
  SARS-CoV-2/Wuhan/WIV05/2019__EPI_ISL_402128 spike protein CDS gc mod (1-1211)(K986P_V987P_ H1048Q_H1064N_ H1083N_H1101N) Foldon construct
auguucguguuucuggugcugcugccccugguguccagccagugugugaaccugaccaccagaacacagcugccuccagccuacaccaacagcuucaccagaggcguguacuaccccgacaagguguucagauccagcgugcugcacucuacccaggaccuguuccugccuuucuucagcaacgugaccugguuccacgccauccacguguccggcaccaauggcaccaagagauucgacaaccccgugcugcccuucaacgacgggguguacuuugccagcaccgagaaguccaacaucaucagaggcuggaucuucggcaccacacuggacagcaagacccagagccugcugaucgugaacaacgccaccaacguggucaucaaagugugcgaguuccaguucugcaacgaccccuuccugggcgucuacuaccacaagaacaacaagagcuggauggaaagcgaguuccggguguacagcagcgccaacaacugcaccuucgaguacgugucccagccuuuccugauggaccuggaaggcaagcagggcaacuucaagaaccugcgcgaguucguguucaagaacaucgacggcuacuucaaaaucuacagcaagcacaccccuaucaaccucgugcgggaucugccucagggcuucucugcucuggaaccccugguggaucugcccaucggcaucaacaucacccgguuucagacacugcuggcccugcacagaagcuaccugacaccuggcgauagcagcagcggauggacagcuggugccgccgcuuacuaugugggcuaccugcagccuagaaccuuccugcugaaguacaacgagaacggcaccaucaccgacgccguggauugugcucuggauccucugagcgagacaaagugcacccugaaguccuucaccguggaaaagggcaucuaccagaccagcaacuuccgggugcagcccaccgaauccaucgugcgguuccccaauaucaccaaucugugccccuucggcgagguguucaaugccaccagauucgccucuguguacgccuggaaccggaagcggaucagcaauugcguggccgacuacuccgugcuguacaacuccgccagcuucagcaccuucaagugcuacggcguguccccuaccaagcugaacgaccugugcuucacaaacguguacgccgacagcuucgugauccggggagaugaagugcggcagauugccccuggacagacaggcaagaucgccgacuacaacuacaagcugcccgacgacuucaccggcugugugauugccuggaacagcaacaaccuggacuccaaagucggcggcaacuacaauuaccuguaccggcuguuccggaaguccaaucugaagcccuucgagcgggacaucagcaccgaaaucuaucaggccggcagcaccccuugcaacggcguggaaggcuucaacugcuacuucccacugcaguccuacggcuuucagcccacaaauggcgugggcuaucagcccuacagagugguggugcugagcuucgaacugcugcaugcuccugccacagugugcggcccuaagaaaagcaccaaucucgugaagaacaaaugcgugaacuucaacuucaacggccugaccggcaccggcgugcugacagagagcaacaagaaguuccugccauuccagcaguuuggccgggauaucgccgauaccacagacgccguuagagauccccagacacuggaaauccuggacaucaccccaugcagcuucggcggagugucugugaucaccccuggcaccaacaccagcaaucagguggcagugcuguaccaggacgugaacuguaccgaagugcccguggccauucacgccgaucagcugacaccuacauggcggguguacuccaccggcagcaauguguuucagaccagagccggcugucugaucggagccgagcacgugaacaauagcuacgagugcgacauccccaucggcgcuggcaucugugccagcuaccagacacagacaaacagccccagacgggcuagaagcguggccagccagagcaucauugccuacacaaugucucugggcgccgagaacagcguggccuacuccaacaacucuaucgcuauccccaccaacuucaccaucagcgugaccaccgagauccugccuguguccaugaccaagaccagcguggacugcaccauguacaucugcggcgauuccaccgagugcuccaaccugcugcugcaguacggcagcuucugcacccagcugaauagagcccugacagggaucgccguggaacaggacaagaacacccaagagguguucgcccaagugaagcaaaucuacaagaccccuccuaucaaggacuucggcggcuucaauuucagccagauucugcccgauccuagcaagcccagcaagcggagcuucaucgaggaccugcuguucaacaaagugacacuggccgacgccggcuucaucaagcaguauggcgauugucugggcgacauugccgccagggaucugauuugcgcccagaaguuuaacggacugacagugcugccuccucugcugaccgaugagaugaucgcccaguacacaucugcccugcuggccggcacaaucacaagcggcuggacauuuggagcuggcgccgcucugcagauccccuuugcuaugcagauggccuaccgguucaacggcaucggagugacccagaaugugcuguacgagaaccagaagcugaucgccaaccaguucaacagcgccaucggcaagauccaggacagccugagcagcacagcaagcgcccugggaaagcugcaggacguggucaaccagaaugcccaggcacugaacacccuggucaagcagcuguccuccaacuucggcgccaucagcucugugcugaacgauauccugagcagacuggacccuccugaggccgaggugcagaucgacagacugaucacaggcagacugcagagccuccagacauacgugacccagcagcugaucagagccgccgagauuagagccucugccaaucuggccgccaccaagaugucugagugugugcugggccagagcaagagaguggacuuuugcggcaagggcuaccagcugaugagcuucccucagucugccccucacggcgugguguuucugaacgugacauaugugcccgcucaagagaagaauuucaccaccgcuccagccaucugcaacgacggcaaagcccacuuuccuagagaaggcguguucguguccaacggcaccaacugguucgugacacagcggaacuucuacgagccccagaucaucaccaccgacaacaccuucgugucuggcaacugcgacguugugaucggcauugugaacaauaccguguacgacccucugcagcccgagcuggacagcuucaaagaggaacuggacaaguacuuuaagaaccacacaagccccgacguggaccugggcgauaucagcggaaucaaugccagcgucgugaacauccagaaagagaucgaccggcugaacgagguggccaagaaucugaacgagagccugaucgaccugcaagaacuggggaaguacgagcaguacaucaagggaggaucuggcuauauccccgaggcuccuagagauggccaggccuauguucggaaggauggcgaaugggugcugcugagcaccuuccuuuga

SEQ ID NO: 12119 - RNA, 3726 nt, Artificial Sequence
  SARS-CoV-2/Wuhan/WIV05/2019__EPI_ISL_402128 spike protein CDS gc mod (1-1211)(I712C_T1077C) Foldon construct
auguucguguuucuggugcugcugccccugguguccagccagugugugaaccugaccaccagaacacagcugccuccagccuacaccaacagcuucaccagaggcguguacuaccccgacaagguguucagauccagcgugcugcacucuacccaggaccuguuccugccuuucuucagcaacgugaccugguuccacgccauccacguguccggcaccaauggcaccaagagauucgacaaccccgugcugcccuucaacgacgggguguacuuugccagcaccgagaaguccaacaucaucagaggcuggaucuucggcaccacacuggacagcaagacccagagccugcugaucgugaacaacgccaccaacguggucaucaaagugugcgaguuccaguucugcaacgaccccuuccugggcgucuacuaccacaagaacaacaagagcuggauggaaagcgaguuccggguguacagcagcgccaacaacugcaccuucgaguacgugucccagccuuuccugauggaccuggaaggcaagcagggcaacuucaagaaccugcgcgaguucguguucaagaacaucgacggcuacuucaaaaucuacagcaagcacaccccuaucaaccucgugcgggaucugccucagggcuucucugcucuggaaccccugguggaucugcccaucggcaucaacaucacccgguuucagacacugcuggcccugcacagaagcuaccugacaccuggcgauagcagcagcggauggacagcuggugccgccgcuuacuaugugggcuaccugcagccuagaaccuuccugcugaaguacaacgagaacggcaccaucaccgacgccguggauugugcucuggauccucugagcgagacaaagugcacccugaaguccuucaccguggaaaagggcaucuaccagaccagcaacuuccgggugcagcccaccgaauccaucgugcgguuccccaauaucaccaaucugugccccuucggcgagguguucaaugccaccagauucgccucuguguacgccuggaaccggaagcggaucagcaauugcguggccgacuacuccgugcuguacaacuccgccagcuucagcaccuucaagugcuacggcguguccccuaccaagcugaacgaccugugcuucacaaacguguacgccgacagcuucgugauccggggagaugaagugcggcagauugccccuggacagacaggcaagaucgccgacuacaacuacaagcugcccgacgacuucaccggcugugugauugccuggaacagcaacaaccuggacuccaaagucggcggcaacuacaauuaccuguaccggcuguuccggaaguccaaucugaagcccuucgagcgggacaucagcaccgaaaucuaucaggccggcagcaccccuugcaacggcguggaaggcuucaacugcuacuucccacugcaguccuacggcuuucagcccacaaauggcgugggcuaucagcccuacagagugguggugcugagcuucgaacugcugcaugcuccugccacagugugcggcccuaagaaaagcaccaaucucgugaagaacaaaugcgugaacuucaacuucaacggccugaccggcaccggcgugcugacagagagcaacaagaaguuccugccauuccagcaguuuggccgggauaucgccgauaccacagacgccguuagagauccccagacacuggaaauccuggacaucaccccaugcagcuucggcggagugucugugaucaccccuggcaccaacaccagcaaucagguggcagugcuguaccaggacgugaacuguaccgaagugcccguggccauucacgccgaucagcugacaccuacauggcggguguacuccaccggcagcaauguguuucagaccagagccggcugucugaucggagccgagcacgugaacaauagcuacgagugcgacauccccaucggcgcuggcaucugugccagcuaccagacacagacaaacagccccagacgggcuagaagcguggccagccagagcaucauugccuacacaaugucucugggcgccgagaacagcguggccuacuccaacaacucuugcgcuauccccaccaacuucaccaucagcgugaccaccgagauccugccuguguccaugaccaagaccagcguggacugcaccauguacaucugcggcgauuccaccgagugcuccaaccugcugcugcaguacggcagcuucugcacccagcugaauagagcccugacagggaucgccguggaacaggacaagaacacccaagagguguucgcccaagugaagcaaaucuacaagaccccuccuaucaaggacuucggcggcuucaauuucagccagauucugcccgauccuagcaagcccagcaagcggagcuucaucgaggaccugcuguucaacaaagugacacuggccgacgccggcuucaucaagcaguauggcgauugucugggcgacauugccgccagggaucugauuugcgcccagaaguuuaacggacugacagugcugccuccucugcugaccgaugagaugaucgcccaguacacaucugcccugcuggccggcacaaucacaagcggcuggacauuuggagcuggcgccgcucugcagauccccuuugcuaugcagauggccuaccgguucaacggcaucggagugacccagaaugugcuguacgagaaccagaagcugaucgccaaccaguucaacagcgccaucggcaagauccaggacagccugagcagcacagcaagcgcccugggaaagcugcaggacguggucaaccagaaugcccaggcacugaacacccuggucaagcagcuguccuccaacuucggcgccaucagcucugugcugaacgauauccugagcagacuggacaaggucgaggccgaggugcagaucgacagacugaucacaggcagacugcagagccuccagacauacgugacccagcagcugaucagagccgccgagauuagagccucugccaaucuggccgccaccaagaugucugagugugugcugggccagagcaagagaguggacuuuugcggcaagggcuaccaccugaugagcuucccucagucugccccucacggcgugguguuucugcacgugacauaugugcccgcucaagagaagaauuucaccugugcuccagccaucugccacgacggcaaagcccacuuuccuagagaaggcguguucguguccaacggcacccauugguucgugacacagcggaacuucuacgagccccagaucaucaccaccgacaacaccuucgugucuggcaacugcgacguugugaucggcauugugaacaauaccguguacgacccucugcagcccgagcuggacagcuucaaagaggaacuggacaaguacuuuaagaaccacacaagccccgacguggaccugggcgauaucagcggaaucaaugccagcgucgugaacauccagaaagagaucgaccggcugaacgagguggccaagaaucugaacgagagccugaucgaccugcaagaacuggggaaguacgagcaguacaucaagggaggaucuggcuauauccccgaggcuccuagagauggccaggccuauguucggaaggauggcgaaugggugcugcugagcaccuuccuuuga

SEQ ID NO: 12120 - RNA, 3726 nt, Artificial Sequence
  SARS-CoV-2/Wuhan/WIV05/2019__EPI_ISL_402128 spike protein CDS gc mod (1-1211)(I714C_Y1110C) Foldon construct
auguucguguuucuggugcugcugccccugguguccagccagugugugaaccugaccaccagaacacagcugccuccagccuacaccaacagcuucaccagaggcguguacuaccccgacaagguguucagauccagcgugcugcacucuacccaggaccuguuccugccuuucuucagcaacgugaccugguuccacgccauccacguguccggcaccaauggcaccaagagauucgacaaccccgugcugcccuucaacgacgggguguacuuugccagcaccgagaaguccaacaucaucagaggcuggaucuucggcaccacacuggacagcaagacccagagccugcugaucgugaacaacgccaccaacguggucaucaaagugugcgaguuccaguucugcaacgaccccuuccugggcgucuacuaccacaagaacaacaagagcuggauggaaagcgaguuccggguguacagcagcgccaacaacugcaccuucgaguacgugucccagccuuuccugauggaccuggaaggcaagcagggcaacuucaagaaccugcgcgaguucguguucaagaacaucgacggcuacuucaaaaucuacagcaagcacaccccuaucaaccucgugcgggaucugccucagggcuucucugcucuggaaccccugguggaucugcccaucggcaucaacaucacccgguuucagacacugcuggcccugcacagaagcuaccugacaccuggcgauagcagcagcggauggacagcuggugccgccgcuuacuaugugggcuaccugcagccuagaaccuuccugcugaaguacaacgagaacggcaccaucaccgacgccguggauugugcucuggauccucugagcgagacaaagugcacccugaaguccuucaccguggaaaagggcaucuaccagaccagcaacuuccgggugcagcccaccgaauccaucgugcgguuccccaauaucaccaaucugugccccuucggcgagguguucaaugccaccagauucgccucuguguacgccuggaaccggaagcggaucagcaauugcguggccgacuacuccgugcuguacaacuccgccagcuucagcaccuucaagugcuacggcguguccccuaccaagcugaacgaccugugcuucacaaacguguacgccgacagcuucgugauccggggagaugaagugcggcagauugccccuggacagacaggcaagaucgccgacuacaacuacaagcugcccgacgacuucaccggcugugugauugccuggaacagcaacaaccuggacuccaaagucggcggcaacuacaauuaccuguaccggcuguuccggaaguccaaucugaagcccuucgagcgggacaucagcaccgaaaucuaucaggccggcagcaccccuugcaacggcguggaaggcuucaacugcuacuucccacugcaguccuacggcuuucagcccacaaauggcgugggcuaucagcccuacagagugguggugcugagcuucgaacugcugcaugcuccugccacagugugcggcccuaagaaaagcaccaaucucgugaagaacaaaugcgugaacuucaacuucaacggccugaccggcaccggcgugcugacagagagcaacaagaaguuccugccauuccagcaguuuggccgggauaucgccgauaccacagacgccguuagagauccccagacacuggaaauccuggacaucaccccaugcagcuucggcggagugucugugaucaccccuggcaccaacaccagcaaucagguggcagugcuguaccaggacgugaacuguaccgaagugcccguggccauucacgccgaucagcugacaccuacauggcggguguacuccaccggcagcaauguguuucagaccagagccggcugucugaucggagccgagcacgugaacaauagcuacgagugcgacauccccaucggcgcuggcaucugugccagcuaccagacacagacaaacagccccagacgggcuagaagcguggccagccagagcaucauugccuacacaaugucucugggcgccgagaacagcguggccuacuccaacaacucuaucgcuugccccaccaacuucaccaucagcgugaccaccgagauccugccuguguccaugaccaagaccagcguggacugcaccauguacaucugcggcgauuccaccgagugcuccaaccugcugcugcaguacggcagcuucugcacccagcugaauagagcccugacagggaucgccguggaacaggacaagaacacccaagagguguucgcccaagugaagcaaaucuacaagaccccuccuaucaaggacuucggcggcuucaauuucagccagauucugcccgauccuagcaagcccagcaagcggagcuucaucgaggaccugcuguucaacaaagugacacuggccgacgccggcuucaucaagcaguauggcgauugucugggcgacauugccgccagggaucugauuugcgcccagaaguuuaacggacugacagugcugccuccucugcugaccgaugagaugaucgcccaguacacaucugcccugcuggccggcacaaucacaagcggcuggacauuuggagcuggcgccgcucugcagauccccuuugcuaugcagauggccuaccgguucaacggcaucggagugacccagaaugugcuguacgagaaccagaagcugaucgccaaccaguucaacagcgccaucggcaagauccaggacagccugagcagcacagcaagcgcccugggaaagcugcaggacguggucaaccagaaugcccaggcacugaacacccuggucaagcagcuguccuccaacuucggcgccaucagcucugugcugaacgauauccugagcagacuggacaaggucgaggccgaggugcagaucgacagacugaucacaggcagacugcagagccuccagacauacgugacccagcagcugaucagagccgccgagauuagagccucugccaaucuggccgccaccaagaugucugagugugugcugggccagagcaagagaguggacuuuugcggcaagggcuaccaccugaugagcuucccucagucugccccucacggcgugguguuucugcacgugacauaugugcccgcucaagagaagaauuucaccaccgcuccagccaucugccacgacggcaaagcccacuuuccuagagaaggcguguucguguccaacggcacccauugguucgugacacagcggaacuucugugagccccagaucaucaccaccgacaacaccuucgugucuggcaacugcgacguugugaucggcauugugaacaauaccguguacgacccucugcagcccgagcuggacagcuucaaagaggaacuggacaaguacuuuaagaaccacacaagccccgacguggaccugggcgauaucagcggaaucaaugccagcgucgugaacauccagaaagagaucgaccggcugaacgagguggccaagaaucugaacgagagccugaucgaccugcaagaacuggggaaguacgagcaguacaucaagggaggaucuggcuauauccccgaggcuccuagagauggccaggccuauguucggaaggauggcgaaugggugcugcugagcaccuuccuuuga

SEQ ID NO: 12121 - RNA, 3726 nt, Artificial Sequence
  SARS-CoV-2/Wuhan/WIV05/2019__EPI_ISL_402128 spike protein CDS gc mod (1-1211)(P715C_P1069C) Foldon construct
auguucguguuucuggugcugcugccccugguguccagccagugugugaaccugaccaccagaacacagcugccuccagccuacaccaacagcuucaccagaggcguguacuaccccgacaagguguucagauccagcgugcugcacucuacccaggaccuguuccugccuuucuucagcaacgugaccugguuccacgccauccacguguccggcaccaauggcaccaagagauucgacaaccccgugcugcccuucaacgacgggguguacuuugccagcaccgagaaguccaacaucaucagaggcuggaucuucggcaccacacuggacagcaagacccagagccugcugaucgugaacaacgccaccaacguggucaucaaagugugcgaguuccaguucugcaacgaccccuuccugggcgucuacuaccacaagaacaacaagagcuggauggaaagcgaguuccggguguacagcagcgccaacaacugcaccuucgaguacgugucccagccuuuccugauggaccuggaaggcaagcagggcaacuucaagaaccugcgcgaguucguguucaagaacaucgacggcuacuucaaaaucuacagcaagcacaccccuaucaaccucgugcgggaucugccucagggcuucucugcucuggaaccccugguggaucugcccaucggcaucaacaucacccgguuucagacacugcuggcccugcacagaagcuaccugacaccuggcgauagcagcagcggauggacagcuggugccgccgcuuacuaugugggcuaccugcagccuagaaccuuccugcugaaguacaacgagaacggcaccaucaccgacgccguggauugugcucuggauccucugagcgagacaaagugcacccugaaguccuucaccguggaaaagggcaucuaccagaccagcaacuuccgggugcagcccaccgaauccaucgugcgguuccccaauaucaccaaucugugccccuucggcgagguguucaaugccaccagauucgccucuguguacgccuggaaccggaagcggaucagcaauugcguggccgacuacuccgugcuguacaacuccgccagcuucagcaccuucaagugcuacggcguguccccuaccaagcugaacgaccugugcuucacaaacguguacgccgacagcuucgugauccggggagaugaagugcggcagauugccccuggacagacaggcaagaucgccgacuacaacuacaagcugcccgacgacuucaccggcugugugauugccuggaacagcaacaaccuggacuccaaagucggcggcaacuacaauuaccuguaccggcuguuccggaaguccaaucugaagcccuucgagcgggacaucagcaccgaaaucuaucaggccggcagcaccccuugcaacggcguggaaggcuucaacugcuacuucccacugcaguccuacggcuuucagcccacaaauggcgugggcuaucagcccuacagagugguggugcugagcuucgaacugcugcaugcuccugccacagugugcggcccuaagaaaagcaccaaucucgugaagaacaaaugcgugaacuucaacuucaacggccugaccggcaccggcgugcugacagagagcaacaagaaguuccugccauuccagcaguuuggccgggauaucgccgauaccacagacgccguuagagauccccagacacuggaaauccuggacaucaccccaugcagcuucggcggagugucugugaucaccccuggcaccaacaccagcaaucagguggcagugcuguaccaggacgugaacuguaccgaagugcccguggccauucacgccgaucagcugacaccuacauggcggguguacuccaccggcagcaauguguuucagaccagagccggcugucugaucggagccgagcacgugaacaauagcuacgagugcgacauccccaucggcgcuggcaucugugccagcuaccagacacagacaaacagccccagacgggcuagaagcguggccagccagagcaucauugccuacacaaugucucugggcgccgagaacagcguggccuacuccaacaacucuaucgcuaucugcaccaacuucaccaucagcgugaccaccgagauccugccuguguccaugaccaagaccagcguggacugcaccauguacaucugcggcgauuccaccgagugcuccaaccugcugcugcaguacggcagcuucugcacccagcugaauagagcccugacagggaucgccguggaacaggacaagaacacccaagagguguucgcccaagugaagcaaaucuacaagaccccuccuaucaaggacuucggcggcuucaauuucagccagauucugcccgauccuagcaagcccagcaagcggagcuucaucgaggaccugcuguucaacaaagugacacuggccgacgccggcuucaucaagcaguauggcgauugucugggcgacauugccgccagggaucugauuugcgcccagaaguuuaacggacugacagugcugccuccucugcugaccgaugagaugaucgcccaguacacaucugcccugcuggccggcacaaucacaagcggcuggacauuuggagcuggcgccgcucugcagauccccuuugcuaugcagauggccuaccgguucaacggcaucggagugacccagaaugugcuguacgagaaccagaagcugaucgccaaccaguucaacagcgccaucggcaagauccaggacagccugagcagcacagcaagcgcccugggaaagcugcaggacguggucaaccagaaugcccaggcacugaacacccuggucaagcagcuguccuccaacuucggcgccaucagcucugugcugaacgauauccugagcagacuggacaaggucgaggccgaggugcagaucgacagacugaucacaggcagacugcagagccuccagacauacgugacccagcagcugaucagagccgccgagauuagagccucugccaaucuggccgccaccaagaugucugagugugugcugggccagagcaagagaguggacuuuugcggcaagggcuaccaccugaugagcuucccucagucugccccucacggcgugguguuucugcacgugacauaugugugugcucaagagaagaauuucaccaccgcuccagccaucugccacgacggcaaagcccacuuuccuagagaaggcguguucguguccaacggcacccauugguucgugacacagcggaacuucuacgagccccagaucaucaccaccgacaacaccuucgugucuggcaacugcgacguugugaucggcauugugaacaauaccguguacgacccucugcagcccgagcuggacagcuucaaagaggaacuggacaaguacuuuaagaaccacacaagccccgacguggaccugggcgauaucagcggaaucaaugccagcgucgugaacauccagaaagagaucgaccggcugaacgagguggccaagaaucugaacgagagccugaucgaccugcaagaacuggggaaguacgagcaguacaucaagggaggaucuggcuauauccccgaggcuccuagagauggccaggccuauguucggaaggauggcgaaugggugcugcugagcaccuuccuuuga

SEQ ID NO: 12122 - RNA, 3726 nt, Artificial Sequence
  SARS-CoV-2/Wuhan/WIV05/2019__EPI_ISL_402128 spike protein CDS gc mod (1-1211)(G889C_L1034C) Foldon construct
auguucguguuucuggugcugcugccccugguguccagccagugugugaaccugaccaccagaacacagcugccuccagccuacaccaacagcuucaccagaggcguguacuaccccgacaagguguucagauccagcgugcugcacucuacccaggaccuguuccugccuuucuucagcaacgugaccugguuccacgccauccacguguccggcaccaauggcaccaagagauucgacaaccccgugcugcccuucaacgacgggguguacuuugccagcaccgagaaguccaacaucaucagaggcuggaucuucggcaccacacuggacagcaagacccagagccugcugaucgugaacaacgccaccaacguggucaucaaagugugcgaguuccaguucugcaacgaccccuuccugggcgucuacuaccacaagaacaacaagagcuggauggaaagcgaguuccggguguacagcagcgccaacaacugcaccuucgaguacgugucccagccuuuccugauggaccuggaaggcaagcagggcaacuucaagaaccugcgcgaguucguguucaagaacaucgacggcuacuucaaaaucuacagcaagcacaccccuaucaaccucgugcgggaucugccucagggcuucucugcucuggaaccccugguggaucugcccaucggcaucaacaucacccgguuucagacacugcuggcccugcacagaagcuaccugacaccuggcgauagcagcagcggauggacagcuggugccgccgcuuacuaugugggcuaccugcagccuagaaccuuccugcugaaguacaacgagaacggcaccaucaccgacgccguggauugugcucuggauccucugagcgagacaaagugcacccugaaguccuucaccguggaaaagggcaucuaccagaccagcaacuuccgggugcagcccaccgaauccaucgugcgguuccccaauaucaccaaucugugccccuucggcgagguguucaaugccaccagauucgccucuguguacgccuggaaccggaagcggaucagcaauugcguggccgacuacuccgugcuguacaacuccgccagcuucagcaccuucaagugcuacggcguguccccuaccaagcugaacgaccugugcuucacaaacguguacgccgacagcuucgugauccggggagaugaagugcggcagauugccccuggacagacaggcaagaucgccgacuacaacuacaagcugcccgacgacuucaccggcugugugauugccuggaacagcaacaaccuggacuccaaagucggcggcaacuacaauuaccuguaccggcuguuccggaaguccaaucugaagcccuucgagcgggacaucagcaccgaaaucuaucaggccggcagcaccccuugcaacggcguggaaggcuucaacugcuacuucccacugcaguccuacggcuuucagcccacaaauggcgugggcuaucagcccuacagagugguggugcugagcuucgaacugcugcaugcuccugccacagugugcggcccuaagaaaagcaccaaucucgugaagaacaaaugcgugaacuucaacuucaacggccugaccggcaccggcgugcugacagagagcaacaagaaguuccugccauuccagcaguuuggccgggauaucgccgauaccacagacgccguuagagauccccagacacuggaaauccuggacaucaccccaugcagcuucggcggagugucugugaucaccccuggcaccaacaccagcaaucagguggcagugcuguaccaggacgugaacuguaccgaagugcccguggccauucacgccgaucagcugacaccuacauggcggguguacuccaccggcagcaauguguuucagaccagagccggcugucugaucggagccgagcacgugaacaauagcuacgagugcgacauccccaucggcgcuggcaucugugccagcuaccagacacagacaaacagccccagacgggcuagaagcguggccagccagagcaucauugccuacacaaugucucugggcgccgagaacagcguggccuacuccaacaacucuaucgcuauccccaccaacuucaccaucagcgugaccaccgagauccugccuguguccaugaccaagaccagcguggacugcaccauguacaucugcggcgauuccaccgagugcuccaaccugcugcugcaguacggcagcuucugcacccagcugaauagagcccugacagggaucgccguggaacaggacaagaacacccaagagguguucgcccaagugaagcaaaucuacaagaccccuccuaucaaggacuucggcggcuucaauuucagccagauucugcccgauccuagcaagcccagcaagcggagcuucaucgaggaccugcuguucaacaaagugacacuggccgacgccggcuucaucaagcaguauggcgauugucugggcgacauugccgccagggaucugauuugcgcccagaaguuuaacggacugacagugcugccuccucugcugaccgaugagaugaucgcccaguacacaucugcccugcuggccggcacaaucacaagcggcuggacauuuugcgcuggcgccgcucugcagauccccuuugcuaugcagauggccuaccgguucaacggcaucggagugacccagaaugugcuguacgagaaccagaagcugaucgccaaccaguucaacagcgccaucggcaagauccaggacagccugagcagcacagcaagcgcccugggaaagcugcaggacguggucaaccagaaugcccaggcacugaacacccuggucaagcagcuguccuccaacuucggcgccaucagcucugugcugaacgauauccugagcagacuggacaaggucgaggccgaggugcagaucgacagacugaucacaggcagacugcagagccuccagacauacgugacccagcagcugaucagagccgccgagauuagagccucugccaaucuggccgccaccaagaugucugaguguguguguggccagagcaagagaguggacuuuugcggcaagggcuaccaccugaugagcuucccucagucugccccucacggcgugguguuucugcacgugacauaugugcccgcucaagagaagaauuucaccaccgcuccagccaucugccacgacggcaaagcccacuuuccuagagaaggcguguucguguccaacggcacccauugguucgugacacagcggaacuucuacgagccccagaucaucaccaccgacaacaccuucgugucuggcaacugcgacguugugaucggcauugugaacaauaccguguacgacccucugcagcccgagcuggacagcuucaaagaggaacuggacaaguacuuuaagaaccacacaagccccgacguggaccugggcgauaucagcggaaucaaugccagcgucgugaacauccagaaagagaucgaccggcugaacgagguggccaagaaucugaacgagagccugaucgaccugcaagaacuggggaaguacgagcaguacaucaagggaggaucuggcuauauccccgaggcuccuagagauggccaggccuauguucggaaggauggcgaaugggugcugcugagcaccuuccuuuga

SEQ ID NO: 12123 - RNA, 3726 nt, Artificial Sequence
  SARS-CoV-2/Wuhan/WIV05/2019__EPI_ISL_402128 spike protein CDS gc mod (1-1211)(I909C_Y1047C) Foldon construct
auguucguguuucuggugcugcugccccugguguccagccagugugugaaccugaccaccagaacacagcugccuccagccuacaccaacagcuucaccagaggcguguacuaccccgacaagguguucagauccagcgugcugcacucuacccaggaccuguuccugccuuucuucagcaacgugaccugguuccacgccauccacguguccggcaccaauggcaccaagagauucgacaaccccgugcugcccuucaacgacgggguguacuuugccagcaccgagaaguccaacaucaucagaggcuggaucuucggcaccacacuggacagcaagacccagagccugcugaucgugaacaacgccaccaacguggucaucaaagugugcgaguuccaguucugcaacgaccccuuccugggcgucuacuaccacaagaacaacaagagcuggauggaaagcgaguuccggguguacagcagcgccaacaacugcaccuucgaguacgugucccagccuuuccugauggaccuggaaggcaagcagggcaacuucaagaaccugcgcgaguucguguucaagaacaucgacggcuacuucaaaaucuacagcaagcacaccccuaucaaccucgugcgggaucugccucagggcuucucugcucuggaaccccugguggaucugcccaucggcaucaacaucacccgguuucagacacugcuggcccugcacagaagcuaccugacaccuggcgauagcagcagcggauggacagcuggugccgccgcuuacuaugugggcuaccugcagccuagaaccuuccugcugaaguacaacgagaacggcaccaucaccgacgccguggauugugcucuggauccucugagcgagacaaagugcacccugaaguccuucaccguggaaaagggcaucuaccagaccagcaacuuccgggugcagcccaccgaauccaucgugcgguuccccaauaucaccaaucugugccccuucggcgagguguucaaugccaccagauucgccucuguguacgccuggaaccggaagcggaucagcaauugcguggccgacuacuccgugcuguacaacuccgccagcuucagcaccuucaagugcuacggcguguccccuaccaagcugaacgaccugugcuucacaaacguguacgccgacagcuucgugauccggggagaugaagugcggcagauugccccuggacagacaggcaagaucgccgacuacaacuacaagcugcccgacgacuucaccggcugugugauugccuggaacagcaacaaccuggacuccaaagucggcggcaacuacaauuaccuguaccggcuguuccggaaguccaaucugaagcccuucgagcgggacaucagcaccgaaaucuaucaggccggcagcaccccuugcaacggcguggaaggcuucaacugcuacuucccacugcaguccuacggcuuucagcccacaaauggcgugggcuaucagcccuacagagugguggugcugagcuucgaacugcugcaugcuccugccacagugugcggcccuaagaaaagcaccaaucucgugaagaacaaaugcgugaacuucaacuucaacggccugaccggcaccggcgugcugacagagagcaacaagaaguuccugccauuccagcaguuuggccgggauaucgccgauaccacagacgccguuagagauccccagacacuggaaauccuggacaucaccccaugcagcuucggcggagugucugugaucaccccuggcaccaacaccagcaaucagguggcagugcuguaccaggacgugaacuguaccgaagugcccguggccauucacgccgaucagcugacaccuacauggcggguguacuccaccggcagcaauguguuucagaccagagccggcugucugaucggagccgagcacgugaacaauagcuacgagugcgacauccccaucggcgcuggcaucugugccagcuaccagacacagacaaacagccccagacgggcuagaagcguggccagccagagcaucauugccuacacaaugucucugggcgccgagaacagcguggccuacuccaacaacucuaucgcuauccccaccaacuucaccaucagcgugaccaccgagauccugccuguguccaugaccaagaccagcguggacugcaccauguacaucugcggcgauuccaccgagugcuccaaccugcugcugcaguacggcagcuucugcacccagcugaauagagcccugacagggaucgccguggaacaggacaagaacacccaagagguguucgcccaagugaagcaaaucuacaagaccccuccuaucaaggacuucggcggcuucaauuucagccagauucugcccgauccuagcaagcccagcaagcggagcuucaucgaggaccugcuguucaacaaagugacacuggccgacgccggcuucaucaagcaguauggcgauugucugggcgacauugccgccagggaucugauuugcgcccagaaguuuaacggacugacagugcugccuccucugcugaccgaugagaugaucgcccaguacacaucugcccugcuggccggcacaaucacaagcggcuggacauuuggagcuggcgccgcucugcagauccccuuugcuaugcagauggccuaccgguucaacggcugcggagugacccagaaugugcuguacgagaaccagaagcugaucgccaaccaguucaacagcgccaucggcaagauccaggacagccugagcagcacagcaagcgcccugggaaagcugcaggacguggucaaccagaaugcccaggcacugaacacccuggucaagcagcuguccuccaacuucggcgccaucagcucugugcugaacgauauccugagcagacuggacaaggucgaggccgaggugcagaucgacagacugaucacaggcagacugcagagccuccagacauacgugacccagcagcugaucagagccgccgagauuagagccucugccaaucuggccgccaccaagaugucugagugugugcugggccagagcaagagaguggacuuuugcggcaagggcugucaccugaugagcuucccucagucugccccucacggcgugguguuucugcacgugacauaugugcccgcucaagagaagaauuucaccaccgcuccagccaucugccacgacggcaaagcccacuuuccuagagaaggcguguucguguccaacggcacccauugguucgugacacagcggaacuucuacgagccccagaucaucaccaccgacaacaccuucgugucuggcaacugcgacguugugaucggcauugugaacaauaccguguacgacccucugcagcccgagcuggacagcuucaaagaggaacuggacaaguacuuuaagaaccacacaagccccgacguggaccugggcgauaucagcggaaucaaugccagcgucgugaacauccagaaagagaucgaccggcugaacgagguggccaagaaucugaacgagagccugaucgaccugcaagaacuggggaaguacgagcaguacaucaagggaggaucuggcuauauccccgaggcuccuagagauggccaggccuauguucggaaggauggcgaaugggugcugcugagcaccuuccuuuga

SEQ ID NO: 12124 - RNA, 3726 nt, Artificial Sequence
  SARS-CoV-2/Wuhan/WIV05/2019__EPI_ISL_402128 spike protein CDS gc mod (1-1211)(Q965C_S1003C) Foldon construct
auguucguguuucuggugcugcugccccugguguccagccagugugugaaccugaccaccagaacacagcugccuccagccuacaccaacagcuucaccagaggcguguacuaccccgacaagguguucagauccagcgugcugcacucuacccaggaccuguuccugccuuucuucagcaacgugaccugguuccacgccauccacguguccggcaccaauggcaccaagagauucgacaaccccgugcugcccuucaacgacgggguguacuuugccagcaccgagaaguccaacaucaucagaggcuggaucuucggcaccacacuggacagcaagacccagagccugcugaucgugaacaacgccaccaacguggucaucaaagugugcgaguuccaguucugcaacgaccccuuccugggcgucuacuaccacaagaacaacaagagcuggauggaaagcgaguuccggguguacagcagcgccaacaacugcaccuucgaguacgugucccagccuuuccugauggaccuggaaggcaagcagggcaacuucaagaaccugcgcgaguucguguucaagaacaucgacggcuacuucaaaaucuacagcaagcacaccccuaucaaccucgugcgggaucugccucagggcuucucugcucuggaaccccugguggaucugcccaucggcaucaacaucacccgguuucagacacugcuggcccugcacagaagcuaccugacaccuggcgauagcagcagcggauggacagcuggugccgccgcuuacuaugugggcuaccugcagccuagaaccuuccugcugaaguacaacgagaacggcaccaucaccgacgccguggauugugcucuggauccucugagcgagacaaagugcacccugaaguccuucaccguggaaaagggcaucuaccagaccagcaacuuccgggugcagcccaccgaauccaucgugcgguuccccaauaucaccaaucugugccccuucggcgagguguucaaugccaccagauucgccucuguguacgccuggaaccggaagcggaucagcaauugcguggccgacuacuccgugcuguacaacuccgccagcuucagcaccuucaagugcuacggcguguccccuaccaagcugaacgaccugugcuucacaaacguguacgccgacagcuucgugauccggggagaugaagugcggcagauugccccuggacagacaggcaagaucgccgacuacaacuacaagcugcccgacgacuucaccggcugugugauugccuggaacagcaacaaccuggacuccaaagucggcggcaacuacaauuaccuguaccggcuguuccggaaguccaaucugaagcccuucgagcgggacaucagcaccgaaaucuaucaggccggcagcaccccuugcaacggcguggaaggcuucaacugcuacuucccacugcaguccuacggcuuucagcccacaaauggcgugggcuaucagcccuacagagugguggugcugagcuucgaacugcugcaugcuccugccacagugugcggcccuaagaaaagcaccaaucucgugaagaacaaaugcgugaacuucaacuucaacggccugaccggcaccggcgugcugacagagagcaacaagaaguuccugccauuccagcaguuuggccgggauaucgccgauaccacagacgccguuagagauccccagacacuggaaauccuggacaucaccccaugcagcuucggcggagugucugugaucaccccuggcaccaacaccagcaaucagguggcagugcuguaccaggacgugaacuguaccgaagugcccguggccauucacgccgaucagcugacaccuacauggcggguguacuccaccggcagcaauguguuucagaccagagccggcugucugaucggagccgagcacgugaacaauagcuacgagugcgacauccccaucggcgcuggcaucugugccagcuaccagacacagacaaacagccccagacgggcuagaagcguggccagccagagcaucauugccuacacaaugucucugggcgccgagaacagcguggccuacuccaacaacucuaucgcuauccccaccaacuucaccaucagcgugaccaccgagauccugccuguguccaugaccaagaccagcguggacugcaccauguacaucugcggcgauuccaccgagugcuccaaccugcugcugcaguacggcagcuucugcacccagcugaauagagcccugacagggaucgccguggaacaggacaagaacacccaagagguguucgcccaagugaagcaaaucuacaagaccccuccuaucaaggacuucggcggcuucaauuucagccagauucugcccgauccuagcaagcccagcaagcggagcuucaucgaggaccugcuguucaacaaagugacacuggccgacgccggcuucaucaagcaguauggcgauugucugggcgacauugccgccagggaucugauuugcgcccagaaguuuaacggacugacagugcugccuccucugcugaccgaugagaugaucgcccaguacacaucugcccugcuggccggcacaaucacaagcggcuggacauuuggagcuggcgccgcucugcagauccccuuugcuaugcagauggccuaccgguucaacggcaucggagugacccagaaugugcuguacgagaaccagaagcugaucgccaaccaguucaacagcgccaucggcaagauccaggacagccugagcagcacagcaagcgcccugggaaagcugcaggacguggucaaccagaaugcccaggcacugaacacccuggucaagugccuguccuccaacuucggcgccaucagcucugugcugaacgauauccugagcagacuggacaaggucgaggccgaggugcagaucgacagacugaucacaggcagacugcagugucuccagacauacgugacccagcagcugaucagagccgccgagauuagagccucugccaaucuggccgccaccaagaugucugagugugugcugggccagagcaagagaguggacuuuugcggcaagggcuaccaccugaugagcuucccucagucugccccucacggcgugguguuucugcacgugacauaugugcccgcucaagagaagaauuucaccaccgcuccagccaucugccacgacggcaaagcccacuuuccuagagaaggcguguucguguccaacggcacccauugguucgugacacagcggaacuucuacgagccccagaucaucaccaccgacaacaccuucgugucuggcaacugcgacguugugaucggcauugugaacaauaccguguacgacccucugcagcccgagcuggacagcuucaaagaggaacuggacaaguacuuuaagaaccacacaagccccgacguggaccugggcgauaucagcggaaucaaugccagcgucgugaacauccagaaagagaucgaccggcugaacgagguggccaagaaucugaacgagagccugaucgaccugcaagaacuggggaaguacgagcaguacaucaagggaggaucuggcuauauccccgaggcuccuagagauggccaggccuauguucggaaggauggcgaaugggugcugcugagcaccuuccuuuga

SEQ ID NO: 12125 - RNA, 3726 nt, Artificial Sequence
  SARS-CoV-2/Wuhan/WIV05/2019__EPI_ISL_402128 spike protein CDS gc mod (1-1211)(F970C_G999C) Foldon construct
auguucguguuucuggugcugcugccccugguguccagccagugugugaaccugaccaccagaacacagcugccuccagccuacaccaacagcuucaccagaggcguguacuaccccgacaagguguucagauccagcgugcugcacucuacccaggaccuguuccugccuuucuucagcaacgugaccugguuccacgccauccacguguccggcaccaauggcaccaagagauucgacaaccccgugcugcccuucaacgacgggguguacuuugccagcaccgagaaguccaacaucaucagaggcuggaucuucggcaccacacuggacagcaagacccagagccugcugaucgugaacaacgccaccaacguggucaucaaagugugcgaguuccaguucugcaacgaccccuuccugggcgucuacuaccacaagaacaacaagagcuggauggaaagcgaguuccggguguacagcagcgccaacaacugcaccuucgaguacgugucccagccuuuccugauggaccuggaaggcaagcagggcaacuucaagaaccugcgcgaguucguguucaagaacaucgacggcuacuucaaaaucuacagcaagcacaccccuaucaaccucgugcgggaucugccucagggcuucucugcucuggaaccccugguggaucugcccaucggcaucaacaucacccgguuucagacacugcuggcccugcacagaagcuaccugacaccuggcgauagcagcagcggauggacagcuggugccgccgcuuacuaugugggcuaccugcagccuagaaccuuccugcugaaguacaacgagaacggcaccaucaccgacgccguggauugugcucuggauccucugagcgagacaaagugcacccugaaguccuucaccguggaaaagggcaucuaccagaccagcaacuuccgggugcagcccaccgaauccaucgugcgguuccccaauaucaccaaucugugccccuucggcgagguguucaaugccaccagauucgccucuguguacgccuggaaccggaagcggaucagcaauugcguggccgacuacuccgugcuguacaacuccgccagcuucagcaccuucaagugcuacggcguguccccuaccaagcugaacgaccugugcuucacaaacguguacgccgacagcuucgugauccggggagaugaagugcggcagauugccccuggacagacaggcaagaucgccgacuacaacuacaagcugcccgacgacuucaccggcugugugauugccuggaacagcaacaaccuggacuccaaagucggcggcaacuacaauuaccuguaccggcuguuccggaaguccaaucugaagcccuucgagcgggacaucagcaccgaaaucuaucaggccggcagcaccccuugcaacggcguggaaggcuucaacugcuacuucccacugcaguccuacggcuuucagcccacaaauggcgugggcuaucagcccuacagagugguggugcugagcuucgaacugcugcaugcuccugccacagugugcggcccuaagaaaagcaccaaucucgugaagaacaaaugcgugaacuucaacuucaacggccugaccggcaccggcgugcugacagagagcaacaagaaguuccugccauuccagcaguuuggccgggauaucgccgauaccacagacgccguuagagauccccagacacuggaaauccuggacaucaccccaugcagcuucggcggagugucugugaucaccccuggcaccaacaccagcaaucagguggcagugcuguaccaggacgugaacuguaccgaagugcccguggccauucacgccgaucagcugacaccuacauggcggguguacuccaccggcagcaauguguuucagaccagagccggcugucugaucggagccgagcacgugaacaauagcuacgagugcgacauccccaucggcgcuggcaucugugccagcuaccagacacagacaaacagccccagacgggcuagaagcguggccagccagagcaucauugccuacacaaugucucugggcgccgagaacagcguggccuacuccaacaacucuaucgcuauccccaccaacuucaccaucagcgugaccaccgagauccugccuguguccaugaccaagaccagcguggacugcaccauguacaucugcggcgauuccaccgagugcuccaaccugcugcugcaguacggcagcuucugcacccagcugaauagagcccugacagggaucgccguggaacaggacaagaacacccaagagguguucgcccaagugaagcaaaucuacaagaccccuccuaucaaggacuucggcggcuucaauuucagccagauucugcccgauccuagcaagcccagcaagcggagcuucaucgaggaccugcuguucaacaaagugacacuggccgacgccggcuucaucaagcaguauggcgauugucugggcgacauugccgccagggaucugauuugcgcccagaaguuuaacggacugacagugcugccuccucugcugaccgaugagaugaucgcccaguacacaucugcccugcuggccggcacaaucacaagcggcuggacauuuggagcuggcgccgcucugcagauccccuuugcuaugcagauggccuaccgguucaacggcaucggagugacccagaaugugcuguacgagaaccagaagcugaucgccaaccaguucaacagcgccaucggcaagauccaggacagccugagcagcacagcaagcgcccugggaaagcugcaggacguggucaaccagaaugcccaggcacugaacacccuggucaagcagcuguccuccaacugcggcgccaucagcucugugcugaacgauauccugagcagacuggacaaggucgaggccgaggugcagaucgacagacugaucacauguagacugcagagccuccagacauacgugacccagcagcugaucagagccgccgagauuagagccucugccaaucuggccgccaccaagaugucugagugugugcugggccagagcaagagaguggacuuuugcggcaagggcuaccaccugaugagcuucccucagucugccccucacggcgugguguuucugcacgugacauaugugcccgcucaagagaagaauuucaccaccgcuccagccaucugccacgacggcaaagcccacuuuccuagagaaggcguguucguguccaacggcacccauugguucgugacacagcggaacuucuacgagccccagaucaucaccaccgacaacaccuucgugucuggcaacugcgacguugugaucggcauugugaacaauaccguguacgacccucugcagcccgagcuggacagcuucaaagaggaacuggacaaguacuuuaagaaccacacaagccccgacguggaccugggcgauaucagcggaaucaaugccagcgucgugaacauccagaaagagaucgaccggcugaacgagguggccaagaaucugaacgagagccugaucgaccugcaagaacuggggaaguacgagcaguacaucaagggaggaucuggcuauauccccgaggcuccuagagauggccaggccuauguucggaaggauggcgaaugggugcugcugagcaccuuccuuuga

SEQ ID NO: 12126 - RNA, 3726 nt, Artificial Sequence
  SARS-CoV-2/Wuhan/WIV05/2019__EPI_ISL_402128 spike protein CDS gc mod (1-1211)(A972C_R995C) Foldon construct
auguucguguuucuggugcugcugccccugguguccagccagugugugaaccugaccaccagaacacagcugccuccagccuacaccaacagcuucaccagaggcguguacuaccccgacaagguguucagauccagcgugcugcacucuacccaggaccuguuccugccuuucuucagcaacgugaccugguuccacgccauccacguguccggcaccaauggcaccaagagauucgacaaccccgugcugcccuucaacgacgggguguacuuugccagcaccgagaaguccaacaucaucagaggcuggaucuucggcaccacacuggacagcaagacccagagccugcugaucgugaacaacgccaccaacguggucaucaaagugugcgaguuccaguucugcaacgaccccuuccugggcgucuacuaccacaagaacaacaagagcuggauggaaagcgaguuccggguguacagcagcgccaacaacugcaccuucgaguacgugucccagccuuuccugauggaccuggaaggcaagcagggcaacuucaagaaccugcgcgaguucguguucaagaacaucgacggcuacuucaaaaucuacagcaagcacaccccuaucaaccucgugcgggaucugccucagggcuucucugcucuggaaccccugguggaucugcccaucggcaucaacaucacccgguuucagacacugcuggcccugcacagaagcuaccugacaccuggcgauagcagcagcggauggacagcuggugccgccgcuuacuaugugggcuaccugcagccuagaaccuuccugcugaaguacaacgagaacggcaccaucaccgacgccguggauugugcucuggauccucugagcgagacaaagugcacccugaaguccuucaccguggaaaagggcaucuaccagaccagcaacuuccgggugcagcccaccgaauccaucgugcgguuccccaauaucaccaaucugugccccuucggcgagguguucaaugccaccagauucgccucuguguacgccuggaaccggaagcggaucagcaauugcguggccgacuacuccgugcuguacaacuccgccagcuucagcaccuucaagugcuacggcguguccccuaccaagcugaacgaccugugcuucacaaacguguacgccgacagcuucgugauccggggagaugaagugcggcagauugccccuggacagacaggcaagaucgccgacuacaacuacaagcugcccgacgacuucaccggcugugugauugccuggaacagcaacaaccuggacuccaaagucggcggcaacuacaauuaccuguaccggcuguuccggaaguccaaucugaagcccuucgagcgggacaucagcaccgaaaucuaucaggccggcagcaccccuugcaacggcguggaaggcuucaacugcuacuucccacugcaguccuacggcuuucagcccacaaauggcgugggcuaucagcccuacagagugguggugcugagcuucgaacugcugcaugcuccugccacagugugcggcccuaagaaaagcaccaaucucgugaagaacaaaugcgugaacuucaacuucaacggccugaccggcaccggcgugcugacagagagcaacaagaaguuccugccauuccagcaguuuggccgggauaucgccgauaccacagacgccguuagagauccccagacacuggaaauccuggacaucaccccaugcagcuucggcggagugucugugaucaccccuggcaccaacaccagcaaucagguggcagugcuguaccaggacgugaacuguaccgaagugcccguggccauucacgccgaucagcugacaccuacauggcggguguacuccaccggcagcaauguguuucagaccagagccggcugucugaucggagccgagcacgugaacaauagcuacgagugcgacauccccaucggcgcuggcaucugugccagcuaccagacacagacaaacagccccagacgggcuagaagcguggccagccagagcaucauugccuacacaaugucucugggcgccgagaacagcguggccuacuccaacaacucuaucgcuauccccaccaacuucaccaucagcgugaccaccgagauccugccuguguccaugaccaagaccagcguggacugcaccauguacaucugcggcgauuccaccgagugcuccaaccugcugcugcaguacggcagcuucugcacccagcugaauagagcccugacagggaucgccguggaacaggacaagaacacccaagagguguucgcccaagugaagcaaaucuacaagaccccuccuaucaaggacuucggcggcuucaauuucagccagauucugcccgauccuagcaagcccagcaagcggagcuucaucgaggaccugcuguucaacaaagugacacuggccgacgccggcuucaucaagcaguauggcgauugucugggcgacauugccgccagggaucugauuugcgcccagaaguuuaacggacugacagugcugccuccucugcugaccgaugagaugaucgcccaguacacaucugcccugcuggccggcacaaucacaagcggcuggacauuuggagcuggcgccgcucugcagauccccuuugcuaugcagauggccuaccgguucaacggcaucggagugacccagaaugugcuguacgagaaccagaagcugaucgccaaccaguucaacagcgccaucggcaagauccaggacagccugagcagcacagcaagcgcccugggaaagcugcaggacguggucaaccagaaugcccaggcacugaacacccuggucaagcagcuguccuccaacuucggcugcaucagcucugugcugaacgauauccugagcagacuggacaaggucgaggccgaggugcagaucgacugucugaucacaggcagacugcagagccuccagacauacgugacccagcagcugaucagagccgccgagauuagagccucugccaaucuggccgccaccaagaugucugagugugugcugggccagagcaagagaguggacuuuugcggcaagggcuaccaccugaugagcuucccucagucugccccucacggcgugguguuucugcacgugacauaugugcccgcucaagagaagaauuucaccaccgcuccagccaucugccacgacggcaaagcccacuuuccuagagaaggcguguucguguccaacggcacccauugguucgugacacagcggaacuucuacgagccccagaucaucaccaccgacaacaccuucgugucuggcaacugcgacguugugaucggcauugugaacaauaccguguacgacccucugcagcccgagcuggacagcuucaaagaggaacuggacaaguacuuuaagaaccacacaagccccgacguggaccugggcgauaucagcggaaucaaugccagcgucgugaacauccagaaagagaucgaccggcugaacgagguggccaagaaucugaacgagagccugaucgaccugcaagaacuggggaaguacgagcaguacaucaagggaggaucuggcuauauccccgaggcuccuagagauggccaggccuauguucggaaggauggcgaaugggugcugcugagcaccuuccuuuga

SEQ ID NO: 12127 - RNA, 3726 nt, Artificial Sequence
  SARS-CoV-2/Wuhan/WIV05/2019__EPI_ISL_402128 spike protein CDS gc mod (1-1211)(A890C_V1040C) Foldon construct
auguucguguuucuggugcugcugccccugguguccagccagugugugaaccugaccaccagaacacagcugccuccagccuacaccaacagcuucaccagaggcguguacuaccccgacaagguguucagauccagcgugcugcacucuacccaggaccuguuccugccuuucuucagcaacgugaccugguuccacgccauccacguguccggcaccaauggcaccaagagauucgacaaccccgugcugcccuucaacgacgggguguacuuugccagcaccgagaaguccaacaucaucagaggcuggaucuucggcaccacacuggacagcaagacccagagccugcugaucgugaacaacgccaccaacguggucaucaaagugugcgaguuccaguucugcaacgaccccuuccugggcgucuacuaccacaagaacaacaagagcuggauggaaagcgaguuccggguguacagcagcgccaacaacugcaccuucgaguacgugucccagccuuuccugauggaccuggaaggcaagcagggcaacuucaagaaccugcgcgaguucguguucaagaacaucgacggcuacuucaaaaucuacagcaagcacaccccuaucaaccucgugcgggaucugccucagggcuucucugcucuggaaccccugguggaucugcccaucggcaucaacaucacccgguuucagacacugcuggcccugcacagaagcuaccugacaccuggcgauagcagcagcggauggacagcuggugccgccgcuuacuaugugggcuaccugcagccuagaaccuuccugcugaaguacaacgagaacggcaccaucaccgacgccguggauugugcucuggauccucugagcgagacaaagugcacccugaaguccuucaccguggaaaagggcaucuaccagaccagcaacuuccgggugcagcccaccgaauccaucgugcgguuccccaauaucaccaaucugugccccuucggcgagguguucaaugccaccagauucgccucuguguacgccuggaaccggaagcggaucagcaauugcguggccgacuacuccgugcuguacaacuccgccagcuucagcaccuucaagugcuacggcguguccccuaccaagcugaacgaccugugcuucacaaacguguacgccgacagcuucgugauccggggagaugaagugcggcagauugccccuggacagacaggcaagaucgccgacuacaacuacaagcugcccgacgacuucaccggcugugugauugccuggaacagcaacaaccuggacuccaaagucggcggcaacuacaauuaccuguaccggcuguuccggaaguccaaucugaagcccuucgagcgggacaucagcaccgaaaucuaucaggccggcagcaccccuugcaacggcguggaaggcuucaacugcuacuucccacugcaguccuacggcuuucagcccacaaauggcgugggcuaucagcccuacagagugguggugcugagcuucgaacugcugcaugcuccugccacagugugcggcccuaagaaaagcaccaaucucgugaagaacaaaugcgugaacuucaacuucaacggccugaccggcaccggcgugcugacagagagcaacaagaaguuccugccauuccagcaguuuggccgggauaucgccgauaccacagacgccguuagagauccccagacacuggaaauccuggacaucaccccaugcagcuucggcggagugucugugaucaccccuggcaccaacaccagcaaucagguggcagugcuguaccaggacgugaacuguaccgaagugcccguggccauucacgccgaucagcugacaccuacauggcggguguacuccaccggcagcaauguguuucagaccagagccggcugucugaucggagccgagcacgugaacaauagcuacgagugcgacauccccaucggcgcuggcaucugugccagcuaccagacacagacaaacagccccagacgggcuagaagcguggccagccagagcaucauugccuacacaaugucucugggcgccgagaacagcguggccuacuccaacaacucuaucgcuauccccaccaacuucaccaucagcgugaccaccgagauccugccuguguccaugaccaagaccagcguggacugcaccauguacaucugcggcgauuccaccgagugcuccaaccugcugcugcaguacggcagcuucugcacccagcugaauagagcccugacagggaucgccguggaacaggacaagaacacccaagagguguucgcccaagugaagcaaaucuacaagaccccuccuaucaaggacuucggcggcuucaauuucagccagauucugcccgauccuagcaagcccagcaagcggagcuucaucgaggaccugcuguucaacaaagugacacuggccgacgccggcuucaucaagcaguauggcgauugucugggcgacauugccgccagggaucugauuugcgcccagaaguuuaacggacugacagugcugccuccucugcugaccgaugagaugaucgcccaguacacaucugcccugcuggccggcacaaucacaagcggcuggacauuuggaugcggcgccgcucugcagauccccuuugcuaugcagauggccuaccgguucaacggcaucggagugacccagaaugugcuguacgagaaccagaagcugaucgccaaccaguucaacagcgccaucggcaagauccaggacagccugagcagcacagcaagcgcccugggaaagcugcaggacguggucaaccagaaugcccaggcacugaacacccuggucaagcagcuguccuccaacuucggcgccaucagcucugugcugaacgauauccugagcagacuggacaaggucgaggccgaggugcagaucgacagacugaucacaggcagacugcagagccuccagacauacgugacccagcagcugaucagagccgccgagauuagagccucugccaaucuggccgccaccaagaugucugagugugugcugggccagagcaagagaugugacuuuugcggcaagggcuaccaccugaugagcuucccucagucugccccucacggcgugguguuucugcacgugacauaugugcccgcucaagagaagaauuucaccaccgcuccagccaucugccacgacggcaaagcccacuuuccuagagaaggcguguucguguccaacggcacccauugguucgugacacagcggaacuucuacgagccccagaucaucaccaccgacaacaccuucgugucuggcaacugcgacguugugaucggcauugugaacaauaccguguacgacccucugcagcccgagcuggacagcuucaaagaggaacuggacaaguacuuuaagaaccacacaagccccgacguggaccugggcgauaucagcggaaucaaugccagcgucgugaacauccagaaagagaucgaccggcugaacgagguggccaagaaucugaacgagagccugaucgaccugcaagaacuggggaaguacgagcaguacaucaagggaggaucuggcuauauccccgaggcuccuagagauggccaggccuauguucggaaggauggcgaaugggugcugcugagcaccuuccuuuga

SEQ ID NO: 12128 - RNA, 3726 nt, Artificial Sequence
  SARS-CoV-2/Wuhan/WIV05/2019__EPI_ISL_402128 spike protein CDS gc mod (1-1211)(T874C_S1055C) Foldon construct
auguucguguuucuggugcugcugccccugguguccagccagugugugaaccugaccaccagaacacagcugccuccagccuacaccaacagcuucaccagaggcguguacuaccccgacaagguguucagauccagcgugcugcacucuacccaggaccuguuccugccuuucuucagcaacgugaccugguuccacgccauccacguguccggcaccaauggcaccaagagauucgacaaccccgugcugcccuucaacgacgggguguacuuugccagcaccgagaaguccaacaucaucagaggcuggaucuucggcaccacacuggacagcaagacccagagccugcugaucgugaacaacgccaccaacguggucaucaaagugugcgaguuccaguucugcaacgaccccuuccugggcgucuacuaccacaagaacaacaagagcuggauggaaagcgaguuccggguguacagcagcgccaacaacugcaccuucgaguacgugucccagccuuuccugauggaccuggaaggcaagcagggcaacuucaagaaccugcgcgaguucguguucaagaacaucgacggcuacuucaaaaucuacagcaagcacaccccuaucaaccucgugcgggaucugccucagggcuucucugcucuggaaccccugguggaucugcccaucggcaucaacaucacccgguuucagacacugcuggcccugcacagaagcuaccugacaccuggcgauagcagcagcggauggacagcuggugccgccgcuuacuaugugggcuaccugcagccuagaaccuuccugcugaaguacaacgagaacggcaccaucaccgacgccguggauugugcucuggauccucugagcgagacaaagugcacccugaaguccuucaccguggaaaagggcaucuaccagaccagcaacuuccgggugcagcccaccgaauccaucgugcgguuccccaauaucaccaaucugugccccuucggcgagguguucaaugccaccagauucgccucuguguacgccuggaaccggaagcggaucagcaauugcguggccgacuacuccgugcuguacaacuccgccagcuucagcaccuucaagugcuacggcguguccccuaccaagcugaacgaccugugcuucacaaacguguacgccgacagcuucgugauccggggagaugaagugcggcagauugccccuggacagacaggcaagaucgccgacuacaacuacaagcugcccgacgacuucaccggcugugugauugccuggaacagcaacaaccuggacuccaaagucggcggcaacuacaauuaccuguaccggcuguuccggaaguccaaucugaagcccuucgagcgggacaucagcaccgaaaucuaucaggccggcagcaccccuugcaacggcguggaaggcuucaacugcuacuucccacugcaguccuacggcuuucagcccacaaauggcgugggcuaucagcccuacagagugguggugcugagcuucgaacugcugcaugcuccugccacagugugcggcccuaagaaaagcaccaaucucgugaagaacaaaugcgugaacuucaacuucaacggccugaccggcaccggcgugcugacagagagcaacaagaaguuccugccauuccagcaguuuggccgggauaucgccgauaccacagacgccguuagagauccccagacacuggaaauccuggacaucaccccaugcagcuucggcggagugucugugaucaccccuggcaccaacaccagcaaucagguggcagugcuguaccaggacgugaacuguaccgaagugcccguggccauucacgccgaucagcugacaccuacauggcggguguacuccaccggcagcaauguguuucagaccagagccggcugucugaucggagccgagcacgugaacaauagcuacgagugcgacauccccaucggcgcuggcaucugugccagcuaccagacacagacaaacagccccagacgggcuagaagcguggccagccagagcaucauugccuacacaaugucucugggcgccgagaacagcguggccuacuccaacaacucuaucgcuauccccaccaacuucaccaucagcgugaccaccgagauccugccuguguccaugaccaagaccagcguggacugcaccauguacaucugcggcgauuccaccgagugcuccaaccugcugcugcaguacggcagcuucugcacccagcugaauagagcccugacagggaucgccguggaacaggacaagaacacccaagagguguucgcccaagugaagcaaaucuacaagaccccuccuaucaaggacuucggcggcuucaauuucagccagauucugcccgauccuagcaagcccagcaagcggagcuucaucgaggaccugcuguucaacaaagugacacuggccgacgccggcuucaucaagcaguauggcgauugucugggcgacauugccgccagggaucugauuugcgcccagaaguuuaacggacugacagugcugccuccucugcugaccgaugagaugaucgcccaguacugcucugcccugcuggccggcacaaucacaagcggcuggacauuuggagcuggcgccgcucugcagauccccuuugcuaugcagauggccuaccgguucaacggcaucggagugacccagaaugugcuguacgagaaccagaagcugaucgccaaccaguucaacagcgccaucggcaagauccaggacagccugagcagcacagcaagcgcccugggaaagcugcaggacguggucaaccagaaugcccaggcacugaacacccuggucaagcagcuguccuccaacuucggcgccaucagcucugugcugaacgauauccugagcagacuggacaaggucgaggccgaggugcagaucgacagacugaucacaggcagacugcagagccuccagacauacgugacccagcagcugaucagagccgccgagauuagagccucugccaaucuggccgccaccaagaugucugagugugugcugggccagagcaagagaguggacuuuugcggcaagggcuaccaccugaugagcuucccucagugcgccccucacggcgugguguuucugcacgugacauaugugcccgcucaagagaagaauuucaccaccgcuccagccaucugccacgacggcaaagcccacuuuccuagagaaggcguguucguguccaacggcacccauugguucgugacacagcggaacuucuacgagccccagaucaucaccaccgacaacaccuucgugucuggcaacugcgacguugugaucggcauugugaacaauaccguguacgacccucugcagcccgagcuggacagcuucaaagaggaacuggacaaguacuuuaagaaccacacaagccccgacguggaccugggcgauaucagcggaaucaaugccagcgucgugaacauccagaaagagaucgaccggcugaacgagguggccaagaaucugaacgagagccugaucgaccugcaagaacuggggaaguacgagcaguacaucaagggaggaucuggcuauauccccgaggcuccuagagauggccaggccuauguucggaaggauggcgaaugggugcugcugagcaccuuccuuuga

SEQ ID NO: 12129 - RNA, 4098 nt, Artificial Sequence
  SARS-CoV-2/Wuhan/WIV05/2019__EPI_ISL_402128 spike protein CDS gc mod (1-1211) WhcAg construct
auguucguguuucuggugcugcugccccugguguccagccagugugugaaccugaccaccagaacacagcugccuccagccuacaccaacagcuucaccagaggcguguacuaccccgacaagguguucagauccagcgugcugcacucuacccaggaccuguuccugccuuucuucagcaacgugaccugguuccacgccauccacguguccggcaccaauggcaccaagagauucgacaaccccgugcugcccuucaacgacgggguguacuuugccagcaccgagaaguccaacaucaucagaggcuggaucuucggcaccacacuggacagcaagacccagagccugcugaucgugaacaacgccaccaacguggucaucaaagugugcgaguuccaguucugcaacgaccccuuccugggcgucuacuaccacaagaacaacaagagcuggauggaaagcgaguuccggguguacagcagcgccaacaacugcaccuucgaguacgugucccagccuuuccugauggaccuggaaggcaagcagggcaacuucaagaaccugcgcgaguucguguucaagaacaucgacggcuacuucaaaaucuacagcaagcacaccccuaucaaccucgugcgggaucugccucagggcuucucugcucuggaaccccugguggaucugcccaucggcaucaacaucacccgguuucagacacugcuggcccugcacagaagcuaccugacaccuggcgauagcagcagcggauggacagcuggugccgccgcuuacuaugugggcuaccugcagccuagaaccuuccugcugaaguacaacgagaacggcaccaucaccgacgccguggauugugcucuggauccucugagcgagacaaagugcacccugaaguccuucaccguggaaaagggcaucuaccagaccagcaacuuccgggugcagcccaccgaauccaucgugcgguuccccaauaucaccaaucugugccccuucggcgagguguucaaugccaccagauucgccucuguguacgccuggaaccggaagcggaucagcaauugcguggccgacuacuccgugcuguacaacuccgccagcuucagcaccuucaagugcuacggcguguccccuaccaagcugaacgaccugugcuucacaaacguguacgccgacagcuucgugauccggggagaugaagugcggcagauugccccuggacagacaggcaagaucgccgacuacaacuacaagcugcccgacgacuucaccggcugugugauugccuggaacagcaacaaccuggacuccaaagucggcggcaacuacaauuaccuguaccggcuguuccggaaguccaaucugaagcccuucgagcgggacaucagcaccgaaaucuaucaggccggcagcaccccuugcaacggcguggaaggcuucaacugcuacuucccacugcaguccuacggcuuucagcccacaaauggcgugggcuaucagcccuacagagugguggugcugagcuucgaacugcugcaugcuccugccacagugugcggcccuaagaaaagcaccaaucucgugaagaacaaaugcgugaacuucaacuucaacggccugaccggcaccggcgugcugacagagagcaacaagaaguuccugccauuccagcaguuuggccgggauaucgccgauaccacagacgccguuagagauccccagacacuggaaauccuggacaucaccccaugcagcuucggcggagugucugugaucaccccuggcaccaacaccagcaaucagguggcagugcuguaccaggacgugaacuguaccgaagugcccguggccauucacgccgaucagcugacaccuacauggcggguguacuccaccggcagcaauguguuucagaccagagccggcugucugaucggagccgagcacgugaacaauagcuacgagugcgacauccccaucggcgcuggcaucugugccagcuaccagacacagacaaacagccccagacgggcuagaagcguggccagccagagcaucauugccuacacaaugucucugggcgccgagaacagcguggccuacuccaacaacucuaucgcuauccccaccaacuucaccaucagcgugaccaccgagauccugccuguguccaugaccaagaccagcguggacugcaccauguacaucugcggcgauuccaccgagugcuccaaccugcugcugcaguacggcagcuucugcacccagcugaauagagcccugacagggaucgccguggaacaggacaagaacacccaagagguguucgcccaagugaagcaaaucuacaagaccccuccuaucaaggacuucggcggcuucaauuucagccagauucugcccgauccuagcaagcccagcaagcggagcuucaucgaggaccugcuguucaacaaagugacacuggccgacgccggcuucaucaagcaguauggcgauugucugggcgacauugccgccagggaucugauuugcgcccagaaguuuaacggacugacagugcugccuccucugcugaccgaugagaugaucgcccaguacacaucugcccugcuggccggcacaaucacaagcggcuggacauuuggagcuggcgccgcucugcagauccccuuugcuaugcagauggccuaccgguucaacggcaucggagugacccagaaugugcuguacgagaaccagaagcugaucgccaaccaguucaacagcgccaucggcaagauccaggacagccugagcagcacagcaagcgcccugggaaagcugcaggacguggucaaccagaaugcccaggcacugaacacccuggucaagcagcuguccuccaacuucggcgccaucagcucugugcugaacgauauccugagcagacuggacaaggucgaggccgaggugcagaucgacagacugaucacaggcagacugcagagccuccagacauacgugacccagcagcugaucagagccgccgagauuagagccucugccaaucuggccgccaccaagaugucugagugugugcugggccagagcaagagaguggacuuuugcggcaagggcuaccaccugaugagcuucccucagucugccccucacggcgugguguuucugcacgugacauaugugcccgcucaagagaagaauuucaccaccgcuccagccaucugccacgacggcaaagcccacuuuccuagagaaggcguguucguguccaacggcacccauugguucgugacacagcggaacuucuacgagccccagaucaucaccaccgacaacaccuucgugucuggcaacugcgacguugugaucggcauugugaacaauaccguguacgacccucugcagcccgagcuggacagcuucaaagaggaacuggacaaguacuuuaagaaccacacaagccccgacguggaccugggcgauaucagcggaaucaaugccagcgucgugaacauccagaaagagaucgaccggcugaacgagguggccaagaaucugaacgagagccugaucgaccugcaagaacuggggaaguacgagcaguacaucaagggaggcggaggaucugacaucgaccccuacaaagaguucggcagcagcuaccagcugcugaacuuccugccucuggacuucuuccccgaccugaacgcccugguggauacagccacagcucuguacgaggaagaacugaccggcagagagcacugcagcccucaccacacagccauuagacaggcccucgugugcugggacgagcugacaaaacugaucgccuggaugagcagcaacaucaccagcgagcaagugcggaccaucaucgugaaccacgugaacgauaccuggggccugaaagugcggcagagccugugguuucaccugagcugucugaccuucggccagcacaccgugcaagaguuucugguguccuucggcguguggaucagaaccccugcuccauacagaccuccaaacgcucccauccugagcacccugccugagcacacagugaucuguuga

SEQ ID NO: 12130 - RNA, 4098 nt, Artificial Sequence
  SARS-CoV-2/Wuhan/WIV05/2019__EPI_ISL_402128 spike protein CDS gc mod (1-1211)(K986P_V987P) WhcAg construct
auguucguguuucuggugcugcugccccugguguccagccagugugugaaccugaccaccagaacacagcugccuccagccuacaccaacagcuucaccagaggcguguacuaccccgacaagguguucagauccagcgugcugcacucuacccaggaccuguuccugccuuucuucagcaacgugaccugguuccacgccauccacguguccggcaccaauggcaccaagagauucgacaaccccgugcugcccuucaacgacgggguguacuuugccagcaccgagaaguccaacaucaucagaggcuggaucuucggcaccacacuggacagcaagacccagagccugcugaucgugaacaacgccaccaacguggucaucaaagugugcgaguuccaguucugcaacgaccccuuccugggcgucuacuaccacaagaacaacaagagcuggauggaaagcgaguuccggguguacagcagcgccaacaacugcaccuucgaguacgugucccagccuuuccugauggaccuggaaggcaagcagggcaacuucaagaaccugcgcgaguucguguucaagaacaucgacggcuacuucaaaaucuacagcaagcacaccccuaucaaccucgugcgggaucugccucagggcuucucugcucuggaaccccugguggaucugcccaucggcaucaacaucacccgguuucagacacugcuggcccugcacagaagcuaccugacaccuggcgauagcagcagcggauggacagcuggugccgccgcuuacuaugugggcuaccugcagccuagaaccuuccugcugaaguacaacgagaacggcaccaucaccgacgccguggauugugcucuggauccucugagcgagacaaagugcacccugaaguccuucaccguggaaaagggcaucuaccagaccagcaacuuccgggugcagcccaccgaauccaucgugcgguuccccaauaucaccaaucugugccccuucggcgagguguucaaugccaccagauucgccucuguguacgccuggaaccggaagcggaucagcaauugcguggccgacuacuccgugcuguacaacuccgccagcuucagcaccuucaagugcuacggcguguccccuaccaagcugaacgaccugugcuucacaaacguguacgccgacagcuucgugauccggggagaugaagugcggcagauugccccuggacagacaggcaagaucgccgacuacaacuacaagcugcccgacgacuucaccggcugugugauugccuggaacagcaacaaccuggacuccaaagucggcggcaacuacaauuaccuguaccggcuguuccggaaguccaaucugaagcccuucgagcgggacaucagcaccgaaaucuaucaggccggcagcaccccuugcaacggcguggaaggcuucaacugcuacuucccacugcaguccuacggcuuucagcccacaaauggcgugggcuaucagcccuacagagugguggugcugagcuucgaacugcugcaugcuccugccacagugugcggcccuaagaaaagcaccaaucucgugaagaacaaaugcgugaacuucaacuucaacggccugaccggcaccggcgugcugacagagagcaacaagaaguuccugccauuccagcaguuuggccgggauaucgccgauaccacagacgccguuagagauccccagacacuggaaauccuggacaucaccccaugcagcuucggcggagugucugugaucaccccuggcaccaacaccagcaaucagguggcagugcuguaccaggacgugaacuguaccgaagugcccguggccauucacgccgaucagcugacaccuacauggcggguguacuccaccggcagcaauguguuucagaccagagccggcugucugaucggagccgagcacgugaacaauagcuacgagugcgacauccccaucggcgcuggcaucugugccagcuaccagacacagacaaacagccccagacgggcuagaagcguggccagccagagcaucauugccuacacaaugucucugggcgccgagaacagcguggccuacuccaacaacucuaucgcuauccccaccaacuucaccaucagcgugaccaccgagauccugccuguguccaugaccaagaccagcguggacugcaccauguacaucugcggcgauuccaccgagugcuccaaccugcugcugcaguacggcagcuucugcacccagcugaauagagcccugacagggaucgccguggaacaggacaagaacacccaagagguguucgcccaagugaagcaaaucuacaagaccccuccuaucaaggacuucggcggcuucaauuucagccagauucugcccgauccuagcaagcccagcaagcggagcuucaucgaggaccugcuguucaacaaagugacacuggccgacgccggcuucaucaagcaguauggcgauugucugggcgacauugccgccagggaucugauuugcgcccagaaguuuaacggacugacagugcugccuccucugcugaccgaugagaugaucgcccaguacacaucugcccugcuggccggcacaaucacaagcggcuggacauuuggagcuggcgccgcucugcagauccccuuugcuaugcagauggccuaccgguucaacggcaucggagugacccagaaugugcuguacgagaaccagaagcugaucgccaaccaguucaacagcgccaucggcaagauccaggacagccugagcagcacagcaagcgcccugggaaagcugcaggacguggucaaccagaaugcccaggcacugaacacccuggucaagcagcuguccuccaacuucggcgccaucagcucugugcugaacgauauccugagcagacuggacccuccugaggccgaggugcagaucgacagacugaucacaggcagacugcagagccuccagacauacgugacccagcagcugaucagagccgccgagauuagagccucugccaaucuggccgccaccaagaugucugagugugugcugggccagagcaagagaguggacuuuugcggcaagggcuaccaccugaugagcuucccucagucugccccucacggcgugguguuucugcacgugacauaugugcccgcucaagagaagaauuucaccaccgcuccagccaucugccacgacggcaaagcccacuuuccuagagaaggcguguucguguccaacggcacccauugguucgugacacagcggaacuucuacgagccccagaucaucaccaccgacaacaccuucgugucuggcaacugcgacguugugaucggcauugugaacaauaccguguacgacccucugcagcccgagcuggacagcuucaaagaggaacuggacaaguacuuuaagaaccacacaagccccgacguggaccugggcgauaucagcggaaucaaugccagcgucgugaacauccagaaagagaucgaccggcugaacgagguggccaagaaucugaacgagagccugaucgaccugcaagaacuggggaaguacgagcaguacaucaagggaggcggaggaucugacaucgaccccuacaaagaguucggcagcagcuaccagcugcugaacuuccugccucuggacuucuuccccgaccugaacgcccugguggauacagccacagcucuguacgaggaagaacugaccggcagagagcacugcagcccucaccacacagccauuagacaggcccucgugugcugggacgagcugacaaaacugaucgccuggaugagcagcaacaucaccagcgagcaagugcggaccaucaucgugaaccacgugaacgauaccuggggccugaaagugcggcagagccugugguuucaccugagcugucugaccuucggccagcacaccgugcaagaguuucugguguccuucggcguguggaucagaaccccugcuccauacagaccuccaaacgcucccauccugagcacccugccugagcacacagugaucuguuga

SEQ ID NO: 12131 - RNA, 4098 nt, Artificial Sequence
  SARS-CoV-2/Wuhan/WIV05/2019__EPI_ISL_402128 spike protein CDS gc mod (1-1211)(K986P_V987P_T887WN_A1020W) WhcAg construct
auguucguguuucuggugcugcugccccugguguccagccagugugugaaccugaccaccagaacacagcugccuccagccuacaccaacagcuucaccagaggcguguacuaccccgacaagguguucagauccagcgugcugcacucuacccaggaccuguuccugccuuucuucagcaacgugaccugguuccacgccauccacguguccggcaccaauggcaccaagagauucgacaaccccgugcugcccuucaacgacgggguguacuuugccagcaccgagaaguccaacaucaucagaggcuggaucuucggcaccacacuggacagcaagacccagagccugcugaucgugaacaacgccaccaacguggucaucaaagugugcgaguuccaguucugcaacgaccccuuccugggcgucuacuaccacaagaacaacaagagcuggauggaaagcgaguuccggguguacagcagcgccaacaacugcaccuucgaguacgugucccagccuuuccugauggaccuggaaggcaagcagggcaacuucaagaaccugcgcgaguucguguucaagaacaucgacggcuacuucaaaaucuacagcaagcacaccccuaucaaccucgugcgggaucugccucagggcuucucugcucuggaaccccugguggaucugcccaucggcaucaacaucacccgguuucagacacugcuggcccugcacagaagcuaccugacaccuggcgauagcagcagcggauggacagcuggugccgccgcuuacuaugugggcuaccugcagccuagaaccuuccugcugaaguacaacgagaacggcaccaucaccgacgccguggauugugcucuggauccucugagcgagacaaagugcacccugaaguccuucaccguggaaaagggcaucuaccagaccagcaacuuccgggugcagcccaccgaauccaucgugcgguuccccaauaucaccaaucugugccccuucggcgagguguucaaugccaccagauucgccucuguguacgccuggaaccggaagcggaucagcaauugcguggccgacuacuccgugcuguacaacuccgccagcuucagcaccuucaagugcuacggcguguccccuaccaagcugaacgaccugugcuucacaaacguguacgccgacagcuucgugauccggggagaugaagugcggcagauugccccuggacagacaggcaagaucgccgacuacaacuacaagcugcccgacgacuucaccggcugugugauugccuggaacagcaacaaccuggacuccaaagucggcggcaacuacaauuaccuguaccggcuguuccggaaguccaaucugaagcccuucgagcgggacaucagcaccgaaaucuaucaggccggcagcaccccuugcaacggcguggaaggcuucaacugcuacuucccacugcaguccuacggcuuucagcccacaaauggcgugggcuaucagcccuacagagugguggugcugagcuucgaacugcugcaugcuccugccacagugugcggcccuaagaaaagcaccaaucucgugaagaacaaaugcgugaacuucaacuucaacggccugaccggcaccggcgugcugacagagagcaacaagaaguuccugccauuccagcaguuuggccgggauaucgccgauaccacagacgccguuagagauccccagacacuggaaauccuggacaucaccccaugcagcuucggcggagugucugugaucaccccuggcaccaacaccagcaaucagguggcagugcuguaccaggacgugaacuguaccgaagugcccguggccauucacgccgaucagcugacaccuacauggcggguguacuccaccggcagcaauguguuucagaccagagccggcugucugaucggagccgagcacgugaacaauagcuacgagugcgacauccccaucggcgcuggcaucugugccagcuaccagacacagacaaacagccccagacgggcuagaagcguggccagccagagcaucauugccuacacaaugucucugggcgccgagaacagcguggccuacuccaacaacucuaucgcuauccccaccaacuucaccaucagcgugaccaccgagauccugccuguguccaugaccaagaccagcguggacugcaccauguacaucugcggcgauuccaccgagugcuccaaccugcugcugcaguacggcagcuucugcacccagcugaauagagcccugacagggaucgccguggaacaggacaagaacacccaagagguguucgcccaagugaagcaaaucuacaagaccccuccuaucaaggacuucggcggcuucaauuucagccagauucugcccgauccuagcaagcccagcaagcggagcuucaucgaggaccugcuguucaacaaagugacacuggccgacgccggcuucaucaagcaguauggcgauugucugggcgacauugccgccagggaucugauuugcgcccagaaguuuaacggacugacagugcugccuccucugcugaccgaugagaugaucgcccaguacacaucugcccugcuggccggcacaaucacaagcggcuggugguuuggagcuggcgccgcucugcagauccccuuugcuaugcagauggccuaccgguucaacggcaucggagugacccagaaugugcuguacgagaaccagaagcugaucgccaaccaguucaacagcgccaucggcaagauccaggacagccugagcagcacagcaagcgcccugggaaagcugcaggacguggucaaccagaaugcccaggcacugaacacccuggucaagcagcuguccuccaacuucggcgccaucagcucugugcugaacgauauccugagcagacuggacccuccugaggccgaggugcagaucgacagacugaucacaggcagacugcagagccuccagacauacgugacccagcagcugaucagagccgccgagauuagauggucugccaaucuggccgccaccaagaugucugagugugugcugggccagagcaagagaguggacuuuugcggcaagggcuaccaccugaugagcuucccucagucugccccucacggcgugguguuucugcacgugacauaugugcccgcucaagagaagaauuucaccaccgcuccagccaucugccacgacggcaaagcccacuuuccuagagaaggcguguucguguccaacggcacccauugguucgugacacagcggaacuucuacgagccccagaucaucaccaccgacaacaccuucgugucuggcaacugcgacguugugaucggcauugugaacaauaccguguacgacccucugcagcccgagcuggacagcuucaaagaggaacuggacaaguacuuuaagaaccacacaagccccgacguggaccugggcgauaucagcggaaucaaugccagcgucgugaacauccagaaagagaucgaccggcugaacgagguggccaagaaucugaacgagagccugaucgaccugcaagaacuggggaaguacgagcaguacaucaagggaggcggaggaucugacaucgaccccuacaaagaguucggcagcagcuaccagcugcugaacuuccugccucuggacuucuuccccgaccugaacgcccugguggauacagccacagcucuguacgaggaagaacugaccggcagagagcacugcagcccucaccacacagccauuagacaggcccucgugugcugggacgagcugacaaaacugaucgccuggaugagcagcaacaucaccagcgagcaagugcggaccaucaucgugaaccacgugaacgauaccuggggccugaaagugcggcagagccugugguuucaccugagcugucugaccuucggccagcacaccgugcaagaguuucugguguccuucggcguguggaucagaaccccugcuccauacagaccuccaaacgcucccauccugagcacccugccugagcacacagugaucuguuga

SEQ ID NO: 12132 - RNA, 4098 nt, Artificial Sequence
  SARS-CoV-2/Wuhan/WIV05/2019__EPI_ISL_402128 spike protein CDS gc mod (1-1211)(K986P_V987P_P1069F) WhcAg construct
auguucguguuucuggugcugcugccccugguguccagccagugugugaaccugaccaccagaacacagcugccuccagccuacaccaacagcuucaccagaggcguguacuaccccgacaagguguucagauccagcgugcugcacucuacccaggaccuguuccugccuuucuucagcaacgugaccugguuccacgccauccacguguccggcaccaauggcaccaagagauucgacaaccccgugcugcccuucaacgacgggguguacuuugccagcaccgagaaguccaacaucaucagaggcuggaucuucggcaccacacuggacagcaagacccagagccugcugaucgugaacaacgccaccaacguggucaucaaagugugcgaguuccaguucugcaacgaccccuuccugggcgucuacuaccacaagaacaacaagagcuggauggaaagcgaguuccggguguacagcagcgccaacaacugcaccuucgaguacgugucccagccuuuccugauggaccuggaaggcaagcagggcaacuucaagaaccugcgcgaguucguguucaagaacaucgacggcuacuucaaaaucuacagcaagcacaccccuaucaaccucgugcgggaucugccucagggcuucucugcucuggaaccccugguggaucugcccaucggcaucaacaucacccgguuucagacacugcuggcccugcacagaagcuaccugacaccuggcgauagcagcagcggauggacagcuggugccgccgcuuacuaugugggcuaccugcagccuagaaccuuccugcugaaguacaacgagaacggcaccaucaccgacgccguggauugugcucuggauccucugagcgagacaaagugcacccugaaguccuucaccguggaaaagggcaucuaccagaccagcaacuuccgggugcagcccaccgaauccaucgugcgguuccccaauaucaccaaucugugccccuucggcgagguguucaaugccaccagauucgccucuguguacgccuggaaccggaagcggaucagcaauugcguggccgacuacuccgugcuguacaacuccgccagcuucagcaccuucaagugcuacggcguguccccuaccaagcugaacgaccugugcuucacaaacguguacgccgacagcuucgugauccggggagaugaagugcggcagauugccccuggacagacaggcaagaucgccgacuacaacuacaagcugcccgacgacuucaccggcugugugauugccuggaacagcaacaaccuggacuccaaagucggcggcaacuacaauuaccuguaccggcuguuccggaaguccaaucugaagcccuucgagcgggacaucagcaccgaaaucuaucaggccggcagcaccccuugcaacggcguggaaggcuucaacugcuacuucccacugcaguccuacggcuuucagcccacaaauggcgugggcuaucagcccuacagagugguggugcugagcuucgaacugcugcaugcuccugccacagugugcggcccuaagaaaagcaccaaucucgugaagaacaaaugcgugaacuucaacuucaacggccugaccggcaccggcgugcugacagagagcaacaagaaguuccugccauuccagcaguuuggccgggauaucgccgauaccacagacgccguuagagauccccagacacuggaaauccuggacaucaccccaugcagcuucggcggagugucugugaucaccccuggcaccaacaccagcaaucagguggcagugcuguaccaggacgugaacuguaccgaagugcccguggccauucacgccgaucagcugacaccuacauggcggguguacuccaccggcagcaauguguuucagaccagagccggcugucugaucggagccgagcacgugaacaauagcuacgagugcgacauccccaucggcgcuggcaucugugccagcuaccagacacagacaaacagccccagacgggcuagaagcguggccagccagagcaucauugccuacacaaugucucugggcgccgagaacagcguggccuacuccaacaacucuaucgcuauccccaccaacuucaccaucagcgugaccaccgagauccugccuguguccaugaccaagaccagcguggacugcaccauguacaucugcggcgauuccaccgagugcuccaaccugcugcugcaguacggcagcuucugcacccagcugaauagagcccugacagggaucgccguggaacaggacaagaacacccaagagguguucgcccaagugaagcaaaucuacaagaccccuccuaucaaggacuucggcggcuucaauuucagccagauucugcccgauccuagcaagcccagcaagcggagcuucaucgaggaccugcuguucaacaaagugacacuggccgacgccggcuucaucaagcaguauggcgauugucugggcgacauugccgccagggaucugauuugcgcccagaaguuuaacggacugacagugcugccuccucugcugaccgaugagaugaucgcccaguacacaucugcccugcuggccggcacaaucacaagcggcuggacauuuggagcuggcgccgcucugcagauccccuuugcuaugcagauggccuaccgguucaacggcaucggagugacccagaaugugcuguacgagaaccagaagcugaucgccaaccaguucaacagcgccaucggcaagauccaggacagccugagcagcacagcaagcgcccugggaaagcugcaggacguggucaaccagaaugcccaggcacugaacacccuggucaagcagcuguccuccaacuucggcgccaucagcucugugcugaacgauauccugagcagacuggacccuccugaggccgaggugcagaucgacagacugaucacaggcagacugcagagccuccagacauacgugacccagcagcugaucagagccgccgagauuagagccucugccaaucuggccgccaccaagaugucugagugugugcugggccagagcaagagaguggacuuuugcggcaagggcuaccaccugaugagcuucccucagucugccccucacggcgugguguuucugcacgugacauauguguucgcucaagagaagaauuucaccaccgcuccagccaucugccacgacggcaaagcccacuuuccuagagaaggcguguucguguccaacggcacccauugguucgugacacagcggaacuucuacgagccccagaucaucaccaccgacaacaccuucgugucuggcaacugcgacguugugaucggcauugugaacaauaccguguacgacccucugcagcccgagcuggacagcuucaaagaggaacuggacaaguacuuuaagaaccacacaagccccgacguggaccugggcgauaucagcggaaucaaugccagcgucgugaacauccagaaagagaucgaccggcugaacgagguggccaagaaucugaacgagagccugaucgaccugcaagaacuggggaaguacgagcaguacaucaagggaggcggaggaucugacaucgaccccuacaaagaguucggcagcagcuaccagcugcugaacuuccugccucuggacuucuuccccgaccugaacgcccugguggauacagccacagcucuguacgaggaagaacugaccggcagagagcacugcagcccucaccacacagccauuagacaggcccucgugugcugggacgagcugacaaaacugaucgccuggaugagcagcaacaucaccagcgagcaagugcggaccaucaucgugaaccacgugaacgauaccuggggccugaaagugcggcagagccugugguuucaccugagcugucugaccuucggccagcacaccgugcaagaguuucugguguccuucggcguguggaucagaaccccugcuccauacagaccuccaaacgcucccauccugagcacccugccugagcacacagugaucuguuga

SEQ ID NO: 12133 - RNA, 4098 nt, Artificial Sequence
  SARS-CoV-2/Wuhan/WIV05/2019__EPI_ISL_402128 spike protein CDS gc mod (1-1211)(K986P_V987P_ H1048Q_H1064N_ H1083N_H1101N) WhcAg construct
auguucguguuucuggugcugcugccccugguguccagccagugugugaaccugaccaccagaacacagcugccuccagccuacaccaacagcuucaccagaggcguguacuaccccgacaagguguucagauccagcgugcugcacucuacccaggaccuguuccugccuuucuucagcaacgugaccugguuccacgccauccacguguccggcaccaauggcaccaagagauucgacaaccccgugcugcccuucaacgacgggguguacuuugccagcaccgagaaguccaacaucaucagaggcuggaucuucggcaccacacuggacagcaagacccagagccugcugaucgugaacaacgccaccaacguggucaucaaagugugcgaguuccaguucugcaacgaccccuuccugggcgucuacuaccacaagaacaacaagagcuggauggaaagcgaguuccggguguacagcagcgccaacaacugcaccuucgaguacgugucccagccuuuccugauggaccuggaaggcaagcagggcaacuucaagaaccugcgcgaguucguguucaagaacaucgacggcuacuucaaaaucuacagcaagcacaccccuaucaaccucgugcgggaucugccucagggcuucucugcucuggaaccccugguggaucugcccaucggcaucaacaucacccgguuucagacacugcuggcccugcacagaagcuaccugacaccuggcgauagcagcagcggauggacagcuggugccgccgcuuacuaugugggcuaccugcagccuagaaccuuccugcugaaguacaacgagaacggcaccaucaccgacgccguggauugugcucuggauccucugagcgagacaaagugcacccugaaguccuucaccguggaaaagggcaucuaccagaccagcaacuuccgggugcagcccaccgaauccaucgugcgguuccccaauaucaccaaucugugccccuucggcgagguguucaaugccaccagauucgccucuguguacgccuggaaccggaagcggaucagcaauugcguggccgacuacuccgugcuguacaacuccgccagcuucagcaccuucaagugcuacggcguguccccuaccaagcugaacgaccugugcuucacaaacguguacgccgacagcuucgugauccggggagaugaagugcggcagauugccccuggacagacaggcaagaucgccgacuacaacuacaagcugcccgacgacuucaccggcugugugauugccuggaacagcaacaaccuggacuccaaagucggcggcaacuacaauuaccuguaccggcuguuccggaaguccaaucugaagcccuucgagcgggacaucagcaccgaaaucuaucaggccggcagcaccccuugcaacggcguggaaggcuucaacugcuacuucccacugcaguccuacggcuuucagcccacaaauggcgugggcuaucagcccuacagagugguggugcugagcuucgaacugcugcaugcuccugccacagugugcggcccuaagaaaagcaccaaucucgugaagaacaaaugcgugaacuucaacuucaacggccugaccggcaccggcgugcugacagagagcaacaagaaguuccugccauuccagcaguuuggccgggauaucgccgauaccacagacgccguuagagauccccagacacuggaaauccuggacaucaccccaugcagcuucggcggagugucugugaucaccccuggcaccaacaccagcaaucagguggcagugcuguaccaggacgugaacuguaccgaagugcccguggccauucacgccgaucagcugacaccuacauggcggguguacuccaccggcagcaauguguuucagaccagagccggcugucugaucggagccgagcacgugaacaauagcuacgagugcgacauccccaucggcgcuggcaucugugccagcuaccagacacagacaaacagccccagacgggcuagaagcguggccagccagagcaucauugccuacacaaugucucugggcgccgagaacagcguggccuacuccaacaacucuaucgcuauccccaccaacuucaccaucagcgugaccaccgagauccugccuguguccaugaccaagaccagcguggacugcaccauguacaucugcggcgauuccaccgagugcuccaaccugcugcugcaguacggcagcuucugcacccagcugaauagagcccugacagggaucgccguggaacaggacaagaacacccaagagguguucgcccaagugaagcaaaucuacaagaccccuccuaucaaggacuucggcggcuucaauuucagccagauucugcccgauccuagcaagcccagcaagcggagcuucaucgaggaccugcuguucaacaaagugacacuggccgacgccggcuucaucaagcaguauggcgauugucugggcgacauugccgccagggaucugauuugcgcccagaaguuuaacggacugacagugcugccuccucugcugaccgaugagaugaucgcccaguacacaucugcccugcuggccggcacaaucacaagcggcuggacauuuggagcuggcgccgcucugcagauccccuuugcuaugcagauggccuaccgguucaacggcaucggagugacccagaaugugcuguacgagaaccagaagcugaucgccaaccaguucaacagcgccaucggcaagauccaggacagccugagcagcacagcaagcgcccugggaaagcugcaggacguggucaaccagaaugcccaggcacugaacacccuggucaagcagcuguccuccaacuucggcgccaucagcucugugcugaacgauauccugagcagacuggacccuccugaggccgaggugcagaucgacagacugaucacaggcagacugcagagccuccagacauacgugacccagcagcugaucagagccgccgagauuagagccucugccaaucuggccgccaccaagaugucugagugugugcugggccagagcaagagaguggacuuuugcggcaagggcuaccagcugaugagcuucccucagucugccccucacggcgugguguuucugaacgugacauaugugcccgcucaagagaagaauuucaccaccgcuccagccaucugcaacgacggcaaagcccacuuuccuagagaaggcguguucguguccaacggcaccaacugguucgugacacagcggaacuucuacgagccccagaucaucaccaccgacaacaccuucgugucuggcaacugcgacguugugaucggcauugugaacaauaccguguacgacccucugcagcccgagcuggacagcuucaaagaggaacuggacaaguacuuuaagaaccacacaagccccgacguggaccugggcgauaucagcggaaucaaugccagcgucgugaacauccagaaagagaucgaccggcugaacgagguggccaagaaucugaacgagagccugaucgaccugcaagaacuggggaaguacgagcaguacaucaagggaggcggaggaucugacaucgaccccuacaaagaguucggcagcagcuaccagcugcugaacuuccugccucuggacuucuuccccgaccugaacgcccugguggauacagccacagcucuguacgaggaagaacugaccggcagagagcacugcagcccucaccacacagccauuagacaggcccucgugugcugggacgagcugacaaaacugaucgccuggaugagcagcaacaucaccagcgagcaagugcggaccaucaucgugaaccacgugaacgauaccuggggccugaaagugcggcagagccugugguuucaccugagcugucugaccuucggccagcacaccgugcaagaguuucugguguccuucggcguguggaucagaaccccugcuccauacagaccuccaaacgcucccauccugagcacccugccugagcacacagugaucuguuga

SEQ ID NO: 12134 - RNA, 4098 nt, Artificial Sequence
  SARS-CoV-2/Wuhan/WIV05/2019__EPI_ISL_402128 spike protein CDS gc mod (1-1211)(I712C_T1077C) WhcAg construct
auguucguguuucuggugcugcugccccugguguccagccagugugugaaccugaccaccagaacacagcugccuccagccuacaccaacagcuucaccagaggcguguacuaccccgacaagguguucagauccagcgugcugcacucuacccaggaccuguuccugccuuucuucagcaacgugaccugguuccacgccauccacguguccggcaccaauggcaccaagagauucgacaaccccgugcugcccuucaacgacgggguguacuuugccagcaccgagaaguccaacaucaucagaggcuggaucuucggcaccacacuggacagcaagacccagagccugcugaucgugaacaacgccaccaacguggucaucaaagugugcgaguuccaguucugcaacgaccccuuccugggcgucuacuaccacaagaacaacaagagcuggauggaaagcgaguuccggguguacagcagcgccaacaacugcaccuucgaguacgugucccagccuuuccugauggaccuggaaggcaagcagggcaacuucaagaaccugcgcgaguucguguucaagaacaucgacggcuacuucaaaaucuacagcaagcacaccccuaucaaccucgugcgggaucugccucagggcuucucugcucuggaaccccugguggaucugcccaucggcaucaacaucacccgguuucagacacugcuggcccugcacagaagcuaccugacaccuggcgauagcagcagcggauggacagcuggugccgccgcuuacuaugugggcuaccugcagccuagaaccuuccugcugaaguacaacgagaacggcaccaucaccgacgccguggauugugcucuggauccucugagcgagacaaagugcacccugaaguccuucaccguggaaaagggcaucuaccagaccagcaacuuccgggugcagcccaccgaauccaucgugcgguuccccaauaucaccaaucugugccccuucggcgagguguucaaugccaccagauucgccucuguguacgccuggaaccggaagcggaucagcaauugcguggccgacuacuccgugcuguacaacuccgccagcuucagcaccuucaagugcuacggcguguccccuaccaagcugaacgaccugugcuucacaaacguguacgccgacagcuucgugauccggggagaugaagugcggcagauugccccuggacagacaggcaagaucgccgacuacaacuacaagcugcccgacgacuucaccggcugugugauugccuggaacagcaacaaccuggacuccaaagucggcggcaacuacaauuaccuguaccggcuguuccggaaguccaaucugaagcccuucgagcgggacaucagcaccgaaaucuaucaggccggcagcaccccuugcaacggcguggaaggcuucaacugcuacuucccacugcaguccuacggcuuucagcccacaaauggcgugggcuaucagcccuacagagugguggugcugagcuucgaacugcugcaugcuccugccacagugugcggcccuaagaaaagcaccaaucucgugaagaacaaaugcgugaacuucaacuucaacggccugaccggcaccggcgugcugacagagagcaacaagaaguuccugccauuccagcaguuuggccgggauaucgccgauaccacagacgccguuagagauccccagacacuggaaauccuggacaucaccccaugcagcuucggcggagugucugugaucaccccuggcaccaacaccagcaaucagguggcagugcuguaccaggacgugaacuguaccgaagugcccguggccauucacgccgaucagcugacaccuacauggcggguguacuccaccggcagcaauguguuucagaccagagccggcugucugaucggagccgagcacgugaacaauagcuacgagugcgacauccccaucggcgcuggcaucugugccagcuaccagacacagacaaacagccccagacgggcuagaagcguggccagccagagcaucauugccuacacaaugucucugggcgccgagaacagcguggccuacuccaacaacucuugcgcuauccccaccaacuucaccaucagcgugaccaccgagauccugccuguguccaugaccaagaccagcguggacugcaccauguacaucugcggcgauuccaccgagugcuccaaccugcugcugcaguacggcagcuucugcacccagcugaauagagcccugacagggaucgccguggaacaggacaagaacacccaagagguguucgcccaagugaagcaaaucuacaagaccccuccuaucaaggacuucggcggcuucaauuucagccagauucugcccgauccuagcaagcccagcaagcggagcuucaucgaggaccugcuguucaacaaagugacacuggccgacgccggcuucaucaagcaguauggcgauugucugggcgacauugccgccagggaucugauuugcgcccagaaguuuaacggacugacagugcugccuccucugcugaccgaugagaugaucgcccaguacacaucugcccugcuggccggcacaaucacaagcggcuggacauuuggagcuggcgccgcucugcagauccccuuugcuaugcagauggccuaccgguucaacggcaucggagugacccagaaugugcuguacgagaaccagaagcugaucgccaaccaguucaacagcgccaucggcaagauccaggacagccugagcagcacagcaagcgcccugggaaagcugcaggacguggucaaccagaaugcccaggcacugaacacccuggucaagcagcuguccuccaacuucggcgccaucagcucugugcugaacgauauccugagcagacuggacaaggucgaggccgaggugcagaucgacagacugaucacaggcagacugcagagccuccagacauacgugacccagcagcugaucagagccgccgagauuagagccucugccaaucuggccgccaccaagaugucugagugugugcugggccagagcaagagaguggacuuuugcggcaagggcuaccaccugaugagcuucccucagucugccccucacggcgugguguuucugcacgugacauaugugcccgcucaagagaagaauuucaccugugcuccagccaucugccacgacggcaaagcccacuuuccuagagaaggcguguucguguccaacggcacccauugguucgugacacagcggaacuucuacgagccccagaucaucaccaccgacaacaccuucgugucuggcaacugcgacguugugaucggcauugugaacaauaccguguacgacccucugcagcccgagcuggacagcuucaaagaggaacuggacaaguacuuuaagaaccacacaagccccgacguggaccugggcgauaucagcggaaucaaugccagcgucgugaacauccagaaagagaucgaccggcugaacgagguggccaagaaucugaacgagagccugaucgaccugcaagaacuggggaaguacgagcaguacaucaagggaggcggaggaucugacaucgaccccuacaaagaguucggcagcagcuaccagcugcugaacuuccugccucuggacuucuuccccgaccugaacgcccugguggauacagccacagcucuguacgaggaagaacugaccggcagagagcacugcagcccucaccacacagccauuagacaggcccucgugugcugggacgagcugacaaaacugaucgccuggaugagcagcaacaucaccagcgagcaagugcggaccaucaucgugaaccacgugaacgauaccuggggccugaaagugcggcagagccugugguuucaccugagcugucugaccuucggccagcacaccgugcaagaguuucugguguccuucggcguguggaucagaaccccugcuccauacagaccuccaaacgcucccauccugagcacccugccugagcacacagugaucuguuga

SEQ ID NO: 12135 - RNA, 4098 nt, Artificial Sequence
  SARS-CoV-2/Wuhan/WIV05/2019__EPI_ISL_402128 spike protein CDS gc mod (1-1211)(I714C_Y1110C) WhcAg construct
auguucguguuucuggugcugcugccccugguguccagccagugugugaaccugaccaccagaacacagcugccuccagccuacaccaacagcuucaccagaggcguguacuaccccgacaagguguucagauccagcgugcugcacucuacccaggaccuguuccugccuuucuucagcaacgugaccugguuccacgccauccacguguccggcaccaauggcaccaagagauucgacaaccccgugcugcccuucaacgacgggguguacuuugccagcaccgagaaguccaacaucaucagaggcuggaucuucggcaccacacuggacagcaagacccagagccugcugaucgugaacaacgccaccaacguggucaucaaagugugcgaguuccaguucugcaacgaccccuuccugggcgucuacuaccacaagaacaacaagagcuggauggaaagcgaguuccggguguacagcagcgccaacaacugcaccuucgaguacgugucccagccuuuccugauggaccuggaaggcaagcagggcaacuucaagaaccugcgcgaguucguguucaagaacaucgacggcuacuucaaaaucuacagcaagcacaccccuaucaaccucgugcgggaucugccucagggcuucucugcucuggaaccccugguggaucugcccaucggcaucaacaucacccgguuucagacacugcuggcccugcacagaagcuaccugacaccuggcgauagcagcagcggauggacagcuggugccgccgcuuacuaugugggcuaccugcagccuagaaccuuccugcugaaguacaacgagaacggcaccaucaccgacgccguggauugugcucuggauccucugagcgagacaaagugcacccugaaguccuucaccguggaaaagggcaucuaccagaccagcaacuuccgggugcagcccaccgaauccaucgugcgguuccccaauaucaccaaucugugccccuucggcgagguguucaaugccaccagauucgccucuguguacgccuggaaccggaagcggaucagcaauugcguggccgacuacuccgugcuguacaacuccgccagcuucagcaccuucaagugcuacggcguguccccuaccaagcugaacgaccugugcuucacaaacguguacgccgacagcuucgugauccggggagaugaagugcggcagauugccccuggacagacaggcaagaucgccgacuacaacuacaagcugcccgacgacuucaccggcugugugauugccuggaacagcaacaaccuggacuccaaagucggcggcaacuacaauuaccuguaccggcuguuccggaaguccaaucugaagcccuucgagcgggacaucagcaccgaaaucuaucaggccggcagcaccccuugcaacggcguggaaggcuucaacugcuacuucccacugcaguccuacggcuuucagcccacaaauggcgugggcuaucagcccuacagagugguggugcugagcuucgaacugcugcaugcuccugccacagugugcggcccuaagaaaagcaccaaucucgugaagaacaaaugcgugaacuucaacuucaacggccugaccggcaccggcgugcugacagagagcaacaagaaguuccugccauuccagcaguuuggccgggauaucgccgauaccacagacgccguuagagauccccagacacuggaaauccuggacaucaccccaugcagcuucggcggagugucugugaucaccccuggcaccaacaccagcaaucagguggcagugcuguaccaggacgugaacuguaccgaagugcccguggccauucacgccgaucagcugacaccuacauggcggguguacuccaccggcagcaauguguuucagaccagagccggcugucugaucggagccgagcacgugaacaauagcuacgagugcgacauccccaucggcgcuggcaucugugccagcuaccagacacagacaaacagccccagacgggcuagaagcguggccagccagagcaucauugccuacacaaugucucugggcgccgagaacagcguggccuacuccaacaacucuaucgcuugccccaccaacuucaccaucagcgugaccaccgagauccugccuguguccaugaccaagaccagcguggacugcaccauguacaucugcggcgauuccaccgagugcuccaaccugcugcugcaguacggcagcuucugcacccagcugaauagagcccugacagggaucgccguggaacaggacaagaacacccaagagguguucgcccaagugaagcaaaucuacaagaccccuccuaucaaggacuucggcggcuucaauuucagccagauucugcccgauccuagcaagcccagcaagcggagcuucaucgaggaccugcuguucaacaaagugacacuggccgacgccggcuucaucaagcaguauggcgauugucugggcgacauugccgccagggaucugauuugcgcccagaaguuuaacggacugacagugcugccuccucugcugaccgaugagaugaucgcccaguacacaucugcccugcuggccggcacaaucacaagcggcuggacauuuggagcuggcgccgcucugcagauccccuuugcuaugcagauggccuaccgguucaacggcaucggagugacccagaaugugcuguacgagaaccagaagcugaucgccaaccaguucaacagcgccaucggcaagauccaggacagccugagcagcacagcaagcgcccugggaaagcugcaggacguggucaaccagaaugcccaggcacugaacacccuggucaagcagcuguccuccaacuucggcgccaucagcucugugcugaacgauauccugagcagacuggacaaggucgaggccgaggugcagaucgacagacugaucacaggcagacugcagagccuccagacauacgugacccagcagcugaucagagccgccgagauuagagccucugccaaucuggccgccaccaagaugucugagugugugcugggccagagcaagagaguggacuuuugcggcaagggcuaccaccugaugagcuucccucagucugccccucacggcgugguguuucugcacgugacauaugugcccgcucaagagaagaauuucaccaccgcuccagccaucugccacgacggcaaagcccacuuuccuagagaaggcguguucguguccaacggcacccauugguucgugacacagcggaacuucugugagccccagaucaucaccaccgacaacaccuucgugucuggcaacugcgacguugugaucggcauugugaacaauaccguguacgacccucugcagcccgagcuggacagcuucaaagaggaacuggacaaguacuuuaagaaccacacaagccccgacguggaccugggcgauaucagcggaaucaaugccagcgucgugaacauccagaaagagaucgaccggcugaacgagguggccaagaaucugaacgagagccugaucgaccugcaagaacuggggaaguacgagcaguacaucaagggaggcggaggaucugacaucgaccccuacaaagaguucggcagcagcuaccagcugcugaacuuccugccucuggacuucuuccccgaccugaacgcccugguggauacagccacagcucuguacgaggaagaacugaccggcagagagcacugcagcccucaccacacagccauuagacaggcccucgugugcugggacgagcugacaaaacugaucgccuggaugagcagcaacaucaccagcgagcaagugcggaccaucaucgugaaccacgugaacgauaccuggggccugaaagugcggcagagccugugguuucaccugagcugucugaccuucggccagcacaccgugcaagaguuucugguguccuucggcguguggaucagaaccccugcuccauacagaccuccaaacgcucccauccugagcacccugccugagcacacagugaucuguuga

SEQ ID NO: 12136 - RNA, 4098 nt, Artificial Sequence
  SARS-CoV-2/Wuhan/WIV05/2019__EPI_ISL_402128 spike protein CDS gc mod (1-1211)(P715C_P1069C) WhcAg construct
auguucguguuucuggugcugcugccccugguguccagccagugugugaaccugaccaccagaacacagcugccuccagccuacaccaacagcuucaccagaggcguguacuaccccgacaagguguucagauccagcgugcugcacucuacccaggaccuguuccugccuuucuucagcaacgugaccugguuccacgccauccacguguccggcaccaauggcaccaagagauucgacaaccccgugcugcccuucaacgacgggguguacuuugccagcaccgagaaguccaacaucaucagaggcuggaucuucggcaccacacuggacagcaagacccagagccugcugaucgugaacaacgccaccaacguggucaucaaagugugcgaguuccaguucugcaacgaccccuuccugggcgucuacuaccacaagaacaacaagagcuggauggaaagcgaguuccggguguacagcagcgccaacaacugcaccuucgaguacgugucccagccuuuccugauggaccuggaaggcaagcagggcaacuucaagaaccugcgcgaguucguguucaagaacaucgacggcuacuucaaaaucuacagcaagcacaccccuaucaaccucgugcgggaucugccucagggcuucucugcucuggaaccccugguggaucugcccaucggcaucaacaucacccgguuucagacacugcuggcccugcacagaagcuaccugacaccuggcgauagcagcagcggauggacagcuggugccgccgcuuacuaugugggcuaccugcagccuagaaccuuccugcugaaguacaacgagaacggcaccaucaccgacgccguggauugugcucuggauccucugagcgagacaaagugcacccugaaguccuucaccguggaaaagggcaucuaccagaccagcaacuuccgggugcagcccaccgaauccaucgugcgguuccccaauaucaccaaucugugccccuucggcgagguguucaaugccaccagauucgccucuguguacgccuggaaccggaagcggaucagcaauugcguggccgacuacuccgugcuguacaacuccgccagcuucagcaccuucaagugcuacggcguguccccuaccaagcugaacgaccugugcuucacaaacguguacgccgacagcuucgugauccggggagaugaagugcggcagauugccccuggacagacaggcaagaucgccgacuacaacuacaagcugcccgacgacuucaccggcugugugauugccuggaacagcaacaaccuggacuccaaagucggcggcaacuacaauuaccuguaccggcuguuccggaaguccaaucugaagcccuucgagcgggacaucagcaccgaaaucuaucaggccggcagcaccccuugcaacggcguggaaggcuucaacugcuacuucccacugcaguccuacggcuuucagcccacaaauggcgugggcuaucagcccuacagagugguggugcugagcuucgaacugcugcaugcuccugccacagugugcggcccuaagaaaagcaccaaucucgugaagaacaaaugcgugaacuucaacuucaacggccugaccggcaccggcgugcugacagagagcaacaagaaguuccugccauuccagcaguuuggccgggauaucgccgauaccacagacgccguuagagauccccagacacuggaaauccuggacaucaccccaugcagcuucggcggagugucugugaucaccccuggcaccaacaccagcaaucagguggcagugcuguaccaggacgugaacuguaccgaagugcccguggccauucacgccgaucagcugacaccuacauggcggguguacuccaccggcagcaauguguuucagaccagagccggcugucugaucggagccgagcacgugaacaauagcuacgagugcgacauccccaucggcgcuggcaucugugccagcuaccagacacagacaaacagccccagacgggcuagaagcguggccagccagagcaucauugccuacacaaugucucugggcgccgagaacagcguggccuacuccaacaacucuaucgcuaucugcaccaacuucaccaucagcgugaccaccgagauccugccuguguccaugaccaagaccagcguggacugcaccauguacaucugcggcgauuccaccgagugcuccaaccugcugcugcaguacggcagcuucugcacccagcugaauagagcccugacagggaucgccguggaacaggacaagaacacccaagagguguucgcccaagugaagcaaaucuacaagaccccuccuaucaaggacuucggcggcuucaauuucagccagauucugcccgauccuagcaagcccagcaagcggagcuucaucgaggaccugcuguucaacaaagugacacuggccgacgccggcuucaucaagcaguauggcgauugucugggcgacauugccgccagggaucugauuugcgcccagaaguuuaacggacugacagugcugccuccucugcugaccgaugagaugaucgcccaguacacaucugcccugcuggccggcacaaucacaagcggcuggacauuuggagcuggcgccgcucugcagauccccuuugcuaugcagauggccuaccgguucaacggcaucggagugacccagaaugugcuguacgagaaccagaagcugaucgccaaccaguucaacagcgccaucggcaagauccaggacagccugagcagcacagcaagcgcccugggaaagcugcaggacguggucaaccagaaugcccaggcacugaacacccuggucaagcagcuguccuccaacuucggcgccaucagcucugugcugaacgauauccugagcagacuggacaaggucgaggccgaggugcagaucgacagacugaucacaggcagacugcagagccuccagacauacgugacccagcagcugaucagagccgccgagauuagagccucugccaaucuggccgccaccaagaugucugagugugugcugggccagagcaagagaguggacuuuugcggcaagggcuaccaccugaugagcuucccucagucugccccucacggcgugguguuucugcacgugacauaugugugugcucaagagaagaauuucaccaccgcuccagccaucugccacgacggcaaagcccacuuuccuagagaaggcguguucguguccaacggcacccauugguucgugacacagcggaacuucuacgagccccagaucaucaccaccgacaacaccuucgugucuggcaacugcgacguugugaucggcauugugaacaauaccguguacgacccucugcagcccgagcuggacagcuucaaagaggaacuggacaaguacuuuaagaaccacacaagccccgacguggaccugggcgauaucagcggaaucaaugccagcgucgugaacauccagaaagagaucgaccggcugaacgagguggccaagaaucugaacgagagccugaucgaccugcaagaacuggggaaguacgagcaguacaucaagggaggcggaggaucugacaucgaccccuacaaagaguucggcagcagcuaccagcugcugaacuuccugccucuggacuucuuccccgaccugaacgcccugguggauacagccacagcucuguacgaggaagaacugaccggcagagagcacugcagcccucaccacacagccauuagacaggcccucgugugcugggacgagcugacaaaacugaucgccuggaugagcagcaacaucaccagcgagcaagugcggaccaucaucgugaaccacgugaacgauaccuggggccugaaagugcggcagagccugugguuucaccugagcugucugaccuucggccagcacaccgugcaagaguuucugguguccuucggcguguggaucagaaccccugcuccauacagaccuccaaacgcucccauccugagcacccugccugagcacacagugaucuguuga

SEQ ID NO: 12137 - RNA, 4098 nt, Artificial Sequence
  SARS-CoV-2/Wuhan/WIV05/2019__EPI_ISL_402128 spike protein CDS gc mod (1-1211)(G889C_L1034C) WhcAg construct
auguucguguuucuggugcugcugccccugguguccagccagugugugaaccugaccaccagaacacagcugccuccagccuacaccaacagcuucaccagaggcguguacuaccccgacaagguguucagauccagcgugcugcacucuacccaggaccuguuccugccuuucuucagcaacgugaccugguuccacgccauccacguguccggcaccaauggcaccaagagauucgacaaccccgugcugcccuucaacgacgggguguacuuugccagcaccgagaaguccaacaucaucagaggcuggaucuucggcaccacacuggacagcaagacccagagccugcugaucgugaacaacgccaccaacguggucaucaaagugugcgaguuccaguucugcaacgaccccuuccugggcgucuacuaccacaagaacaacaagagcuggauggaaagcgaguuccggguguacagcagcgccaacaacugcaccuucgaguacgugucccagccuuuccugauggaccuggaaggcaagcagggcaacuucaagaaccugcgcgaguucguguucaagaacaucgacggcuacuucaaaaucuacagcaagcacaccccuaucaaccucgugcgggaucugccucagggcuucucugcucuggaaccccugguggaucugcccaucggcaucaacaucacccgguuucagacacugcuggcccugcacagaagcuaccugacaccuggcgauagcagcagcggauggacagcuggugccgccgcuuacuaugugggcuaccugcagccuagaaccuuccugcugaaguacaacgagaacggcaccaucaccgacgccguggauugugcucuggauccucugagcgagacaaagugcacccugaaguccuucaccguggaaaagggcaucuaccagaccagcaacuuccgggugcagcccaccgaauccaucgugcgguuccccaauaucaccaaucugugccccuucggcgagguguucaaugccaccagauucgccucuguguacgccuggaaccggaagcggaucagcaauugcguggccgacuacuccgugcuguacaacuccgccagcuucagcaccuucaagugcuacggcguguccccuaccaagcugaacgaccugugcuucacaaacguguacgccgacagcuucgugauccggggagaugaagugcggcagauugccccuggacagacaggcaagaucgccgacuacaacuacaagcugcccgacgacuucaccggcugugugauugccuggaacagcaacaaccuggacuccaaagucggcggcaacuacaauuaccuguaccggcuguuccggaaguccaaucugaagcccuucgagcgggacaucagcaccgaaaucuaucaggccggcagcaccccuugcaacggcguggaaggcuucaacugcuacuucccacugcaguccuacggcuuucagcccacaaauggcgugggcuaucagcccuacagagugguggugcugagcuucgaacugcugcaugcuccugccacagugugcggcccuaagaaaagcaccaaucucgugaagaacaaaugcgugaacuucaacuucaacggccugaccggcaccggcgugcugacagagagcaacaagaaguuccugccauuccagcaguuuggccgggauaucgccgauaccacagacgccguuagagauccccagacacuggaaauccuggacaucaccccaugcagcuucggcggagugucugugaucaccccuggcaccaacaccagcaaucagguggcagugcuguaccaggacgugaacuguaccgaagugcccguggccauucacgccgaucagcugacaccuacauggcggguguacuccaccggcagcaauguguuucagaccagagccggcugucugaucggagccgagcacgugaacaauagcuacgagugcgacauccccaucggcgcuggcaucugugccagcuaccagacacagacaaacagccccagacgggcuagaagcguggccagccagagcaucauugccuacacaaugucucugggcgccgagaacagcguggccuacuccaacaacucuaucgcuauccccaccaacuucaccaucagcgugaccaccgagauccugccuguguccaugaccaagaccagcguggacugcaccauguacaucugcggcgauuccaccgagugcuccaaccugcugcugcaguacggcagcuucugcacccagcugaauagagcccugacagggaucgccguggaacaggacaagaacacccaagagguguucgcccaagugaagcaaaucuacaagaccccuccuaucaaggacuucggcggcuucaauuucagccagauucugcccgauccuagcaagcccagcaagcggagcuucaucgaggaccugcuguucaacaaagugacacuggccgacgccggcuucaucaagcaguauggcgauugucugggcgacauugccgccagggaucugauuugcgcccagaaguuuaacggacugacagugcugccuccucugcugaccgaugagaugaucgcccaguacacaucugcccugcuggccggcacaaucacaagcggcuggacauuuugcgcuggcgccgcucugcagauccccuuugcuaugcagauggccuaccgguucaacggcaucggagugacccagaaugugcuguacgagaaccagaagcugaucgccaaccaguucaacagcgccaucggcaagauccaggacagccugagcagcacagcaagcgcccugggaaagcugcaggacguggucaaccagaaugcccaggcacugaacacccuggucaagcagcuguccuccaacuucggcgccaucagcucugugcugaacgauauccugagcagacuggacaaggucgaggccgaggugcagaucgacagacugaucacaggcagacugcagagccuccagacauacgugacccagcagcugaucagagccgccgagauuagagccucugccaaucuggccgccaccaagaugucugaguguguguguggccagagcaagagaguggacuuuugcggcaagggcuaccaccugaugagcuucccucagucugccccucacggcgugguguuucugcacgugacauaugugcccgcucaagagaagaauuucaccaccgcuccagccaucugccacgacggcaaagcccacuuuccuagagaaggcguguucguguccaacggcacccauugguucgugacacagcggaacuucuacgagccccagaucaucaccaccgacaacaccuucgugucuggcaacugcgacguugugaucggcauugugaacaauaccguguacgacccucugcagcccgagcuggacagcuucaaagaggaacuggacaaguacuuuaagaaccacacaagccccgacguggaccugggcgauaucagcggaaucaaugccagcgucgugaacauccagaaagagaucgaccggcugaacgagguggccaagaaucugaacgagagccugaucgaccugcaagaacuggggaaguacgagcaguacaucaagggaggcggaggaucugacaucgaccccuacaaagaguucggcagcagcuaccagcugcugaacuuccugccucuggacuucuuccccgaccugaacgcccugguggauacagccacagcucuguacgaggaagaacugaccggcagagagcacugcagcccucaccacacagccauuagacaggcccucgugugcugggacgagcugacaaaacugaucgccuggaugagcagcaacaucaccagcgagcaagugcggaccaucaucgugaaccacgugaacgauaccuggggccugaaagugcggcagagccugugguuucaccugagcugucugaccuucggccagcacaccgugcaagaguuucugguguccuucggcguguggaucagaaccccugcuccauacagaccuccaaacgcucccauccugagcacccugccugagcacacagugaucuguuga

SEQ ID NO: 12138 - RNA, 4098 nt, Artificial Sequence
  SARS-CoV-2/Wuhan/WIV05/2019__EPI_ISL_402128 spike protein CDS gc mod (1-1211)(I909C_Y1047C) WhcAg construct
auguucguguuucuggugcugcugccccugguguccagccagugugugaaccugaccaccagaacacagcugccuccagccuacaccaacagcuucaccagaggcguguacuaccccgacaagguguucagauccagcgugcugcacucuacccaggaccuguuccugccuuucuucagcaacgugaccugguuccacgccauccacguguccggcaccaauggcaccaagagauucgacaaccccgugcugcccuucaacgacgggguguacuuugccagcaccgagaaguccaacaucaucagaggcuggaucuucggcaccacacuggacagcaagacccagagccugcugaucgugaacaacgccaccaacguggucaucaaagugugcgaguuccaguucugcaacgaccccuuccugggcgucuacuaccacaagaacaacaagagcuggauggaaagcgaguuccggguguacagcagcgccaacaacugcaccuucgaguacgugucccagccuuuccugauggaccuggaaggcaagcagggcaacuucaagaaccugcgcgaguucguguucaagaacaucgacggcuacuucaaaaucuacagcaagcacaccccuaucaaccucgugcgggaucugccucagggcuucucugcucuggaaccccugguggaucugcccaucggcaucaacaucacccgguuucagacacugcuggcccugcacagaagcuaccugacaccuggcgauagcagcagcggauggacagcuggugccgccgcuuacuaugugggcuaccugcagccuagaaccuuccugcugaaguacaacgagaacggcaccaucaccgacgccguggauugugcucuggauccucugagcgagacaaagugcacccugaaguccuucaccguggaaaagggcaucuaccagaccagcaacuuccgggugcagcccaccgaauccaucgugcgguuccccaauaucaccaaucugugccccuucggcgagguguucaaugccaccagauucgccucuguguacgccuggaaccggaagcggaucagcaauugcguggccgacuacuccgugcuguacaacuccgccagcuucagcaccuucaagugcuacggcguguccccuaccaagcugaacgaccugugcuucacaaacguguacgccgacagcuucgugauccggggagaugaagugcggcagauugccccuggacagacaggcaagaucgccgacuacaacuacaagcugcccgacgacuucaccggcugugugauugccuggaacagcaacaaccuggacuccaaagucggcggcaacuacaauuaccuguaccggcuguuccggaaguccaaucugaagcccuucgagcgggacaucagcaccgaaaucuaucaggccggcagcaccccuugcaacggcguggaaggcuucaacugcuacuucccacugcaguccuacggcuuucagcccacaaauggcgugggcuaucagcccuacagagugguggugcugagcuucgaacugcugcaugcuccugccacagugugcggcccuaagaaaagcaccaaucucgugaagaacaaaugcgugaacuucaacuucaacggccugaccggcaccggcgugcugacagagagcaacaagaaguuccugccauuccagcaguuuggccgggauaucgccgauaccacagacgccguuagagauccccagacacuggaaauccuggacaucaccccaugcagcuucggcggagugucugugaucaccccuggcaccaacaccagcaaucagguggcagugcuguaccaggacgugaacuguaccgaagugcccguggccauucacgccgaucagcugacaccuacauggcggguguacuccaccggcagcaauguguuucagaccagagccggcugucugaucggagccgagcacgugaacaauagcuacgagugcgacauccccaucggcgcuggcaucugugccagcuaccagacacagacaaacagccccagacgggcuagaagcguggccagccagagcaucauugccuacacaaugucucugggcgccgagaacagcguggccuacuccaacaacucuaucgcuauccccaccaacuucaccaucagcgugaccaccgagauccugccuguguccaugaccaagaccagcguggacugcaccauguacaucugcggcgauuccaccgagugcuccaaccugcugcugcaguacggcagcuucugcacccagcugaauagagcccugacagggaucgccguggaacaggacaagaacacccaagagguguucgcccaagugaagcaaaucuacaagaccccuccuaucaaggacuucggcggcuucaauuucagccagauucugcccgauccuagcaagcccagcaagcggagcuucaucgaggaccugcuguucaacaaagugacacuggccgacgccggcuucaucaagcaguauggcgauugucugggcgacauugccgccagggaucugauuugcgcccagaaguuuaacggacugacagugcugccuccucugcugaccgaugagaugaucgcccaguacacaucugcccugcuggccggcacaaucacaagcggcuggacauuuggagcuggcgccgcucugcagauccccuuugcuaugcagauggccuaccgguucaacggcugcggagugacccagaaugugcuguacgagaaccagaagcugaucgccaaccaguucaacagcgccaucggcaagauccaggacagccugagcagcacagcaagcgcccugggaaagcugcaggacguggucaaccagaaugcccaggcacugaacacccuggucaagcagcuguccuccaacuucggcgccaucagcucugugcugaacgauauccugagcagacuggacaaggucgaggccgaggugcagaucgacagacugaucacaggcagacugcagagccuccagacauacgugacccagcagcugaucagagccgccgagauuagagccucugccaaucuggccgccaccaagaugucugagugugugcugggccagagcaagagaguggacuuuugcggcaagggcugucaccugaugagcuucccucagucugccccucacggcgugguguuucugcacgugacauaugugcccgcucaagagaagaauuucaccaccgcuccagccaucugccacgacggcaaagcccacuuuccuagagaaggcguguucguguccaacggcacccauugguucgugacacagcggaacuucuacgagccccagaucaucaccaccgacaacaccuucgugucuggcaacugcgacguugugaucggcauugugaacaauaccguguacgacccucugcagcccgagcuggacagcuucaaagaggaacuggacaaguacuuuaagaaccacacaagccccgacguggaccugggcgauaucagcggaaucaaugccagcgucgugaacauccagaaagagaucgaccggcugaacgagguggccaagaaucugaacgagagccugaucgaccugcaagaacuggggaaguacgagcaguacaucaagggaggcggaggaucugacaucgaccccuacaaagaguucggcagcagcuaccagcugcugaacuuccugccucuggacuucuuccccgaccugaacgcccugguggauacagccacagcucuguacgaggaagaacugaccggcagagagcacugcagcccucaccacacagccauuagacaggcccucgugugcugggacgagcugacaaaacugaucgccuggaugagcagcaacaucaccagcgagcaagugcggaccaucaucgugaaccacgugaacgauaccuggggccugaaagugcggcagagccugugguuucaccugagcugucugaccuucggccagcacaccgugcaagaguuucugguguccuucggcguguggaucagaaccccugcuccauacagaccuccaaacgcucccauccugagcacccugccugagcacacagugaucuguuga

SEQ ID NO: 12139 - RNA, 4098 nt, Artificial Sequence
  SARS-CoV-2/Wuhan/WIV05/2019__EPI_ISL_402128 spike protein CDS gc mod (1-1211)(Q965C_S1003C) WhcAg construct
auguucguguuucuggugcugcugccccugguguccagccagugugugaaccugaccaccagaacacagcugccuccagccuacaccaacagcuucaccagaggcguguacuaccccgacaagguguucagauccagcgugcugcacucuacccaggaccuguuccugccuuucuucagcaacgugaccugguuccacgccauccacguguccggcaccaauggcaccaagagauucgacaaccccgugcugcccuucaacgacgggguguacuuugccagcaccgagaaguccaacaucaucagaggcuggaucuucggcaccacacuggacagcaagacccagagccugcugaucgugaacaacgccaccaacguggucaucaaagugugcgaguuccaguucugcaacgaccccuuccugggcgucuacuaccacaagaacaacaagagcuggauggaaagcgaguuccggguguacagcagcgccaacaacugcaccuucgaguacgugucccagccuuuccugauggaccuggaaggcaagcagggcaacuucaagaaccugcgcgaguucguguucaagaacaucgacggcuacuucaaaaucuacagcaagcacaccccuaucaaccucgugcgggaucugccucagggcuucucugcucuggaaccccugguggaucugcccaucggcaucaacaucacccgguuucagacacugcuggcccugcacagaagcuaccugacaccuggcgauagcagcagcggauggacagcuggugccgccgcuuacuaugugggcuaccugcagccuagaaccuuccugcugaaguacaacgagaacggcaccaucaccgacgccguggauugugcucuggauccucugagcgagacaaagugcacccugaaguccuucaccguggaaaagggcaucuaccagaccagcaacuuccgggugcagcccaccgaauccaucgugcgguuccccaauaucaccaaucugugccccuucggcgagguguucaaugccaccagauucgccucuguguacgccuggaaccggaagcggaucagcaauugcguggccgacuacuccgugcuguacaacuccgccagcuucagcaccuucaagugcuacggcguguccccuaccaagcugaacgaccugugcuucacaaacguguacgccgacagcuucgugauccggggagaugaagugcggcagauugccccuggacagacaggcaagaucgccgacuacaacuacaagcugcccgacgacuucaccggcugugugauugccuggaacagcaacaaccuggacuccaaagucggcggcaacuacaauuaccuguaccggcuguuccggaaguccaaucugaagcccuucgagcgggacaucagcaccgaaaucuaucaggccggcagcaccccuugcaacggcguggaaggcuucaacugcuacuucccacugcaguccuacggcuuucagcccacaaauggcgugggcuaucagcccuacagagugguggugcugagcuucgaacugcugcaugcuccugccacagugugcggcccuaagaaaagcaccaaucucgugaagaacaaaugcgugaacuucaacuucaacggccugaccggcaccggcgugcugacagagagcaacaagaaguuccugccauuccagcaguuuggccgggauaucgccgauaccacagacgccguuagagauccccagacacuggaaauccuggacaucaccccaugcagcuucggcggagugucugugaucaccccuggcaccaacaccagcaaucagguggcagugcuguaccaggacgugaacuguaccgaagugcccguggccauucacgccgaucagcugacaccuacauggcggguguacuccaccggcagcaauguguuucagaccagagccggcugucugaucggagccgagcacgugaacaauagcuacgagugcgacauccccaucggcgcuggcaucugugccagcuaccagacacagacaaacagccccagacgggcuagaagcguggccagccagagcaucauugccuacacaaugucucugggcgccgagaacagcguggccuacuccaacaacucuaucgcuauccccaccaacuucaccaucagcgugaccaccgagauccugccuguguccaugaccaagaccagcguggacugcaccauguacaucugcggcgauuccaccgagugcuccaaccugcugcugcaguacggcagcuucugcacccagcugaauagagcccugacagggaucgccguggaacaggacaagaacacccaagagguguucgcccaagugaagcaaaucuacaagaccccuccuaucaaggacuucggcggcuucaauuucagccagauucugcccgauccuagcaagcccagcaagcggagcuucaucgaggaccugcuguucaacaaagugacacuggccgacgccggcuucaucaagcaguauggcgauugucugggcgacauugccgccagggaucugauuugcgcccagaaguuuaacggacugacagugcugccuccucugcugaccgaugagaugaucgcccaguacacaucugcccugcuggccggcacaaucacaagcggcuggacauuuggagcuggcgccgcucugcagauccccuuugcuaugcagauggccuaccgguucaacggcaucggagugacccagaaugugcuguacgagaaccagaagcugaucgccaaccaguucaacagcgccaucggcaagauccaggacagccugagcagcacagcaagcgcccugggaaagcugcaggacguggucaaccagaaugcccaggcacugaacacccuggucaagugccuguccuccaacuucggcgccaucagcucugugcugaacgauauccugagcagacuggacaaggucgaggccgaggugcagaucgacagacugaucacaggcagacugcagugucuccagacauacgugacccagcagcugaucagagccgccgagauuagagccucugccaaucuggccgccaccaagaugucugagugugugcugggccagagcaagagaguggacuuuugcggcaagggcuaccaccugaugagcuucccucagucugccccucacggcgugguguuucugcacgugacauaugugcccgcucaagagaagaauuucaccaccgcuccagccaucugccacgacggcaaagcccacuuuccuagagaaggcguguucguguccaacggcacccauugguucgugacacagcggaacuucuacgagccccagaucaucaccaccgacaacaccuucgugucuggcaacugcgacguugugaucggcauugugaacaauaccguguacgacccucugcagcccgagcuggacagcuucaaagaggaacuggacaaguacuuuaagaaccacacaagccccgacguggaccugggcgauaucagcggaaucaaugccagcgucgugaacauccagaaagagaucgaccggcugaacgagguggccaagaaucugaacgagagccugaucgaccugcaagaacuggggaaguacgagcaguacaucaagggaggcggaggaucugacaucgaccccuacaaagaguucggcagcagcuaccagcugcugaacuuccugccucuggacuucuuccccgaccugaacgcccugguggauacagccacagcucuguacgaggaagaacugaccggcagagagcacugcagcccucaccacacagccauuagacaggcccucgugugcugggacgagcugacaaaacugaucgccuggaugagcagcaacaucaccagcgagcaagugcggaccaucaucgugaaccacgugaacgauaccuggggccugaaagugcggcagagccugugguuucaccugagcugucugaccuucggccagcacaccgugcaagaguuucugguguccuucggcguguggaucagaaccccugcuccauacagaccuccaaacgcucccauccugagcacccugccugagcacacagugaucuguuga

SEQ ID NO: 12140 - RNA, 4098 nt, Artificial Sequence
  SARS-CoV-2/Wuhan/WIV05/2019__EPI_ISL_402128 spike protein CDS gc mod (1-1211)(F970C_G999C) WhcAg construct
auguucguguuucuggugcugcugccccugguguccagccagugugugaaccugaccaccagaacacagcugccuccagccuacaccaacagcuucaccagaggcguguacuaccccgacaagguguucagauccagcgugcugcacucuacccaggaccuguuccugccuuucuucagcaacgugaccugguuccacgccauccacguguccggcaccaauggcaccaagagauucgacaaccccgugcugcccuucaacgacgggguguacuuugccagcaccgagaaguccaacaucaucagaggcuggaucuucggcaccacacuggacagcaagacccagagccugcugaucgugaacaacgccaccaacguggucaucaaagugugcgaguuccaguucugcaacgaccccuuccugggcgucuacuaccacaagaacaacaagagcuggauggaaagcgaguuccggguguacagcagcgccaacaacugcaccuucgaguacgugucccagccuuuccugauggaccuggaaggcaagcagggcaacuucaagaaccugcgcgaguucguguucaagaacaucgacggcuacuucaaaaucuacagcaagcacaccccuaucaaccucgugcgggaucugccucagggcuucucugcucuggaaccccugguggaucugcccaucggcaucaacaucacccgguuucagacacugcuggcccugcacagaagcuaccugacaccuggcgauagcagcagcggauggacagcuggugccgccgcuuacuaugugggcuaccugcagccuagaaccuuccugcugaaguacaacgagaacggcaccaucaccgacgccguggauugugcucuggauccucugagcgagacaaagugcacccugaaguccuucaccguggaaaagggcaucuaccagaccagcaacuuccgggugcagcccaccgaauccaucgugcgguuccccaauaucaccaaucugugccccuucggcgagguguucaaugccaccagauucgccucuguguacgccuggaaccggaagcggaucagcaauugcguggccgacuacuccgugcuguacaacuccgccagcuucagcaccuucaagugcuacggcguguccccuaccaagcugaacgaccugugcuucacaaacguguacgccgacagcuucgugauccggggagaugaagugcggcagauugccccuggacagacaggcaagaucgccgacuacaacuacaagcugcccgacgacuucaccggcugugugauugccuggaacagcaacaaccuggacuccaaagucggcggcaacuacaauuaccuguaccggcuguuccggaaguccaaucugaagcccuucgagcgggacaucagcaccgaaaucuaucaggccggcagcaccccuugcaacggcguggaaggcuucaacugcuacuucccacugcaguccuacggcuuucagcccacaaauggcgugggcuaucagcccuacagagugguggugcugagcuucgaacugcugcaugcuccugccacagugugcggcccuaagaaaagcaccaaucucgugaagaacaaaugcgugaacuucaacuucaacggccugaccggcaccggcgugcugacagagagcaacaagaaguuccugccauuccagcaguuuggccgggauaucgccgauaccacagacgccguuagagauccccagacacuggaaauccuggacaucaccccaugcagcuucggcggagugucugugaucaccccuggcaccaacaccagcaaucagguggcagugcuguaccaggacgugaacuguaccgaagugcccguggccauucacgccgaucagcugacaccuacauggcggguguacuccaccggcagcaauguguuucagaccagagccggcugucugaucggagccgagcacgugaacaauagcuacgagugcgacauccccaucggcgcuggcaucugugccagcuaccagacacagacaaacagccccagacgggcuagaagcguggccagccagagcaucauugccuacacaaugucucugggcgccgagaacagcguggccuacuccaacaacucuaucgcuauccccaccaacuucaccaucagcgugaccaccgagauccugccuguguccaugaccaagaccagcguggacugcaccauguacaucugcggcgauuccaccgagugcuccaaccugcugcugcaguacggcagcuucugcacccagcugaauagagcccugacagggaucgccguggaacaggacaagaacacccaagagguguucgcccaagugaagcaaaucuacaagaccccuccuaucaaggacuucggcggcuucaauuucagccagauucugcccgauccuagcaagcccagcaagcggagcuucaucgaggaccugcuguucaacaaagugacacuggccgacgccggcuucaucaagcaguauggcgauugucugggcgacauugccgccagggaucugauuugcgcccagaaguuuaacggacugacagugcugccuccucugcugaccgaugagaugaucgcccaguacacaucugcccugcuggccggcacaaucacaagcggcuggacauuuggagcuggcgccgcucugcagauccccuuugcuaugcagauggccuaccgguucaacggcaucggagugacccagaaugugcuguacgagaaccagaagcugaucgccaaccaguucaacagcgccaucggcaagauccaggacagccugagcagcacagcaagcgcccugggaaagcugcaggacguggucaaccagaaugcccaggcacugaacacccuggucaagcagcuguccuccaacugcggcgccaucagcucugugcugaacgauauccugagcagacuggacaaggucgaggccgaggugcagaucgacagacugaucacauguagacugcagagccuccagacauacgugacccagcagcugaucagagccgccgagauuagagccucugccaaucuggccgccaccaagaugucugagugugugcugggccagagcaagagaguggacuuuugcggcaagggcuaccaccugaugagcuucccucagucugccccucacggcgugguguuucugcacgugacauaugugcccgcucaagagaagaauuucaccaccgcuccagccaucugccacgacggcaaagcccacuuuccuagagaaggcguguucguguccaacggcacccauugguucgugacacagcggaacuucuacgagccccagaucaucaccaccgacaacaccuucgugucuggcaacugcgacguugugaucggcauugugaacaauaccguguacgacccucugcagcccgagcuggacagcuucaaagaggaacuggacaaguacuuuaagaaccacacaagccccgacguggaccugggcgauaucagcggaaucaaugccagcgucgugaacauccagaaagagaucgaccggcugaacgagguggccaagaaucugaacgagagccugaucgaccugcaagaacuggggaaguacgagcaguacaucaagggaggcggaggaucugacaucgaccccuacaaagaguucggcagcagcuaccagcugcugaacuuccugccucuggacuucuuccccgaccugaacgcccugguggauacagccacagcucuguacgaggaagaacugaccggcagagagcacugcagcccucaccacacagccauuagacaggcccucgugugcugggacgagcugacaaaacugaucgccuggaugagcagcaacaucaccagcgagcaagugcggaccaucaucgugaaccacgugaacgauaccuggggccugaaagugcggcagagccugugguuucaccugagcugucugaccuucggccagcacaccgugcaagaguuucugguguccuucggcguguggaucagaaccccugcuccauacagaccuccaaacgcucccauccugagcacccugccugagcacacagugaucuguuga

SEQ ID NO: 12141 - RNA, 4098 nt, Artificial Sequence
  SARS-CoV-2/Wuhan/WIV05/2019__EPI_ISL_402128 spike protein CDS gc mod (1-1211)(A972C_R995C) WhcAg construct
auguucguguuucuggugcugcugccccugguguccagccagugugugaaccugaccaccagaacacagcugccuccagccuacaccaacagcuucaccagaggcguguacuaccccgacaagguguucagauccagcgugcugcacucuacccaggaccuguuccugccuuucuucagcaacgugaccugguuccacgccauccacguguccggcaccaauggcaccaagagauucgacaaccccgugcugcccuucaacgacgggguguacuuugccagcaccgagaaguccaacaucaucagaggcuggaucuucggcaccacacuggacagcaagacccagagccugcugaucgugaacaacgccaccaacguggucaucaaagugugcgaguuccaguucugcaacgaccccuuccugggcgucuacuaccacaagaacaacaagagcuggauggaaagcgaguuccggguguacagcagcgccaacaacugcaccuucgaguacgugucccagccuuuccugauggaccuggaaggcaagcagggcaacuucaagaaccugcgcgaguucguguucaagaacaucgacggcuacuucaaaaucuacagcaagcacaccccuaucaaccucgugcgggaucugccucagggcuucucugcucuggaaccccugguggaucugcccaucggcaucaacaucacccgguuucagacacugcuggcccugcacagaagcuaccugacaccuggcgauagcagcagcggauggacagcuggugccgccgcuuacuaugugggcuaccugcagccuagaaccuuccugcugaaguacaacgagaacggcaccaucaccgacgccguggauugugcucuggauccucugagcgagacaaagugcacccugaaguccuucaccguggaaaagggcaucuaccagaccagcaacuuccgggugcagcccaccgaauccaucgugcgguuccccaauaucaccaaucugugccccuucggcgagguguucaaugccaccagauucgccucuguguacgccuggaaccggaagcggaucagcaauugcguggccgacuacuccgugcuguacaacuccgccagcuucagcaccuucaagugcuacggcguguccccuaccaagcugaacgaccugugcuucacaaacguguacgccgacagcuucgugauccggggagaugaagugcggcagauugccccuggacagacaggcaagaucgccgacuacaacuacaagcugcccgacgacuucaccggcugugugauugccuggaacagcaacaaccuggacuccaaagucggcggcaacuacaauuaccuguaccggcuguuccggaaguccaaucugaagcccuucgagcgggacaucagcaccgaaaucuaucaggccggcagcaccccuugcaacggcguggaaggcuucaacugcuacuucccacugcaguccuacggcuuucagcccacaaauggcgugggcuaucagcccuacagagugguggugcugagcuucgaacugcugcaugcuccugccacagugugcggcccuaagaaaagcaccaaucucgugaagaacaaaugcgugaacuucaacuucaacggccugaccggcaccggcgugcugacagagagcaacaagaaguuccugccauuccagcaguuuggccgggauaucgccgauaccacagacgccguuagagauccccagacacuggaaauccuggacaucaccccaugcagcuucggcggagugucugugaucaccccuggcaccaacaccagcaaucagguggcagugcuguaccaggacgugaacuguaccgaagugcccguggccauucacgccgaucagcugacaccuacauggcggguguacuccaccggcagcaauguguuucagaccagagccggcugucugaucggagccgagcacgugaacaauagcuacgagugcgacauccccaucggcgcuggcaucugugccagcuaccagacacagacaaacagccccagacgggcuagaagcguggccagccagagcaucauugccuacacaaugucucugggcgccgagaacagcguggccuacuccaacaacucuaucgcuauccccaccaacuucaccaucagcgugaccaccgagauccugccuguguccaugaccaagaccagcguggacugcaccauguacaucugcggcgauuccaccgagugcuccaaccugcugcugcaguacggcagcuucugcacccagcugaauagagcccugacagggaucgccguggaacaggacaagaacacccaagagguguucgcccaagugaagcaaaucuacaagaccccuccuaucaaggacuucggcggcuucaauuucagccagauucugcccgauccuagcaagcccagcaagcggagcuucaucgaggaccugcuguucaacaaagugacacuggccgacgccggcuucaucaagcaguauggcgauugucugggcgacauugccgccagggaucugauuugcgcccagaaguuuaacggacugacagugcugccuccucugcugaccgaugagaugaucgcccaguacacaucugcccugcuggccggcacaaucacaagcggcuggacauuuggagcuggcgccgcucugcagauccccuuugcuaugcagauggccuaccgguucaacggcaucggagugacccagaaugugcuguacgagaaccagaagcugaucgccaaccaguucaacagcgccaucggcaagauccaggacagccugagcagcacagcaagcgcccugggaaagcugcaggacguggucaaccagaaugcccaggcacugaacacccuggucaagcagcuguccuccaacuucggcugcaucagcucugugcugaacgauauccugagcagacuggacaaggucgaggccgaggugcagaucgacugucugaucacaggcagacugcagagccuccagacauacgugacccagcagcugaucagagccgccgagauuagagccucugccaaucuggccgccaccaagaugucugagugugugcugggccagagcaagagaguggacuuuugcggcaagggcuaccaccugaugagcuucccucagucugccccucacggcgugguguuucugcacgugacauaugugcccgcucaagagaagaauuucaccaccgcuccagccaucugccacgacggcaaagcccacuuuccuagagaaggcguguucguguccaacggcacccauugguucgugacacagcggaacuucuacgagccccagaucaucaccaccgacaacaccuucgugucuggcaacugcgacguugugaucggcauugugaacaauaccguguacgacccucugcagcccgagcuggacagcuucaaagaggaacuggacaaguacuuuaagaaccacacaagccccgacguggaccugggcgauaucagcggaaucaaugccagcgucgugaacauccagaaagagaucgaccggcugaacgagguggccaagaaucugaacgagagccugaucgaccugcaagaacuggggaaguacgagcaguacaucaagggaggcggaggaucugacaucgaccccuacaaagaguucggcagcagcuaccagcugcugaacuuccugccucuggacuucuuccccgaccugaacgcccugguggauacagccacagcucuguacgaggaagaacugaccggcagagagcacugcagcccucaccacacagccauuagacaggcccucgugugcugggacgagcugacaaaacugaucgccuggaugagcagcaacaucaccagcgagcaagugcggaccaucaucgugaaccacgugaacgauaccuggggccugaaagugcggcagagccugugguuucaccugagcugucugaccuucggccagcacaccgugcaagaguuucugguguccuucggcguguggaucagaaccccugcuccauacagaccuccaaacgcucccauccugagcacccugccugagcacacagugaucuguuga

SEQ ID NO: 12142 - RNA, 4098 nt, Artificial Sequence
  SARS-CoV-2/Wuhan/WIV05/2019__EPI_ISL_402128 spike protein CDS gc mod (1-1211)(A890C_V1040C) WhcAg construct
auguucguguuucuggugcugcugccccugguguccagccagugugugaaccugaccaccagaacacagcugccuccagccuacaccaacagcuucaccagaggcguguacuaccccgacaagguguucagauccagcgugcugcacucuacccaggaccuguuccugccuuucuucagcaacgugaccugguuccacgccauccacguguccggcaccaauggcaccaagagauucgacaaccccgugcugcccuucaacgacgggguguacuuugccagcaccgagaaguccaacaucaucagaggcuggaucuucggcaccacacuggacagcaagacccagagccugcugaucgugaacaacgccaccaacguggucaucaaagugugcgaguuccaguucugcaacgaccccuuccugggcgucuacuaccacaagaacaacaagagcuggauggaaagcgaguuccggguguacagcagcgccaacaacugcaccuucgaguacgugucccagccuuuccugauggaccuggaaggcaagcagggcaacuucaagaaccugcgcgaguucguguucaagaacaucgacggcuacuucaaaaucuacagcaagcacaccccuaucaaccucgugcgggaucugccucagggcuucucugcucuggaaccccugguggaucugcccaucggcaucaacaucacccgguuucagacacugcuggcccugcacagaagcuaccugacaccuggcgauagcagcagcggauggacagcuggugccgccgcuuacuaugugggcuaccugcagccuagaaccuuccugcugaaguacaacgagaacggcaccaucaccgacgccguggauugugcucuggauccucugagcgagacaaagugcacccugaaguccuucaccguggaaaagggcaucuaccagaccagcaacuuccgggugcagcccaccgaauccaucgugcgguuccccaauaucaccaaucugugccccuucggcgagguguucaaugccaccagauucgccucuguguacgccuggaaccggaagcggaucagcaauugcguggccgacuacuccgugcuguacaacuccgccagcuucagcaccuucaagugcuacggcguguccccuaccaagcugaacgaccugugcuucacaaacguguacgccgacagcuucgugauccggggagaugaagugcggcagauugccccuggacagacaggcaagaucgccgacuacaacuacaagcugcccgacgacuucaccggcugugugauugccuggaacagcaacaaccuggacuccaaagucggcggcaacuacaauuaccuguaccggcuguuccggaaguccaaucugaagcccuucgagcgggacaucagcaccgaaaucuaucaggccggcagcaccccuugcaacggcguggaaggcuucaacugcuacuucccacugcaguccuacggcuuucagcccacaaauggcgugggcuaucagcccuacagagugguggugcugagcuucgaacugcugcaugcuccugccacagugugcggcccuaagaaaagcaccaaucucgugaagaacaaaugcgugaacuucaacuucaacggccugaccggcaccggcgugcugacagagagcaacaagaaguuccugccauuccagcaguuuggccgggauaucgccgauaccacagacgccguuagagauccccagacacuggaaauccuggacaucaccccaugcagcuucggcggagugucugugaucaccccuggcaccaacaccagcaaucagguggcagugcuguaccaggacgugaacuguaccgaagugcccguggccauucacgccgaucagcugacaccuacauggcggguguacuccaccggcagcaauguguuucagaccagagccggcugucugaucggagccgagcacgugaacaauagcuacgagugcgacauccccaucggcgcuggcaucugugccagcuaccagacacagacaaacagccccagacgggcuagaagcguggccagccagagcaucauugccuacacaaugucucugggcgccgagaacagcguggccuacuccaacaacucuaucgcuauccccaccaacuucaccaucagcgugaccaccgagauccugccuguguccaugaccaagaccagcguggacugcaccauguacaucugcggcgauuccaccgagugcuccaaccugcugcugcaguacggcagcuucugcacccagcugaauagagcccugacagggaucgccguggaacaggacaagaacacccaagagguguucgcccaagugaagcaaaucuacaagaccccuccuaucaaggacuucggcggcuucaauuucagccagauucugcccgauccuagcaagcccagcaagcggagcuucaucgaggaccugcuguucaacaaagugacacuggccgacgccggcuucaucaagcaguauggcgauugucugggcgacauugccgccagggaucugauuugcgcccagaaguuuaacggacugacagugcugccuccucugcugaccgaugagaugaucgcccaguacacaucugcccugcuggccggcacaaucacaagcggcuggacauuuggaugcggcgccgcucugcagauccccuuugcuaugcagauggccuaccgguucaacggcaucggagugacccagaaugugcuguacgagaaccagaagcugaucgccaaccaguucaacagcgccaucggcaagauccaggacagccugagcagcacagcaagcgcccugggaaagcugcaggacguggucaaccagaaugcccaggcacugaacacccuggucaagcagcuguccuccaacuucggcgccaucagcucugugcugaacgauauccugagcagacuggacaaggucgaggccgaggugcagaucgacagacugaucacaggcagacugcagagccuccagacauacgugacccagcagcugaucagagccgccgagauuagagccucugccaaucuggccgccaccaagaugucugagugugugcugggccagagcaagagaugugacuuuugcggcaagggcuaccaccugaugagcuucccucagucugccccucacggcgugguguuucugcacgugacauaugugcccgcucaagagaagaauuucaccaccgcuccagccaucugccacgacggcaaagcccacuuuccuagagaaggcguguucguguccaacggcacccauugguucgugacacagcggaacuucuacgagccccagaucaucaccaccgacaacaccuucgugucuggcaacugcgacguugugaucggcauugugaacaauaccguguacgacccucugcagcccgagcuggacagcuucaaagaggaacuggacaaguacuuuaagaaccacacaagccccgacguggaccugggcgauaucagcggaaucaaugccagcgucgugaacauccagaaagagaucgaccggcugaacgagguggccaagaaucugaacgagagccugaucgaccugcaagaacuggggaaguacgagcaguacaucaagggaggcggaggaucugacaucgaccccuacaaagaguucggcagcagcuaccagcugcugaacuuccugccucuggacuucuuccccgaccugaacgcccugguggauacagccacagcucuguacgaggaagaacugaccggcagagagcacugcagcccucaccacacagccauuagacaggcccucgugugcugggacgagcugacaaaacugaucgccuggaugagcagcaacaucaccagcgagcaagugcggaccaucaucgugaaccacgugaacgauaccuggggccugaaagugcggcagagccugugguuucaccugagcugucugaccuucggccagcacaccgugcaagaguuucugguguccuucggcguguggaucagaaccccugcuccauacagaccuccaaacgcucccauccugagcacccugccugagcacacagugaucuguuga

SEQ ID NO: 12143 - RNA, 4098 nt, Artificial Sequence
  SARS-CoV-2/Wuhan/WIV05/2019__EPI_ISL_402128 spike protein CDS gc mod (1-1211)(T874C_S1055C) WhcAg construct
auguucguguuucuggugcugcugccccugguguccagccagugugugaaccugaccaccagaacacagcugccuccagccuacaccaacagcuucaccagaggcguguacuaccccgacaagguguucagauccagcgugcugcacucuacccaggaccuguuccugccuuucuucagcaacgugaccugguuccacgccauccacguguccggcaccaauggcaccaagagauucgacaaccccgugcugcccuucaacgacgggguguacuuugccagcaccgagaaguccaacaucaucagaggcuggaucuucggcaccacacuggacagcaagacccagagccugcugaucgugaacaacgccaccaacguggucaucaaagugugcgaguuccaguucugcaacgaccccuuccugggcgucuacuaccacaagaacaacaagagcuggauggaaagcgaguuccggguguacagcagcgccaacaacugcaccuucgaguacgugucccagccuuuccugauggaccuggaaggcaagcagggcaacuucaagaaccugcgcgaguucguguucaagaacaucgacggcuacuucaaaaucuacagcaagcacaccccuaucaaccucgugcgggaucugccucagggcuucucugcucuggaaccccugguggaucugcccaucggcaucaacaucacccgguuucagacacugcuggcccugcacagaagcuaccugacaccuggcgauagcagcagcggauggacagcuggugccgccgcuuacuaugugggcuaccugcagccuagaaccuuccugcugaaguacaacgagaacggcaccaucaccgacgccguggauugugcucuggauccucugagcgagacaaagugcacccugaaguccuucaccguggaaaagggcaucuaccagaccagcaacuuccgggugcagcccaccgaauccaucgugcgguuccccaauaucaccaaucugugccccuucggcgagguguucaaugccaccagauucgccucuguguacgccuggaaccggaagcggaucagcaauugcguggccgacuacuccgugcuguacaacuccgccagcuucagcaccuucaagugcuacggcguguccccuaccaagcugaacgaccugugcuucacaaacguguacgccgacagcuucgugauccggggagaugaagugcggcagauugccccuggacagacaggcaagaucgccgacuacaacuacaagcugcccgacgacuucaccggcugugugauugccuggaacagcaacaaccuggacuccaaagucggcggcaacuacaauuaccuguaccggcuguuccggaaguccaaucugaagcccuucgagcgggacaucagcaccgaaaucuaucaggccggcagcaccccuugcaacggcguggaaggcuucaacugcuacuucccacugcaguccuacggcuuucagcccacaaauggcgugggcuaucagcccuacagagugguggugcugagcuucgaacugcugcaugcuccugccacagugugcggcccuaagaaaagcaccaaucucgugaagaacaaaugcgugaacuucaacuucaacggccugaccggcaccggcgugcugacagagagcaacaagaaguuccugccauuccagcaguuuggccgggauaucgccgauaccacagacgccguuagagauccccagacacuggaaauccuggacaucaccccaugcagcuucggcggagugucugugaucaccccuggcaccaacaccagcaaucagguggcagugcuguaccaggacgugaacuguaccgaagugcccguggccauucacgccgaucagcugacaccuacauggcggguguacuccaccggcagcaauguguuucagaccagagccggcugucugaucggagccgagcacgugaacaauagcuacgagugcgacauccccaucggcgcuggcaucugugccagcuaccagacacagacaaacagccccagacgggcuagaagcguggccagccagagcaucauugccuacacaaugucucugggcgccgagaacagcguggccuacuccaacaacucuaucgcuauccccaccaacuucaccaucagcgugaccaccgagauccugccuguguccaugaccaagaccagcguggacugcaccauguacaucugcggcgauuccaccgagugcuccaaccugcugcugcaguacggcagcuucugcacccagcugaauagagcccugacagggaucgccguggaacaggacaagaacacccaagagguguucgcccaagugaagcaaaucuacaagaccccuccuaucaaggacuucggcggcuucaauuucagccagauucugcccgauccuagcaagcccagcaagcggagcuucaucgaggaccugcuguucaacaaagugacacuggccgacgccggcuucaucaagcaguauggcgauugucugggcgacauugccgccagggaucugauuugcgcccagaaguuuaacggacugacagugcugccuccucugcugaccgaugagaugaucgcccaguacugcucugcccugcuggccggcacaaucacaagcggcuggacauuuggagcuggcgccgcucugcagauccccuuugcuaugcagauggccuaccgguucaacggcaucggagugacccagaaugugcuguacgagaaccagaagcugaucgccaaccaguucaacagcgccaucggcaagauccaggacagccugagcagcacagcaagcgcccugggaaagcugcaggacguggucaaccagaaugcccaggcacugaacacccuggucaagcagcuguccuccaacuucggcgccaucagcucugugcugaacgauauccugagcagacuggacaaggucgaggccgaggugcagaucgacagacugaucacaggcagacugcagagccuccagacauacgugacccagcagcugaucagagccgccgagauuagagccucugccaaucuggccgccaccaagaugucugagugugugcugggccagagcaagagaguggacuuuugcggcaagggcuaccaccugaugagcuucccucagugcgccccucacggcgugguguuucugcacgugacauaugugcccgcucaagagaagaauuucaccaccgcuccagccaucugccacgacggcaaagcccacuuuccuagagaaggcguguucguguccaacggcacccauugguucgugacacagcggaacuucuacgagccccagaucaucaccaccgacaacaccuucgugucuggcaacugcgacguugugaucggcauugugaacaauaccguguacgacccucugcagcccgagcuggacagcuucaaagaggaacuggacaaguacuuuaagaaccacacaagccccgacguggaccugggcgauaucagcggaaucaaugccagcgucgugaacauccagaaagagaucgaccggcugaacgagguggccaagaaucugaacgagagccugaucgaccugcaagaacuggggaaguacgagcaguacaucaagggaggcggaggaucugacaucgaccccuacaaagaguucggcagcagcuaccagcugcugaacuuccugccucuggacuucuuccccgaccugaacgcccugguggauacagccacagcucuguacgaggaagaacugaccggcagagagcacugcagcccucaccacacagccauuagacaggcccucgugugcugggacgagcugacaaaacugaucgccuggaugagcagcaacaucaccagcgagcaagugcggaccaucaucgugaaccacgugaacgauaccuggggccugaaagugcggcagagccugugguuucaccugagcugucugaccuucggccagcacaccgugcaagaguuucugguguccuucggcguguggaucagaaccccugcuccauacagaccuccaaacgcucccauccugagcacccugccugagcacacagugaucuguuga

SEQ ID NO: 12144 - RNA, 3924 nt, Artificial Sequence
  SARS-CoV-2/Wuhan/WIV05/2019__EPI_ISL_402128 spike protein CDS gc mod (1-1147) LumSynth construct
auguucguguuucuggugcugcugccccugguguccagccagugugugaaccugaccaccagaacacagcugccuccagccuacaccaacagcuucaccagaggcguguacuaccccgacaagguguucagauccagcgugcugcacucuacccaggaccuguuccugccuuucuucagcaacgugaccugguuccacgccauccacguguccggcaccaauggcaccaagagauucgacaaccccgugcugcccuucaacgacgggguguacuuugccagcaccgagaaguccaacaucaucagaggcuggaucuucggcaccacacuggacagcaagacccagagccugcugaucgugaacaacgccaccaacguggucaucaaagugugcgaguuccaguucugcaacgaccccuuccugggcgucuacuaccacaagaacaacaagagcuggauggaaagcgaguuccggguguacagcagcgccaacaacugcaccuucgaguacgugucccagccuuuccugauggaccuggaaggcaagcagggcaacuucaagaaccugcgcgaguucguguucaagaacaucgacggcuacuucaaaaucuacagcaagcacaccccuaucaaccucgugcgggaucugccucagggcuucucugcucuggaaccccugguggaucugcccaucggcaucaacaucacccgguuucagacacugcuggcccugcacagaagcuaccugacaccuggcgauagcagcagcggauggacagcuggugccgccgcuuacuaugugggcuaccugcagccuagaaccuuccugcugaaguacaacgagaacggcaccaucaccgacgccguggauugugcucuggauccucugagcgagacaaagugcacccugaaguccuucaccguggaaaagggcaucuaccagaccagcaacuuccgggugcagcccaccgaauccaucgugcgguuccccaauaucaccaaucugugccccuucggcgagguguucaaugccaccagauucgccucuguguacgccuggaaccggaagcggaucagcaauugcguggccgacuacuccgugcuguacaacuccgccagcuucagcaccuucaagugcuacggcguguccccuaccaagcugaacgaccugugcuucacaaacguguacgccgacagcuucgugauccggggagaugaagugcggcagauugccccuggacagacaggcaagaucgccgacuacaacuacaagcugcccgacgacuucaccggcugugugauugccuggaacagcaacaaccuggacuccaaagucggcggcaacuacaauuaccuguaccggcuguuccggaaguccaaucugaagcccuucgagcgggacaucagcaccgaaaucuaucaggccggcagcaccccuugcaacggcguggaaggcuucaacugcuacuucccacugcaguccuacggcuuucagcccacaaauggcgugggcuaucagcccuacagagugguggugcugagcuucgaacugcugcaugcuccugccacagugugcggcccuaagaaaagcaccaaucucgugaagaacaaaugcgugaacuucaacuucaacggccugaccggcaccggcgugcugacagagagcaacaagaaguuccugccauuccagcaguuuggccgggauaucgccgauaccacagacgccguuagagauccccagacacuggaaauccuggacaucaccccaugcagcuucggcggagugucugugaucaccccuggcaccaacaccagcaaucagguggcagugcuguaccaggacgugaacuguaccgaagugcccguggccauucacgccgaucagcugacaccuacauggcggguguacuccaccggcagcaauguguuucagaccagagccggcugucugaucggagccgagcacgugaacaauagcuacgagugcgacauccccaucggcgcuggcaucugugccagcuaccagacacagacaaacagccccagacgggcuagaagcguggccagccagagcaucauugccuacacaaugucucugggcgccgagaacagcguggccuacuccaacaacucuaucgcuauccccaccaacuucaccaucagcgugaccaccgagauccugccuguguccaugaccaagaccagcguggacugcaccauguacaucugcggcgauuccaccgagugcuccaaccugcugcugcaguacggcagcuucugcacccagcugaauagagcccugacagggaucgccguggaacaggacaagaacacccaagagguguucgcccaagugaagcaaaucuacaagaccccuccuaucaaggacuucggcggcuucaauuucagccagauucugcccgauccuagcaagcccagcaagcggagcuucaucgaggaccugcuguucaacaaagugacacuggccgacgccggcuucaucaagcaguauggcgauugucugggcgacauugccgccagggaucugauuugcgcccagaaguuuaacggacugacagugcugccuccucugcugaccgaugagaugaucgcccaguacacaucugcccugcuggccggcacaaucacaagcggcuggacauuuggagcuggcgccgcucugcagauccccuuugcuaugcagauggccuaccgguucaacggcaucggagugacccagaaugugcuguacgagaaccagaagcugaucgccaaccaguucaacagcgccaucggcaagauccaggacagccugagcagcacagcaagcgcccugggaaagcugcaggacguggucaaccagaaugcccaggcacugaacacccuggucaagcagcuguccuccaacuucggcgccaucagcucugugcugaacgauauccugagcagacuggacaaggucgaggccgaggugcagaucgacagacugaucacaggcagacugcagagccuccagacauacgugacccagcagcugaucagagccgccgagauuagagccucugccaaucuggccgccaccaagaugucugagugugugcugggccagagcaagagaguggacuuuugcggcaagggcuaccaccugaugagcuucccucagucugccccucacggcgugguguuucugcacgugacauaugugcccgcucaagagaagaauuucaccaccgcuccagccaucugccacgacggcaaagcccacuuuccuagagaaggcguguucguguccaacggcacccauugguucgugacacagcggaacuucuacgagccccagaucaucaccaccgacaacaccuucgugucuggcaacugcgacguugugaucggcauugugaacaauaccguguacgacccucugcagcccgagcuggacagcggcggaggaucuggcggaggacagaucuacgagggcaagcugacagccgagggccugagauuuggaaucguggccagccgguucaaucacgcccugguggauagacugguggaaggcgccaucgaugccauugucagacacggcggcagagaagaggacaucacccucguuagagugcccggcucuugggagauuccuguggcugcuggcgagcuggcccggaaagaagauaucgacgccguuaucgccaucggcgugcugaucagaggcgccacaccucacuucgacuauaucgccagcgagguguccaaaggccuggccgaucugagccuggaacugagaaagcccaucaccuucggcgugaucaccgcugacacacuggaacaggccauugagagagccggcaccaagcacggcaacaaaggaugggaagccgcucuguccgccaucgagauggccaaccuguucaagagccugcgguga

SEQ ID NO: 12145 - RNA, 3924 nt, Artificial Sequence
  SARS-CoV-2/Wuhan/WIV05/2019__EPI_ISL_402128 spike protein CDS gc mod (1-1147)(K986P_V987P) LumSynth construct
auguucguguuucuggugcugcugccccugguguccagccagugugugaaccugaccaccagaacacagcugccuccagccuacaccaacagcuucaccagaggcguguacuaccccgacaagguguucagauccagcgugcugcacucuacccaggaccuguuccugccuuucuucagcaacgugaccugguuccacgccauccacguguccggcaccaauggcaccaagagauucgacaaccccgugcugcccuucaacgacgggguguacuuugccagcaccgagaaguccaacaucaucagaggcuggaucuucggcaccacacuggacagcaagacccagagccugcugaucgugaacaacgccaccaacguggucaucaaagugugcgaguuccaguucugcaacgaccccuuccugggcgucuacuaccacaagaacaacaagagcuggauggaaagcgaguuccggguguacagcagcgccaacaacugcaccuucgaguacgugucccagccuuuccugauggaccuggaaggcaagcagggcaacuucaagaaccugcgcgaguucguguucaagaacaucgacggcuacuucaaaaucuacagcaagcacaccccuaucaaccucgugcgggaucugccucagggcuucucugcucuggaaccccugguggaucugcccaucggcaucaacaucacccgguuucagacacugcuggcccugcacagaagcuaccugacaccuggcgauagcagcagcggauggacagcuggugccgccgcuuacuaugugggcuaccugcagccuagaaccuuccugcugaaguacaacgagaacggcaccaucaccgacgccguggauugugcucuggauccucugagcgagacaaagugcacccugaaguccuucaccguggaaaagggcaucuaccagaccagcaacuuccgggugcagcccaccgaauccaucgugcgguuccccaauaucaccaaucugugccccuucggcgagguguucaaugccaccagauucgccucuguguacgccuggaaccggaagcggaucagcaauugcguggccgacuacuccgugcuguacaacuccgccagcuucagcaccuucaagugcuacggcguguccccuaccaagcugaacgaccugugcuucacaaacguguacgccgacagcuucgugauccggggagaugaagugcggcagauugccccuggacagacaggcaagaucgccgacuacaacuacaagcugcccgacgacuucaccggcugugugauugccuggaacagcaacaaccuggacuccaaagucggcggcaacuacaauuaccuguaccggcuguuccggaaguccaaucugaagcccuucgagcgggacaucagcaccgaaaucuaucaggccggcagcaccccuugcaacggcguggaaggcuucaacugcuacuucccacugcaguccuacggcuuucagcccacaaauggcgugggcuaucagcccuacagagugguggugcugagcuucgaacugcugcaugcuccugccacagugugcggcccuaagaaaagcaccaaucucgugaagaacaaaugcgugaacuucaacuucaacggccugaccggcaccggcgugcugacagagagcaacaagaaguuccugccauuccagcaguuuggccgggauaucgccgauaccacagacgccguuagagauccccagacacuggaaauccuggacaucaccccaugcagcuucggcggagugucugugaucaccccuggcaccaacaccagcaaucagguggcagugcuguaccaggacgugaacuguaccgaagugcccguggccauucacgccgaucagcugacaccuacauggcggguguacuccaccggcagcaauguguuucagaccagagccggcugucugaucggagccgagcacgugaacaauagcuacgagugcgacauccccaucggcgcuggcaucugugccagcuaccagacacagacaaacagccccagacgggcuagaagcguggccagccagagcaucauugccuacacaaugucucugggcgccgagaacagcguggccuacuccaacaacucuaucgcuauccccaccaacuucaccaucagcgugaccaccgagauccugccuguguccaugaccaagaccagcguggacugcaccauguacaucugcggcgauuccaccgagugcuccaaccugcugcugcaguacggcagcuucugcacccagcugaauagagcccugacagggaucgccguggaacaggacaagaacacccaagagguguucgcccaagugaagcaaaucuacaagaccccuccuaucaaggacuucggcggcuucaauuucagccagauucugcccgauccuagcaagcccagcaagcggagcuucaucgaggaccugcuguucaacaaagugacacuggccgacgccggcuucaucaagcaguauggcgauugucugggcgacauugccgccagggaucugauuugcgcccagaaguuuaacggacugacagugcugccuccucugcugaccgaugagaugaucgcccaguacacaucugcccugcuggccggcacaaucacaagcggcuggacauuuggagcuggcgccgcucugcagauccccuuugcuaugcagauggccuaccgguucaacggcaucggagugacccagaaugugcuguacgagaaccagaagcugaucgccaaccaguucaacagcgccaucggcaagauccaggacagccugagcagcacagcaagcgcccugggaaagcugcaggacguggucaaccagaaugcccaggcacugaacacccuggucaagcagcuguccuccaacuucggcgccaucagcucugugcugaacgauauccugagcagacuggacccuccugaggccgaggugcagaucgacagacugaucacaggcagacugcagagccuccagacauacgugacccagcagcugaucagagccgccgagauuagagccucugccaaucuggccgccaccaagaugucugagugugugcugggccagagcaagagaguggacuuuugcggcaagggcuaccaccugaugagcuucccucagucugccccucacggcgugguguuucugcacgugacauaugugcccgcucaagagaagaauuucaccaccgcuccagccaucugccacgacggcaaagcccacuuuccuagagaaggcguguucguguccaacggcacccauugguucgugacacagcggaacuucuacgagccccagaucaucaccaccgacaacaccuucgugucuggcaacugcgacguugugaucggcauugugaacaauaccguguacgacccucugcagcccgagcuggacagcggcggaggaucuggcggaggacagaucuacgagggcaagcugacagccgagggccugagauuuggaaucguggccagccgguucaaucacgcccugguggauagacugguggaaggcgccaucgaugccauugucagacacggcggcagagaagaggacaucacccucguuagagugcccggcucuugggagauuccuguggcugcuggcgagcuggcccggaaagaagauaucgacgccguuaucgccaucggcgugcugaucagaggcgccacaccucacuucgacuauaucgccagcgagguguccaaaggccuggccgaucugagccuggaacugagaaagcccaucaccuucggcgugaucaccgcugacacacuggaacaggccauugagagagccggcaccaagcacggcaacaaaggaugggaagccgcucuguccgccaucgagauggccaaccuguucaagagccugcgguga

SEQ ID NO: 12146 - RNA, 3924 nt, Artificial Sequence
  SARS-CoV-2/Wuhan/WIV05/2019__EPI_ISL_402128 spike protein CDS gc mod (1-1147)(K986P_V987P_T887WN_A1020W) LumSynth construct
auguucguguuucuggugcugcugccccugguguccagccagugugugaaccugaccaccagaacacagcugccuccagccuacaccaacagcuucaccagaggcguguacuaccccgacaagguguucagauccagcgugcugcacucuacccaggaccuguuccugccuuucuucagcaacgugaccugguuccacgccauccacguguccggcaccaauggcaccaagagauucgacaaccccgugcugcccuucaacgacgggguguacuuugccagcaccgagaaguccaacaucaucagaggcuggaucuucggcaccacacuggacagcaagacccagagccugcugaucgugaacaacgccaccaacguggucaucaaagugugcgaguuccaguucugcaacgaccccuuccugggcgucuacuaccacaagaacaacaagagcuggauggaaagcgaguuccggguguacagcagcgccaacaacugcaccuucgaguacgugucccagccuuuccugauggaccuggaaggcaagcagggcaacuucaagaaccugcgcgaguucguguucaagaacaucgacggcuacuucaaaaucuacagcaagcacaccccuaucaaccucgugcgggaucugccucagggcuucucugcucuggaaccccugguggaucugcccaucggcaucaacaucacccgguuucagacacugcuggcccugcacagaagcuaccugacaccuggcgauagcagcagcggauggacagcuggugccgccgcuuacuaugugggcuaccugcagccuagaaccuuccugcugaaguacaacgagaacggcaccaucaccgacgccguggauugugcucuggauccucugagcgagacaaagugcacccugaaguccuucaccguggaaaagggcaucuaccagaccagcaacuuccgggugcagcccaccgaauccaucgugcgguuccccaauaucaccaaucugugccccuucggcgagguguucaaugccaccagauucgccucuguguacgccuggaaccggaagcggaucagcaauugcguggccgacuacuccgugcuguacaacuccgccagcuucagcaccuucaagugcuacggcguguccccuaccaagcugaacgaccugugcuucacaaacguguacgccgacagcuucgugauccggggagaugaagugcggcagauugccccuggacagacaggcaagaucgccgacuacaacuacaagcugcccgacgacuucaccggcugugugauugccuggaacagcaacaaccuggacuccaaagucggcggcaacuacaauuaccuguaccggcuguuccggaaguccaaucugaagcccuucgagcgggacaucagcaccgaaaucuaucaggccggcagcaccccuugcaacggcguggaaggcuucaacugcuacuucccacugcaguccuacggcuuucagcccacaaauggcgugggcuaucagcccuacagagugguggugcugagcuucgaacugcugcaugcuccugccacagugugcggcccuaagaaaagcaccaaucucgugaagaacaaaugcgugaacuucaacuucaacggccugaccggcaccggcgugcugacagagagcaacaagaaguuccugccauuccagcaguuuggccgggauaucgccgauaccacagacgccguuagagauccccagacacuggaaauccuggacaucaccccaugcagcuucggcggagugucugugaucaccccuggcaccaacaccagcaaucagguggcagugcuguaccaggacgugaacuguaccgaagugcccguggccauucacgccgaucagcugacaccuacauggcggguguacuccaccggcagcaauguguuucagaccagagccggcugucugaucggagccgagcacgugaacaauagcuacgagugcgacauccccaucggcgcuggcaucugugccagcuaccagacacagacaaacagccccagacgggcuagaagcguggccagccagagcaucauugccuacacaaugucucugggcgccgagaacagcguggccuacuccaacaacucuaucgcuauccccaccaacuucaccaucagcgugaccaccgagauccugccuguguccaugaccaagaccagcguggacugcaccauguacaucugcggcgauuccaccgagugcuccaaccugcugcugcaguacggcagcuucugcacccagcugaauagagcccugacagggaucgccguggaacaggacaagaacacccaagagguguucgcccaagugaagcaaaucuacaagaccccuccuaucaaggacuucggcggcuucaauuucagccagauucugcccgauccuagcaagcccagcaagcggagcuucaucgaggaccugcuguucaacaaagugacacuggccgacgccggcuucaucaagcaguauggcgauugucugggcgacauugccgccagggaucugauuugcgcccagaaguuuaacggacugacagugcugccuccucugcugaccgaugagaugaucgcccaguacacaucugcccugcuggccggcacaaucacaagcggcuggugguuuggagcuggcgccgcucugcagauccccuuugcuaugcagauggccuaccgguucaacggcaucggagugacccagaaugugcuguacgagaaccagaagcugaucgccaaccaguucaacagcgccaucggcaagauccaggacagccugagcagcacagcaagcgcccugggaaagcugcaggacguggucaaccagaaugcccaggcacugaacacccuggucaagcagcuguccuccaacuucggcgccaucagcucugugcugaacgauauccugagcagacuggacccuccugaggccgaggugcagaucgacagacugaucacaggcagacugcagagccuccagacauacgugacccagcagcugaucagagccgccgagauuagauggucugccaaucuggccgccaccaagaugucugagugugugcugggccagagcaagagaguggacuuuugcggcaagggcuaccaccugaugagcuucccucagucugccccucacggcgugguguuucugcacgugacauaugugcccgcucaagagaagaauuucaccaccgcuccagccaucugccacgacggcaaagcccacuuuccuagagaaggcguguucguguccaacggcacccauugguucgugacacagcggaacuucuacgagccccagaucaucaccaccgacaacaccuucgugucuggcaacugcgacguugugaucggcauugugaacaauaccguguacgacccucugcagcccgagcuggacagcggcggaggaucuggcggaggacagaucuacgagggcaagcugacagccgagggccugagauuuggaaucguggccagccgguucaaucacgcccugguggauagacugguggaaggcgccaucgaugccauugucagacacggcggcagagaagaggacaucacccucguuagagugcccggcucuugggagauuccuguggcugcuggcgagcuggcccggaaagaagauaucgacgccguuaucgccaucggcgugcugaucagaggcgccacaccucacuucgacuauaucgccagcgagguguccaaaggccuggccgaucugagccuggaacugagaaagcccaucaccuucggcgugaucaccgcugacacacuggaacaggccauugagagagccggcaccaagcacggcaacaaaggaugggaagccgcucuguccgccaucgagauggccaaccuguucaagagccugcgguga

SEQ ID NO: 12147 - RNA, 3924 nt, Artificial Sequence
  SARS-CoV-2/Wuhan/WIV05/2019__EPI_ISL_402128 spike protein CDS gc mod (1-1147)(K986P_V987P_P1069F) LumSynth construct
auguucguguuucuggugcugcugccccugguguccagccagugugugaaccugaccaccagaacacagcugccuccagccuacaccaacagcuucaccagaggcguguacuaccccgacaagguguucagauccagcgugcugcacucuacccaggaccuguuccugccuuucuucagcaacgugaccugguuccacgccauccacguguccggcaccaauggcaccaagagauucgacaaccccgugcugcccuucaacgacgggguguacuuugccagcaccgagaaguccaacaucaucagaggcuggaucuucggcaccacacuggacagcaagacccagagccugcugaucgugaacaacgccaccaacguggucaucaaagugugcgaguuccaguucugcaacgaccccuuccugggcgucuacuaccacaagaacaacaagagcuggauggaaagcgaguuccggguguacagcagcgccaacaacugcaccuucgaguacgugucccagccuuuccugauggaccuggaaggcaagcagggcaacuucaagaaccugcgcgaguucguguucaagaacaucgacggcuacuucaaaaucuacagcaagcacaccccuaucaaccucgugcgggaucugccucagggcuucucugcucuggaaccccugguggaucugcccaucggcaucaacaucacccgguuucagacacugcuggcccugcacagaagcuaccugacaccuggcgauagcagcagcggauggacagcuggugccgccgcuuacuaugugggcuaccugcagccuagaaccuuccugcugaaguacaacgagaacggcaccaucaccgacgccguggauugugcucuggauccucugagcgagacaaagugcacccugaaguccuucaccguggaaaagggcaucuaccagaccagcaacuuccgggugcagcccaccgaauccaucgugcgguuccccaauaucaccaaucugugccccuucggcgagguguucaaugccaccagauucgccucuguguacgccuggaaccggaagcggaucagcaauugcguggccgacuacuccgugcuguacaacuccgccagcuucagcaccuucaagugcuacggcguguccccuaccaagcugaacgaccugugcuucacaaacguguacgccgacagcuucgugauccggggagaugaagugcggcagauugccccuggacagacaggcaagaucgccgacuacaacuacaagcugcccgacgacuucaccggcugugugauugccuggaacagcaacaaccuggacuccaaagucggcggcaacuacaauuaccuguaccggcuguuccggaaguccaaucugaagcccuucgagcgggacaucagcaccgaaaucuaucaggccggcagcaccccuugcaacggcguggaaggcuucaacugcuacuucccacugcaguccuacggcuuucagcccacaaauggcgugggcuaucagcccuacagagugguggugcugagcuucgaacugcugcaugcuccugccacagugugcggcccuaagaaaagcaccaaucucgugaagaacaaaugcgugaacuucaacuucaacggccugaccggcaccggcgugcugacagagagcaacaagaaguuccugccauuccagcaguuuggccgggauaucgccgauaccacagacgccguuagagauccccagacacuggaaauccuggacaucaccccaugcagcuucggcggagugucugugaucaccccuggcaccaacaccagcaaucagguggcagugcuguaccaggacgugaacuguaccgaagugcccguggccauucacgccgaucagcugacaccuacauggcggguguacuccaccggcagcaauguguuucagaccagagccggcugucugaucggagccgagcacgugaacaauagcuacgagugcgacauccccaucggcgcuggcaucugugccagcuaccagacacagacaaacagccccagacgggcuagaagcguggccagccagagcaucauugccuacacaaugucucugggcgccgagaacagcguggccuacuccaacaacucuaucgcuauccccaccaacuucaccaucagcgugaccaccgagauccugccuguguccaugaccaagaccagcguggacugcaccauguacaucugcggcgauuccaccgagugcuccaaccugcugcugcaguacggcagcuucugcacccagcugaauagagcccugacagggaucgccguggaacaggacaagaacacccaagagguguucgcccaagugaagcaaaucuacaagaccccuccuaucaaggacuucggcggcuucaauuucagccagauucugcccgauccuagcaagcccagcaagcggagcuucaucgaggaccugcuguucaacaaagugacacuggccgacgccggcuucaucaagcaguauggcgauugucugggcgacauugccgccagggaucugauuugcgcccagaaguuuaacggacugacagugcugccuccucugcugaccgaugagaugaucgcccaguacacaucugcccugcuggccggcacaaucacaagcggcuggacauuuggagcuggcgccgcucugcagauccccuuugcuaugcagauggccuaccgguucaacggcaucggagugacccagaaugugcuguacgagaaccagaagcugaucgccaaccaguucaacagcgccaucggcaagauccaggacagccugagcagcacagcaagcgcccugggaaagcugcaggacguggucaaccagaaugcccaggcacugaacacccuggucaagcagcuguccuccaacuucggcgccaucagcucugugcugaacgauauccugagcagacuggacccuccugaggccgaggugcagaucgacagacugaucacaggcagacugcagagccuccagacauacgugacccagcagcugaucagagccgccgagauuagagccucugccaaucuggccgccaccaagaugucugagugugugcugggccagagcaagagaguggacuuuugcggcaagggcuaccaccugaugagcuucccucagucugccccucacggcgugguguuucugcacgugacauauguguucgcucaagagaagaauuucaccaccgcuccagccaucugccacgacggcaaagcccacuuuccuagagaaggcguguucguguccaacggcacccauugguucgugacacagcggaacuucuacgagccccagaucaucaccaccgacaacaccuucgugucuggcaacugcgacguugugaucggcauugugaacaauaccguguacgacccucugcagcccgagcuggacagcggcggaggaucuggcggaggacagaucuacgagggcaagcugacagccgagggccugagauuuggaaucguggccagccgguucaaucacgcccugguggauagacugguggaaggcgccaucgaugccauugucagacacggcggcagagaagaggacaucacccucguuagagugcccggcucuugggagauuccuguggcugcuggcgagcuggcccggaaagaagauaucgacgccguuaucgccaucggcgugcugaucagaggcgccacaccucacuucgacuauaucgccagcgagguguccaaaggccuggccgaucugagccuggaacugagaaagcccaucaccuucggcgugaucaccgcugacacacuggaacaggccauugagagagccggcaccaagcacggcaacaaaggaugggaagccgcucuguccgccaucgagauggccaaccuguucaagagccugcgguga

SEQ ID NO: 12148 - RNA, 3924 nt, Artificial Sequence
  SARS-CoV-2/Wuhan/WIV05/2019__EPI_ISL_402128 spike protein CDS gc mod (1-1147)(K986P_V987P_ H1048Q_H1064N_ H1083N_H1101N) LumSynth construct
auguucguguuucuggugcugcugccccugguguccagccagugugugaaccugaccaccagaacacagcugccuccagccuacaccaacagcuucaccagaggcguguacuaccccgacaagguguucagauccagcgugcugcacucuacccaggaccuguuccugccuuucuucagcaacgugaccugguuccacgccauccacguguccggcaccaauggcaccaagagauucgacaaccccgugcugcccuucaacgacgggguguacuuugccagcaccgagaaguccaacaucaucagaggcuggaucuucggcaccacacuggacagcaagacccagagccugcugaucgugaacaacgccaccaacguggucaucaaagugugcgaguuccaguucugcaacgaccccuuccugggcgucuacuaccacaagaacaacaagagcuggauggaaagcgaguuccggguguacagcagcgccaacaacugcaccuucgaguacgugucccagccuuuccugauggaccuggaaggcaagcagggcaacuucaagaaccugcgcgaguucguguucaagaacaucgacggcuacuucaaaaucuacagcaagcacaccccuaucaaccucgugcgggaucugccucagggcuucucugcucuggaaccccugguggaucugcccaucggcaucaacaucacccgguuucagacacugcuggcccugcacagaagcuaccugacaccuggcgauagcagcagcggauggacagcuggugccgccgcuuacuaugugggcuaccugcagccuagaaccuuccugcugaaguacaacgagaacggcaccaucaccgacgccguggauugugcucuggauccucugagcgagacaaagugcacccugaaguccuucaccguggaaaagggcaucuaccagaccagcaacuuccgggugcagcccaccgaauccaucgugcgguuccccaauaucaccaaucugugccccuucggcgagguguucaaugccaccagauucgccucuguguacgccuggaaccggaagcggaucagcaauugcguggccgacuacuccgugcuguacaacuccgccagcuucagcaccuucaagugcuacggcguguccccuaccaagcugaacgaccugugcuucacaaacguguacgccgacagcuucgugauccggggagaugaagugcggcagauugccccuggacagacaggcaagaucgccgacuacaacuacaagcugcccgacgacuucaccggcugugugauugccuggaacagcaacaaccuggacuccaaagucggcggcaacuacaauuaccuguaccggcuguuccggaaguccaaucugaagcccuucgagcgggacaucagcaccgaaaucuaucaggccggcagcaccccuugcaacggcguggaaggcuucaacugcuacuucccacugcaguccuacggcuuucagcccacaaauggcgugggcuaucagcccuacagagugguggugcugagcuucgaacugcugcaugcuccugccacagugugcggcccuaagaaaagcaccaaucucgugaagaacaaaugcgugaacuucaacuucaacggccugaccggcaccggcgugcugacagagagcaacaagaaguuccugccauuccagcaguuuggccgggauaucgccgauaccacagacgccguuagagauccccagacacuggaaauccuggacaucaccccaugcagcuucggcggagugucugugaucaccccuggcaccaacaccagcaaucagguggcagugcuguaccaggacgugaacuguaccgaagugcccguggccauucacgccgaucagcugacaccuacauggcggguguacuccaccggcagcaauguguuucagaccagagccggcugucugaucggagccgagcacgugaacaauagcuacgagugcgacauccccaucggcgcuggcaucugugccagcuaccagacacagacaaacagccccagacgggcuagaagcguggccagccagagcaucauugccuacacaaugucucugggcgccgagaacagcguggccuacuccaacaacucuaucgcuauccccaccaacuucaccaucagcgugaccaccgagauccugccuguguccaugaccaagaccagcguggacugcaccauguacaucugcggcgauuccaccgagugcuccaaccugcugcugcaguacggcagcuucugcacccagcugaauagagcccugacagggaucgccguggaacaggacaagaacacccaagagguguucgcccaagugaagcaaaucuacaagaccccuccuaucaaggacuucggcggcuucaauuucagccagauucugcccgauccuagcaagcccagcaagcggagcuucaucgaggaccugcuguucaacaaagugacacuggccgacgccggcuucaucaagcaguauggcgauugucugggcgacauugccgccagggaucugauuugcgcccagaaguuuaacggacugacagugcugccuccucugcugaccgaugagaugaucgcccaguacacaucugcccugcuggccggcacaaucacaagcggcuggacauuuggagcuggcgccgcucugcagauccccuuugcuaugcagauggccuaccgguucaacggcaucggagugacccagaaugugcuguacgagaaccagaagcugaucgccaaccaguucaacagcgccaucggcaagauccaggacagccugagcagcacagcaagcgcccugggaaagcugcaggacguggucaaccagaaugcccaggcacugaacacccuggucaagcagcuguccuccaacuucggcgccaucagcucugugcugaacgauauccugagcagacuggacccuccugaggccgaggugcagaucgacagacugaucacaggcagacugcagagccuccagacauacgugacccagcagcugaucagagccgccgagauuagagccucugccaaucuggccgccaccaagaugucugagugugugcugggccagagcaagagaguggacuuuugcggcaagggcuaccagcugaugagcuucccucagucugccccucacggcgugguguuucugaacgugacauaugugcccgcucaagagaagaauuucaccaccgcuccagccaucugcaacgacggcaaagcccacuuuccuagagaaggcguguucguguccaacggcaccaacugguucgugacacagcggaacuucuacgagccccagaucaucaccaccgacaacaccuucgugucuggcaacugcgacguugugaucggcauugugaacaauaccguguacgacccucugcagcccgagcuggacagcggcggaggaucuggcggaggacagaucuacgagggcaagcugacagccgagggccugagauuuggaaucguggccagccgguucaaucacgcccugguggauagacugguggaaggcgccaucgaugccauugucagacacggcggcagagaagaggacaucacccucguuagagugcccggcucuugggagauuccuguggcugcuggcgagcuggcccggaaagaagauaucgacgccguuaucgccaucggcgugcugaucagaggcgccacaccucacuucgacuauaucgccagcgagguguccaaaggccuggccgaucugagccuggaacugagaaagcccaucaccuucggcgugaucaccgcugacacacuggaacaggccauugagagagccggcaccaagcacggcaacaaaggaugggaagccgcucuguccgccaucgagauggccaaccuguucaagagccugcgguga

SEQ ID NO: 12149 - RNA, 3924 nt, Artificial Sequence
  SARS-CoV-2/Wuhan/WIV05/2019__EPI_ISL_402128 spike protein CDS gc mod (1-1147)(I712C_T1077C) LumSynth construct
auguucguguuucuggugcugcugccccugguguccagccagugugugaaccugaccaccagaacacagcugccuccagccuacaccaacagcuucaccagaggcguguacuaccccgacaagguguucagauccagcgugcugcacucuacccaggaccuguuccugccuuucuucagcaacgugaccugguuccacgccauccacguguccggcaccaauggcaccaagagauucgacaaccccgugcugcccuucaacgacgggguguacuuugccagcaccgagaaguccaacaucaucagaggcuggaucuucggcaccacacuggacagcaagacccagagccugcugaucgugaacaacgccaccaacguggucaucaaagugugcgaguuccaguucugcaacgaccccuuccugggcgucuacuaccacaagaacaacaagagcuggauggaaagcgaguuccggguguacagcagcgccaacaacugcaccuucgaguacgugucccagccuuuccugauggaccuggaaggcaagcagggcaacuucaagaaccugcgcgaguucguguucaagaacaucgacggcuacuucaaaaucuacagcaagcacaccccuaucaaccucgugcgggaucugccucagggcuucucugcucuggaaccccugguggaucugcccaucggcaucaacaucacccgguuucagacacugcuggcccugcacagaagcuaccugacaccuggcgauagcagcagcggauggacagcuggugccgccgcuuacuaugugggcuaccugcagccuagaaccuuccugcugaaguacaacgagaacggcaccaucaccgacgccguggauugugcucuggauccucugagcgagacaaagugcacccugaaguccuucaccguggaaaagggcaucuaccagaccagcaacuuccgggugcagcccaccgaauccaucgugcgguuccccaauaucaccaaucugugccccuucggcgagguguucaaugccaccagauucgccucuguguacgccuggaaccggaagcggaucagcaauugcguggccgacuacuccgugcuguacaacuccgccagcuucagcaccuucaagugcuacggcguguccccuaccaagcugaacgaccugugcuucacaaacguguacgccgacagcuucgugauccggggagaugaagugcggcagauugccccuggacagacaggcaagaucgccgacuacaacuacaagcugcccgacgacuucaccggcugugugauugccuggaacagcaacaaccuggacuccaaagucggcggcaacuacaauuaccuguaccggcuguuccggaaguccaaucugaagcccuucgagcgggacaucagcaccgaaaucuaucaggccggcagcaccccuugcaacggcguggaaggcuucaacugcuacuucccacugcaguccuacggcuuucagcccacaaauggcgugggcuaucagcccuacagagugguggugcugagcuucgaacugcugcaugcuccugccacagugugcggcccuaagaaaagcaccaaucucgugaagaacaaaugcgugaacuucaacuucaacggccugaccggcaccggcgugcugacagagagcaacaagaaguuccugccauuccagcaguuuggccgggauaucgccgauaccacagacgccguuagagauccccagacacuggaaauccuggacaucaccccaugcagcuucggcggagugucugugaucaccccuggcaccaacaccagcaaucagguggcagugcuguaccaggacgugaacuguaccgaagugcccguggccauucacgccgaucagcugacaccuacauggcggguguacuccaccggcagcaauguguuucagaccagagccggcugucugaucggagccgagcacgugaacaauagcuacgagugcgacauccccaucggcgcuggcaucugugccagcuaccagacacagacaaacagccccagacgggcuagaagcguggccagccagagcaucauugccuacacaaugucucugggcgccgagaacagcguggccuacuccaacaacucuugcgcuauccccaccaacuucaccaucagcgugaccaccgagauccugccuguguccaugaccaagaccagcguggacugcaccauguacaucugcggcgauuccaccgagugcuccaaccugcugcugcaguacggcagcuucugcacccagcugaauagagcccugacagggaucgccguggaacaggacaagaacacccaagagguguucgcccaagugaagcaaaucuacaagaccccuccuaucaaggacuucggcggcuucaauuucagccagauucugcccgauccuagcaagcccagcaagcggagcuucaucgaggaccugcuguucaacaaagugacacuggccgacgccggcuucaucaagcaguauggcgauugucugggcgacauugccgccagggaucugauuugcgcccagaaguuuaacggacugacagugcugccuccucugcugaccgaugagaugaucgcccaguacacaucugcccugcuggccggcacaaucacaagcggcuggacauuuggagcuggcgccgcucugcagauccccuuugcuaugcagauggccuaccgguucaacggcaucggagugacccagaaugugcuguacgagaaccagaagcugaucgccaaccaguucaacagcgccaucggcaagauccaggacagccugagcagcacagcaagcgcccugggaaagcugcaggacguggucaaccagaaugcccaggcacugaacacccuggucaagcagcuguccuccaacuucggcgccaucagcucugugcugaacgauauccugagcagacuggacaaggucgaggccgaggugcagaucgacagacugaucacaggcagacugcagagccuccagacauacgugacccagcagcugaucagagccgccgagauuagagccucugccaaucuggccgccaccaagaugucugagugugugcugggccagagcaagagaguggacuuuugcggcaagggcuaccaccugaugagcuucccucagucugccccucacggcgugguguuucugcacgugacauaugugcccgcucaagagaagaauuucaccugugcuccagccaucugccacgacggcaaagcccacuuuccuagagaaggcguguucguguccaacggcacccauugguucgugacacagcggaacuucuacgagccccagaucaucaccaccgacaacaccuucgugucuggcaacugcgacguugugaucggcauugugaacaauaccguguacgacccucugcagcccgagcuggacagcggcggaggaucuggcggaggacagaucuacgagggcaagcugacagccgagggccugagauuuggaaucguggccagccgguucaaucacgcccugguggauagacugguggaaggcgccaucgaugccauugucagacacggcggcagagaagaggacaucacccucguuagagugcccggcucuugggagauuccuguggcugcuggcgagcuggcccggaaagaagauaucgacgccguuaucgccaucggcgugcugaucagaggcgccacaccucacuucgacuauaucgccagcgagguguccaaaggccuggccgaucugagccuggaacugagaaagcccaucaccuucggcgugaucaccgcugacacacuggaacaggccauugagagagccggcaccaagcacggcaacaaaggaugggaagccgcucuguccgccaucgagauggccaaccuguucaagagccugcgguga

SEQ ID NO: 12150 - RNA, 3924 nt, Artificial Sequence
  SARS-CoV-2/Wuhan/WIV05/2019__EPI_ISL_402128 spike protein CDS gc mod (1-1147)(I714C_Y1110C) LumSynth construct
auguucguguuucuggugcugcugccccugguguccagccagugugugaaccugaccaccagaacacagcugccuccagccuacaccaacagcuucaccagaggcguguacuaccccgacaagguguucagauccagcgugcugcacucuacccaggaccuguuccugccuuucuucagcaacgugaccugguuccacgccauccacguguccggcaccaauggcaccaagagauucgacaaccccgugcugcccuucaacgacgggguguacuuugccagcaccgagaaguccaacaucaucagaggcuggaucuucggcaccacacuggacagcaagacccagagccugcugaucgugaacaacgccaccaacguggucaucaaagugugcgaguuccaguucugcaacgaccccuuccugggcgucuacuaccacaagaacaacaagagcuggauggaaagcgaguuccggguguacagcagcgccaacaacugcaccuucgaguacgugucccagccuuuccugauggaccuggaaggcaagcagggcaacuucaagaaccugcgcgaguucguguucaagaacaucgacggcuacuucaaaaucuacagcaagcacaccccuaucaaccucgugcgggaucugccucagggcuucucugcucuggaaccccugguggaucugcccaucggcaucaacaucacccgguuucagacacugcuggcccugcacagaagcuaccugacaccuggcgauagcagcagcggauggacagcuggugccgccgcuuacuaugugggcuaccugcagccuagaaccuuccugcugaaguacaacgagaacggcaccaucaccgacgccguggauugugcucuggauccucugagcgagacaaagugcacccugaaguccuucaccguggaaaagggcaucuaccagaccagcaacuuccgggugcagcccaccgaauccaucgugcgguuccccaauaucaccaaucugugccccuucggcgagguguucaaugccaccagauucgccucuguguacgccuggaaccggaagcggaucagcaauugcguggccgacuacuccgugcuguacaacuccgccagcuucagcaccuucaagugcuacggcguguccccuaccaagcugaacgaccugugcuucacaaacguguacgccgacagcuucgugauccggggagaugaagugcggcagauugccccuggacagacaggcaagaucgccgacuacaacuacaagcugcccgacgacuucaccggcugugugauugccuggaacagcaacaaccuggacuccaaagucggcggcaacuacaauuaccuguaccggcuguuccggaaguccaaucugaagcccuucgagcgggacaucagcaccgaaaucuaucaggccggcagcaccccuugcaacggcguggaaggcuucaacugcuacuucccacugcaguccuacggcuuucagcccacaaauggcgugggcuaucagcccuacagagugguggugcugagcuucgaacugcugcaugcuccugccacagugugcggcccuaagaaaagcaccaaucucgugaagaacaaaugcgugaacuucaacuucaacggccugaccggcaccggcgugcugacagagagcaacaagaaguuccugccauuccagcaguuuggccgggauaucgccgauaccacagacgccguuagagauccccagacacuggaaauccuggacaucaccccaugcagcuucggcggagugucugugaucaccccuggcaccaacaccagcaaucagguggcagugcuguaccaggacgugaacuguaccgaagugcccguggccauucacgccgaucagcugacaccuacauggcggguguacuccaccggcagcaauguguuucagaccagagccggcugucugaucggagccgagcacgugaacaauagcuacgagugcgacauccccaucggcgcuggcaucugugccagcuaccagacacagacaaacagccccagacgggcuagaagcguggccagccagagcaucauugccuacacaaugucucugggcgccgagaacagcguggccuacuccaacaacucuaucgcuugccccaccaacuucaccaucagcgugaccaccgagauccugccuguguccaugaccaagaccagcguggacugcaccauguacaucugcggcgauuccaccgagugcuccaaccugcugcugcaguacggcagcuucugcacccagcugaauagagcccugacagggaucgccguggaacaggacaagaacacccaagagguguucgcccaagugaagcaaaucuacaagaccccuccuaucaaggacuucggcggcuucaauuucagccagauucugcccgauccuagcaagcccagcaagcggagcuucaucgaggaccugcuguucaacaaagugacacuggccgacgccggcuucaucaagcaguauggcgauugucugggcgacauugccgccagggaucugauuugcgcccagaaguuuaacggacugacagugcugccuccucugcugaccgaugagaugaucgcccaguacacaucugcccugcuggccggcacaaucacaagcggcuggacauuuggagcuggcgccgcucugcagauccccuuugcuaugcagauggccuaccgguucaacggcaucggagugacccagaaugugcuguacgagaaccagaagcugaucgccaaccaguucaacagcgccaucggcaagauccaggacagccugagcagcacagcaagcgcccugggaaagcugcaggacguggucaaccagaaugcccaggcacugaacacccuggucaagcagcuguccuccaacuucggcgccaucagcucugugcugaacgauauccugagcagacuggacaaggucgaggccgaggugcagaucgacagacugaucacaggcagacugcagagccuccagacauacgugacccagcagcugaucagagccgccgagauuagagccucugccaaucuggccgccaccaagaugucugagugugugcugggccagagcaagagaguggacuuuugcggcaagggcuaccaccugaugagcuucccucagucugccccucacggcgugguguuucugcacgugacauaugugcccgcucaagagaagaauuucaccaccgcuccagccaucugccacgacggcaaagcccacuuuccuagagaaggcguguucguguccaacggcacccauugguucgugacacagcggaacuucugugagccccagaucaucaccaccgacaacaccuucgugucuggcaacugcgacguugugaucggcauugugaacaauaccguguacgacccucugcagcccgagcuggacagcggcggaggaucuggcggaggacagaucuacgagggcaagcugacagccgagggccugagauuuggaaucguggccagccgguucaaucacgcccugguggauagacugguggaaggcgccaucgaugccauugucagacacggcggcagagaagaggacaucacccucguuagagugcccggcucuugggagauuccuguggcugcuggcgagcuggcccggaaagaagauaucgacgccguuaucgccaucggcgugcugaucagaggcgccacaccucacuucgacuauaucgccagcgagguguccaaaggccuggccgaucugagccuggaacugagaaagcccaucaccuucggcgugaucaccgcugacacacuggaacaggccauugagagagccggcaccaagcacggcaacaaaggaugggaagccgcucuguccgccaucgagauggccaaccuguucaagagccugcgguga

SEQ ID NO: 12151 - RNA, 3924 nt, Artificial Sequence
  SARS-CoV-2/Wuhan/WIV05/2019__EPI_ISL_402128 spike protein CDS gc mod (1-1147)(P715C_P1069C) LumSynth construct
auguucguguuucuggugcugcugccccugguguccagccagugugugaaccugaccaccagaacacagcugccuccagccuacaccaacagcuucaccagaggcguguacuaccccgacaagguguucagauccagcgugcugcacucuacccaggaccuguuccugccuuucuucagcaacgugaccugguuccacgccauccacguguccggcaccaauggcaccaagagauucgacaaccccgugcugcccuucaacgacgggguguacuuugccagcaccgagaaguccaacaucaucagaggcuggaucuucggcaccacacuggacagcaagacccagagccugcugaucgugaacaacgccaccaacguggucaucaaagugugcgaguuccaguucugcaacgaccccuuccugggcgucuacuaccacaagaacaacaagagcuggauggaaagcgaguuccggguguacagcagcgccaacaacugcaccuucgaguacgugucccagccuuuccugauggaccuggaaggcaagcagggcaacuucaagaaccugcgcgaguucguguucaagaacaucgacggcuacuucaaaaucuacagcaagcacaccccuaucaaccucgugcgggaucugccucagggcuucucugcucuggaaccccugguggaucugcccaucggcaucaacaucacccgguuucagacacugcuggcccugcacagaagcuaccugacaccuggcgauagcagcagcggauggacagcuggugccgccgcuuacuaugugggcuaccugcagccuagaaccuuccugcugaaguacaacgagaacggcaccaucaccgacgccguggauugugcucuggauccucugagcgagacaaagugcacccugaaguccuucaccguggaaaagggcaucuaccagaccagcaacuuccgggugcagcccaccgaauccaucgugcgguuccccaauaucaccaaucugugccccuucggcgagguguucaaugccaccagauucgccucuguguacgccuggaaccggaagcggaucagcaauugcguggccgacuacuccgugcuguacaacuccgccagcuucagcaccuucaagugcuacggcguguccccuaccaagcugaacgaccugugcuucacaaacguguacgccgacagcuucgugauccggggagaugaagugcggcagauugccccuggacagacaggcaagaucgccgacuacaacuacaagcugcccgacgacuucaccggcugugugauugccuggaacagcaacaaccuggacuccaaagucggcggcaacuacaauuaccuguaccggcuguuccggaaguccaaucugaagcccuucgagcgggacaucagcaccgaaaucuaucaggccggcagcaccccuugcaacggcguggaaggcuucaacugcuacuucccacugcaguccuacggcuuucagcccacaaauggcgugggcuaucagcccuacagagugguggugcugagcuucgaacugcugcaugcuccugccacagugugcggcccuaagaaaagcaccaaucucgugaagaacaaaugcgugaacuucaacuucaacggccugaccggcaccggcgugcugacagagagcaacaagaaguuccugccauuccagcaguuuggccgggauaucgccgauaccacagacgccguuagagauccccagacacuggaaauccuggacaucaccccaugcagcuucggcggagugucugugaucaccccuggcaccaacaccagcaaucagguggcagugcuguaccaggacgugaacuguaccgaagugcccguggccauucacgccgaucagcugacaccuacauggcggguguacuccaccggcagcaauguguuucagaccagagccggcugucugaucggagccgagcacgugaacaauagcuacgagugcgacauccccaucggcgcuggcaucugugccagcuaccagacacagacaaacagccccagacgggcuagaagcguggccagccagagcaucauugccuacacaaugucucugggcgccgagaacagcguggccuacuccaacaacucuaucgcuaucugcaccaacuucaccaucagcgugaccaccgagauccugccuguguccaugaccaagaccagcguggacugcaccauguacaucugcggcgauuccaccgagugcuccaaccugcugcugcaguacggcagcuucugcacccagcugaauagagcccugacagggaucgccguggaacaggacaagaacacccaagagguguucgcccaagugaagcaaaucuacaagaccccuccuaucaaggacuucggcggcuucaauuucagccagauucugcccgauccuagcaagcccagcaagcggagcuucaucgaggaccugcuguucaacaaagugacacuggccgacgccggcuucaucaagcaguauggcgauugucugggcgacauugccgccagggaucugauuugcgcccagaaguuuaacggacugacagugcugccuccucugcugaccgaugagaugaucgcccaguacacaucugcccugcuggccggcacaaucacaagcggcuggacauuuggagcuggcgccgcucugcagauccccuuugcuaugcagauggccuaccgguucaacggcaucggagugacccagaaugugcuguacgagaaccagaagcugaucgccaaccaguucaacagcgccaucggcaagauccaggacagccugagcagcacagcaagcgcccugggaaagcugcaggacguggucaaccagaaugcccaggcacugaacacccuggucaagcagcuguccuccaacuucggcgccaucagcucugugcugaacgauauccugagcagacuggacaaggucgaggccgaggugcagaucgacagacugaucacaggcagacugcagagccuccagacauacgugacccagcagcugaucagagccgccgagauuagagccucugccaaucuggccgccaccaagaugucugagugugugcugggccagagcaagagaguggacuuuugcggcaagggcuaccaccugaugagcuucccucagucugccccucacggcgugguguuucugcacgugacauaugugugugcucaagagaagaauuucaccaccgcuccagccaucugccacgacggcaaagcccacuuuccuagagaaggcguguucguguccaacggcacccauugguucgugacacagcggaacuucuacgagccccagaucaucaccaccgacaacaccuucgugucuggcaacugcgacguugugaucggcauugugaacaauaccguguacgacccucugcagcccgagcuggacagcggcggaggaucuggcggaggacagaucuacgagggcaagcugacagccgagggccugagauuuggaaucguggccagccgguucaaucacgcccugguggauagacugguggaaggcgccaucgaugccauugucagacacggcggcagagaagaggacaucacccucguuagagugcccggcucuugggagauuccuguggcugcuggcgagcuggcccggaaagaagauaucgacgccguuaucgccaucggcgugcugaucagaggcgccacaccucacuucgacuauaucgccagcgagguguccaaaggccuggccgaucugagccuggaacugagaaagcccaucaccuucggcgugaucaccgcugacacacuggaacaggccauugagagagccggcaccaagcacggcaacaaaggaugggaagccgcucuguccgccaucgagauggccaaccuguucaagagccugcgguga

SEQ ID NO: 12152 - RNA, 3924 nt, Artificial Sequence
  SARS-CoV-2/Wuhan/WIV05/2019__EPI_ISL_402128 spike protein CDS gc mod (1-1147)(G889C_L1034C) LumSynth construct
auguucguguuucuggugcugcugccccugguguccagccagugugugaaccugaccaccagaacacagcugccuccagccuacaccaacagcuucaccagaggcguguacuaccccgacaagguguucagauccagcgugcugcacucuacccaggaccuguuccugccuuucuucagcaacgugaccugguuccacgccauccacguguccggcaccaauggcaccaagagauucgacaaccccgugcugcccuucaacgacgggguguacuuugccagcaccgagaaguccaacaucaucagaggcuggaucuucggcaccacacuggacagcaagacccagagccugcugaucgugaacaacgccaccaacguggucaucaaagugugcgaguuccaguucugcaacgaccccuuccugggcgucuacuaccacaagaacaacaagagcuggauggaaagcgaguuccggguguacagcagcgccaacaacugcaccuucgaguacgugucccagccuuuccugauggaccuggaaggcaagcagggcaacuucaagaaccugcgcgaguucguguucaagaacaucgacggcuacuucaaaaucuacagcaagcacaccccuaucaaccucgugcgggaucugccucagggcuucucugcucuggaaccccugguggaucugcccaucggcaucaacaucacccgguuucagacacugcuggcccugcacagaagcuaccugacaccuggcgauagcagcagcggauggacagcuggugccgccgcuuacuaugugggcuaccugcagccuagaaccuuccugcugaaguacaacgagaacggcaccaucaccgacgccguggauugugcucuggauccucugagcgagacaaagugcacccugaaguccuucaccguggaaaagggcaucuaccagaccagcaacuuccgggugcagcccaccgaauccaucgugcgguuccccaauaucaccaaucugugccccuucggcgagguguucaaugccaccagauucgccucuguguacgccuggaaccggaagcggaucagcaauugcguggccgacuacuccgugcuguacaacuccgccagcuucagcaccuucaagugcuacggcguguccccuaccaagcugaacgaccugugcuucacaaacguguacgccgacagcuucgugauccggggagaugaagugcggcagauugccccuggacagacaggcaagaucgccgacuacaacuacaagcugcccgacgacuucaccggcugugugauugccuggaacagcaacaaccuggacuccaaagucggcggcaacuacaauuaccuguaccggcuguuccggaaguccaaucugaagcccuucgagcgggacaucagcaccgaaaucuaucaggccggcagcaccccuugcaacggcguggaaggcuucaacugcuacuucccacugcaguccuacggcuuucagcccacaaauggcgugggcuaucagcccuacagagugguggugcugagcuucgaacugcugcaugcuccugccacagugugcggcccuaagaaaagcaccaaucucgugaagaacaaaugcgugaacuucaacuucaacggccugaccggcaccggcgugcugacagagagcaacaagaaguuccugccauuccagcaguuuggccgggauaucgccgauaccacagacgccguuagagauccccagacacuggaaauccuggacaucaccccaugcagcuucggcggagugucugugaucaccccuggcaccaacaccagcaaucagguggcagugcuguaccaggacgugaacuguaccgaagugcccguggccauucacgccgaucagcugacaccuacauggcggguguacuccaccggcagcaauguguuucagaccagagccggcugucugaucggagccgagcacgugaacaauagcuacgagugcgacauccccaucggcgcuggcaucugugccagcuaccagacacagacaaacagccccagacgggcuagaagcguggccagccagagcaucauugccuacacaaugucucugggcgccgagaacagcguggccuacuccaacaacucuaucgcuauccccaccaacuucaccaucagcgugaccaccgagauccugccuguguccaugaccaagaccagcguggacugcaccauguacaucugcggcgauuccaccgagugcuccaaccugcugcugcaguacggcagcuucugcacccagcugaauagagcccugacagggaucgccguggaacaggacaagaacacccaagagguguucgcccaagugaagcaaaucuacaagaccccuccuaucaaggacuucggcggcuucaauuucagccagauucugcccgauccuagcaagcccagcaagcggagcuucaucgaggaccugcuguucaacaaagugacacuggccgacgccggcuucaucaagcaguauggcgauugucugggcgacauugccgccagggaucugauuugcgcccagaaguuuaacggacugacagugcugccuccucugcugaccgaugagaugaucgcccaguacacaucugcccugcuggccggcacaaucacaagcggcuggacauuuugcgcuggcgccgcucugcagauccccuuugcuaugcagauggccuaccgguucaacggcaucggagugacccagaaugugcuguacgagaaccagaagcugaucgccaaccaguucaacagcgccaucggcaagauccaggacagccugagcagcacagcaagcgcccugggaaagcugcaggacguggucaaccagaaugcccaggcacugaacacccuggucaagcagcuguccuccaacuucggcgccaucagcucugugcugaacgauauccugagcagacuggacaaggucgaggccgaggugcagaucgacagacugaucacaggcagacugcagagccuccagacauacgugacccagcagcugaucagagccgccgagauuagagccucugccaaucuggccgccaccaagaugucugaguguguguguggccagagcaagagaguggacuuuugcggcaagggcuaccaccugaugagcuucccucagucugccccucacggcgugguguuucugcacgugacauaugugcccgcucaagagaagaauuucaccaccgcuccagccaucugccacgacggcaaagcccacuuuccuagagaaggcguguucguguccaacggcacccauugguucgugacacagcggaacuucuacgagccccagaucaucaccaccgacaacaccuucgugucuggcaacugcgacguugugaucggcauugugaacaauaccguguacgacccucugcagcccgagcuggacagcggcggaggaucuggcggaggacagaucuacgagggcaagcugacagccgagggccugagauuuggaaucguggccagccgguucaaucacgcccugguggauagacugguggaaggcgccaucgaugccauugucagacacggcggcagagaagaggacaucacccucguuagagugcccggcucuugggagauuccuguggcugcuggcgagcuggcccggaaagaagauaucgacgccguuaucgccaucggcgugcugaucagaggcgccacaccucacuucgacuauaucgccagcgagguguccaaaggccuggccgaucugagccuggaacugagaaagcccaucaccuucggcgugaucaccgcugacacacuggaacaggccauugagagagccggcaccaagcacggcaacaaaggaugggaagccgcucuguccgccaucgagauggccaaccuguucaagagccugcgguga

SEQ ID NO: 12153 - RNA, 3924 nt, Artificial Sequence
  SARS-CoV-2/Wuhan/WIV05/2019__EPI_ISL_402128 spike protein CDS gc mod (1-1147)(I909C_Y1047C) LumSynth construct
auguucguguuucuggugcugcugccccugguguccagccagugugugaaccugaccaccagaacacagcugccuccagccuacaccaacagcuucaccagaggcguguacuaccccgacaagguguucagauccagcgugcugcacucuacccaggaccuguuccugccuuucuucagcaacgugaccugguuccacgccauccacguguccggcaccaauggcaccaagagauucgacaaccccgugcugcccuucaacgacgggguguacuuugccagcaccgagaaguccaacaucaucagaggcuggaucuucggcaccacacuggacagcaagacccagagccugcugaucgugaacaacgccaccaacguggucaucaaagugugcgaguuccaguucugcaacgaccccuuccugggcgucuacuaccacaagaacaacaagagcuggauggaaagcgaguuccggguguacagcagcgccaacaacugcaccuucgaguacgugucccagccuuuccugauggaccuggaaggcaagcagggcaacuucaagaaccugcgcgaguucguguucaagaacaucgacggcuacuucaaaaucuacagcaagcacaccccuaucaaccucgugcgggaucugccucagggcuucucugcucuggaaccccugguggaucugcccaucggcaucaacaucacccgguuucagacacugcuggcccugcacagaagcuaccugacaccuggcgauagcagcagcggauggacagcuggugccgccgcuuacuaugugggcuaccugcagccuagaaccuuccugcugaaguacaacgagaacggcaccaucaccgacgccguggauugugcucuggauccucugagcgagacaaagugcacccugaaguccuucaccguggaaaagggcaucuaccagaccagcaacuuccgggugcagcccaccgaauccaucgugcgguuccccaauaucaccaaucugugccccuucggcgagguguucaaugccaccagauucgccucuguguacgccuggaaccggaagcggaucagcaauugcguggccgacuacuccgugcuguacaacuccgccagcuucagcaccuucaagugcuacggcguguccccuaccaagcugaacgaccugugcuucacaaacguguacgccgacagcuucgugauccggggagaugaagugcggcagauugccccuggacagacaggcaagaucgccgacuacaacuacaagcugcccgacgacuucaccggcugugugauugccuggaacagcaacaaccuggacuccaaagucggcggcaacuacaauuaccuguaccggcuguuccggaaguccaaucugaagcccuucgagcgggacaucagcaccgaaaucuaucaggccggcagcaccccuugcaacggcguggaaggcuucaacugcuacuucccacugcaguccuacggcuuucagcccacaaauggcgugggcuaucagcccuacagagugguggugcugagcuucgaacugcugcaugcuccugccacagugugcggcccuaagaaaagcaccaaucucgugaagaacaaaugcgugaacuucaacuucaacggccugaccggcaccggcgugcugacagagagcaacaagaaguuccugccauuccagcaguuuggccgggauaucgccgauaccacagacgccguuagagauccccagacacuggaaauccuggacaucaccccaugcagcuucggcggagugucugugaucaccccuggcaccaacaccagcaaucagguggcagugcuguaccaggacgugaacuguaccgaagugcccguggccauucacgccgaucagcugacaccuacauggcggguguacuccaccggcagcaauguguuucagaccagagccggcugucugaucggagccgagcacgugaacaauagcuacgagugcgacauccccaucggcgcuggcaucugugccagcuaccagacacagacaaacagccccagacgggcuagaagcguggccagccagagcaucauugccuacacaaugucucugggcgccgagaacagcguggccuacuccaacaacucuaucgcuauccccaccaacuucaccaucagcgugaccaccgagauccugccuguguccaugaccaagaccagcguggacugcaccauguacaucugcggcgauuccaccgagugcuccaaccugcugcugcaguacggcagcuucugcacccagcugaauagagcccugacagggaucgccguggaacaggacaagaacacccaagagguguucgcccaagugaagcaaaucuacaagaccccuccuaucaaggacuucggcggcuucaauuucagccagauucugcccgauccuagcaagcccagcaagcggagcuucaucgaggaccugcuguucaacaaagugacacuggccgacgccggcuucaucaagcaguauggcgauugucugggcgacauugccgccagggaucugauuugcgcccagaaguuuaacggacugacagugcugccuccucugcugaccgaugagaugaucgcccaguacacaucugcccugcuggccggcacaaucacaagcggcuggacauuuggagcuggcgccgcucugcagauccccuuugcuaugcagauggccuaccgguucaacggcugcggagugacccagaaugugcuguacgagaaccagaagcugaucgccaaccaguucaacagcgccaucggcaagauccaggacagccugagcagcacagcaagcgcccugggaaagcugcaggacguggucaaccagaaugcccaggcacugaacacccuggucaagcagcuguccuccaacuucggcgccaucagcucugugcugaacgauauccugagcagacuggacaaggucgaggccgaggugcagaucgacagacugaucacaggcagacugcagagccuccagacauacgugacccagcagcugaucagagccgccgagauuagagccucugccaaucuggccgccaccaagaugucugagugugugcugggccagagcaagagaguggacuuuugcggcaagggcugucaccugaugagcuucccucagucugccccucacggcgugguguuucugcacgugacauaugugcccgcucaagagaagaauuucaccaccgcuccagccaucugccacgacggcaaagcccacuuuccuagagaaggcguguucguguccaacggcacccauugguucgugacacagcggaacuucuacgagccccagaucaucaccaccgacaacaccuucgugucuggcaacugcgacguugugaucggcauugugaacaauaccguguacgacccucugcagcccgagcuggacagcggcggaggaucuggcggaggacagaucuacgagggcaagcugacagccgagggccugagauuuggaaucguggccagccgguucaaucacgcccugguggauagacugguggaaggcgccaucgaugccauugucagacacggcggcagagaagaggacaucacccucguuagagugcccggcucuugggagauuccuguggcugcuggcgagcuggcccggaaagaagauaucgacgccguuaucgccaucggcgugcugaucagaggcgccacaccucacuucgacuauaucgccagcgagguguccaaaggccuggccgaucugagccuggaacugagaaagcccaucaccuucggcgugaucaccgcugacacacuggaacaggccauugagagagccggcaccaagcacggcaacaaaggaugggaagccgcucuguccgccaucgagauggccaaccuguucaagagccugcgguga

SEQ ID NO: 12154 - RNA, 3924 nt, Artificial Sequence
  SARS-CoV-2/Wuhan/WIV05/2019__EPI_ISL_402128 spike protein CDS gc mod (1-1147)(Q965C_S1003C) LumSynth construct
auguucguguuucuggugcugcugccccugguguccagccagugugugaaccugaccaccagaacacagcugccuccagccuacaccaacagcuucaccagaggcguguacuaccccgacaagguguucagauccagcgugcugcacucuacccaggaccuguuccugccuuucuucagcaacgugaccugguuccacgccauccacguguccggcaccaauggcaccaagagauucgacaaccccgugcugcccuucaacgacgggguguacuuugccagcaccgagaaguccaacaucaucagaggcuggaucuucggcaccacacuggacagcaagacccagagccugcugaucgugaacaacgccaccaacguggucaucaaagugugcgaguuccaguucugcaacgaccccuuccugggcgucuacuaccacaagaacaacaagagcuggauggaaagcgaguuccggguguacagcagcgccaacaacugcaccuucgaguacgugucccagccuuuccugauggaccuggaaggcaagcagggcaacuucaagaaccugcgcgaguucguguucaagaacaucgacggcuacuucaaaaucuacagcaagcacaccccuaucaaccucgugcgggaucugccucagggcuucucugcucuggaaccccugguggaucugcccaucggcaucaacaucacccgguuucagacacugcuggcccugcacagaagcuaccugacaccuggcgauagcagcagcggauggacagcuggugccgccgcuuacuaugugggcuaccugcagccuagaaccuuccugcugaaguacaacgagaacggcaccaucaccgacgccguggauugugcucuggauccucugagcgagacaaagugcacccugaaguccuucaccguggaaaagggcaucuaccagaccagcaacuuccgggugcagcccaccgaauccaucgugcgguuccccaauaucaccaaucugugccccuucggcgagguguucaaugccaccagauucgccucuguguacgccuggaaccggaagcggaucagcaauugcguggccgacuacuccgugcuguacaacuccgccagcuucagcaccuucaagugcuacggcguguccccuaccaagcugaacgaccugugcuucacaaacguguacgccgacagcuucgugauccggggagaugaagugcggcagauugccccuggacagacaggcaagaucgccgacuacaacuacaagcugcccgacgacuucaccggcugugugauugccuggaacagcaacaaccuggacuccaaagucggcggcaacuacaauuaccuguaccggcuguuccggaaguccaaucugaagcccuucgagcgggacaucagcaccgaaaucuaucaggccggcagcaccccuugcaacggcguggaaggcuucaacugcuacuucccacugcaguccuacggcuuucagcccacaaauggcgugggcuaucagcccuacagagugguggugcugagcuucgaacugcugcaugcuccugccacagugugcggcccuaagaaaagcaccaaucucgugaagaacaaaugcgugaacuucaacuucaacggccugaccggcaccggcgugcugacagagagcaacaagaaguuccugccauuccagcaguuuggccgggauaucgccgauaccacagacgccguuagagauccccagacacuggaaauccuggacaucaccccaugcagcuucggcggagugucugugaucaccccuggcaccaacaccagcaaucagguggcagugcuguaccaggacgugaacuguaccgaagugcccguggccauucacgccgaucagcugacaccuacauggcggguguacuccaccggcagcaauguguuucagaccagagccggcugucugaucggagccgagcacgugaacaauagcuacgagugcgacauccccaucggcgcuggcaucugugccagcuaccagacacagacaaacagccccagacgggcuagaagcguggccagccagagcaucauugccuacacaaugucucugggcgccgagaacagcguggccuacuccaacaacucuaucgcuauccccaccaacuucaccaucagcgugaccaccgagauccugccuguguccaugaccaagaccagcguggacugcaccauguacaucugcggcgauuccaccgagugcuccaaccugcugcugcaguacggcagcuucugcacccagcugaauagagcccugacagggaucgccguggaacaggacaagaacacccaagagguguucgcccaagugaagcaaaucuacaagaccccuccuaucaaggacuucggcggcuucaauuucagccagauucugcccgauccuagcaagcccagcaagcggagcuucaucgaggaccugcuguucaacaaagugacacuggccgacgccggcuucaucaagcaguauggcgauugucugggcgacauugccgccagggaucugauuugcgcccagaaguuuaacggacugacagugcugccuccucugcugaccgaugagaugaucgcccaguacacaucugcccugcuggccggcacaaucacaagcggcuggacauuuggagcuggcgccgcucugcagauccccuuugcuaugcagauggccuaccgguucaacggcaucggagugacccagaaugugcuguacgagaaccagaagcugaucgccaaccaguucaacagcgccaucggcaagauccaggacagccugagcagcacagcaagcgcccugggaaagcugcaggacguggucaaccagaaugcccaggcacugaacacccuggucaagugccuguccuccaacuucggcgccaucagcucugugcugaacgauauccugagcagacuggacaaggucgaggccgaggugcagaucgacagacugaucacaggcagacugcagugucuccagacauacgugacccagcagcugaucagagccgccgagauuagagccucugccaaucuggccgccaccaagaugucugagugugugcugggccagagcaagagaguggacuuuugcggcaagggcuaccaccugaugagcuucccucagucugccccucacggcgugguguuucugcacgugacauaugugcccgcucaagagaagaauuucaccaccgcuccagccaucugccacgacggcaaagcccacuuuccuagagaaggcguguucguguccaacggcacccauugguucgugacacagcggaacuucuacgagccccagaucaucaccaccgacaacaccuucgugucuggcaacugcgacguugugaucggcauugugaacaauaccguguacgacccucugcagcccgagcuggacagcggcggaggaucuggcggaggacagaucuacgagggcaagcugacagccgagggccugagauuuggaaucguggccagccgguucaaucacgcccugguggauagacugguggaaggcgccaucgaugccauugucagacacggcggcagagaagaggacaucacccucguuagagugcccggcucuugggagauuccuguggcugcuggcgagcuggcccggaaagaagauaucgacgccguuaucgccaucggcgugcugaucagaggcgccacaccucacuucgacuauaucgccagcgagguguccaaaggccuggccgaucugagccuggaacugagaaagcccaucaccuucggcgugaucaccgcugacacacuggaacaggccauugagagagccggcaccaagcacggcaacaaaggaugggaagccgcucuguccgccaucgagauggccaaccuguucaagagccugcgguga

SEQ ID NO: 12155 - RNA, 3924 nt, Artificial Sequence
  SARS-CoV-2/Wuhan/WIV05/2019__EPI_ISL_402128 spike protein CDS gc mod (1-1147)(F970C_G999C) LumSynth construct
auguucguguuucuggugcugcugccccugguguccagccagugugugaaccugaccaccagaacacagcugccuccagccuacaccaacagcuucaccagaggcguguacuaccccgacaagguguucagauccagcgugcugcacucuacccaggaccuguuccugccuuucuucagcaacgugaccugguuccacgccauccacguguccggcaccaauggcaccaagagauucgacaaccccgugcugcccuucaacgacgggguguacuuugccagcaccgagaaguccaacaucaucagaggcuggaucuucggcaccacacuggacagcaagacccagagccugcugaucgugaacaacgccaccaacguggucaucaaagugugcgaguuccaguucugcaacgaccccuuccugggcgucuacuaccacaagaacaacaagagcuggauggaaagcgaguuccggguguacagcagcgccaacaacugcaccuucgaguacgugucccagccuuuccugauggaccuggaaggcaagcagggcaacuucaagaaccugcgcgaguucguguucaagaacaucgacggcuacuucaaaaucuacagcaagcacaccccuaucaaccucgugcgggaucugccucagggcuucucugcucuggaaccccugguggaucugcccaucggcaucaacaucacccgguuucagacacugcuggcccugcacagaagcuaccugacaccuggcgauagcagcagcggauggacagcuggugccgccgcuuacuaugugggcuaccugcagccuagaaccuuccugcugaaguacaacgagaacggcaccaucaccgacgccguggauugugcucuggauccucugagcgagacaaagugcacccugaaguccuucaccguggaaaagggcaucuaccagaccagcaacuuccgggugcagcccaccgaauccaucgugcgguuccccaauaucaccaaucugugccccuucggcgagguguucaaugccaccagauucgccucuguguacgccuggaaccggaagcggaucagcaauugcguggccgacuacuccgugcuguacaacuccgccagcuucagcaccuucaagugcuacggcguguccccuaccaagcugaacgaccugugcuucacaaacguguacgccgacagcuucgugauccggggagaugaagugcggcagauugccccuggacagacaggcaagaucgccgacuacaacuacaagcugcccgacgacuucaccggcugugugauugccuggaacagcaacaaccuggacuccaaagucggcggcaacuacaauuaccuguaccggcuguuccggaaguccaaucugaagcccuucgagcgggacaucagcaccgaaaucuaucaggccggcagcaccccuugcaacggcguggaaggcuucaacugcuacuucccacugcaguccuacggcuuucagcccacaaauggcgugggcuaucagcccuacagagugguggugcugagcuucgaacugcugcaugcuccugccacagugugcggcccuaagaaaagcaccaaucucgugaagaacaaaugcgugaacuucaacuucaacggccugaccggcaccggcgugcugacagagagcaacaagaaguuccugccauuccagcaguuuggccgggauaucgccgauaccacagacgccguuagagauccccagacacuggaaauccuggacaucaccccaugcagcuucggcggagugucugugaucaccccuggcaccaacaccagcaaucagguggcagugcuguaccaggacgugaacuguaccgaagugcccguggccauucacgccgaucagcugacaccuacauggcggguguacuccaccggcagcaauguguuucagaccagagccggcugucugaucggagccgagcacgugaacaauagcuacgagugcgacauccccaucggcgcuggcaucugugccagcuaccagacacagacaaacagccccagacgggcuagaagcguggccagccagagcaucauugccuacacaaugucucugggcgccgagaacagcguggccuacuccaacaacucuaucgcuauccccaccaacuucaccaucagcgugaccaccgagauccugccuguguccaugaccaagaccagcguggacugcaccauguacaucugcggcgauuccaccgagugcuccaaccugcugcugcaguacggcagcuucugcacccagcugaauagagcccugacagggaucgccguggaacaggacaagaacacccaagagguguucgcccaagugaagcaaaucuacaagaccccuccuaucaaggacuucggcggcuucaauuucagccagauucugcccgauccuagcaagcccagcaagcggagcuucaucgaggaccugcuguucaacaaagugacacuggccgacgccggcuucaucaagcaguauggcgauugucugggcgacauugccgccagggaucugauuugcgcccagaaguuuaacggacugacagugcugccuccucugcugaccgaugagaugaucgcccaguacacaucugcccugcuggccggcacaaucacaagcggcuggacauuuggagcuggcgccgcucugcagauccccuuugcuaugcagauggccuaccgguucaacggcaucggagugacccagaaugugcuguacgagaaccagaagcugaucgccaaccaguucaacagcgccaucggcaagauccaggacagccugagcagcacagcaagcgcccugggaaagcugcaggacguggucaaccagaaugcccaggcacugaacacccuggucaagcagcuguccuccaacugcggcgccaucagcucugugcugaacgauauccugagcagacuggacaaggucgaggccgaggugcagaucgacagacugaucacauguagacugcagagccuccagacauacgugacccagcagcugaucagagccgccgagauuagagccucugccaaucuggccgccaccaagaugucugagugugugcugggccagagcaagagaguggacuuuugcggcaagggcuaccaccugaugagcuucccucagucugccccucacggcgugguguuucugcacgugacauaugugcccgcucaagagaagaauuucaccaccgcuccagccaucugccacgacggcaaagcccacuuuccuagagaaggcguguucguguccaacggcacccauugguucgugacacagcggaacuucuacgagccccagaucaucaccaccgacaacaccuucgugucuggcaacugcgacguugugaucggcauugugaacaauaccguguacgacccucugcagcccgagcuggacagcggcggaggaucuggcggaggacagaucuacgagggcaagcugacagccgagggccugagauuuggaaucguggccagccgguucaaucacgcccugguggauagacugguggaaggcgccaucgaugccauugucagacacggcggcagagaagaggacaucacccucguuagagugcccggcucuugggagauuccuguggcugcuggcgagcuggcccggaaagaagauaucgacgccguuaucgccaucggcgugcugaucagaggcgccacaccucacuucgacuauaucgccagcgagguguccaaaggccuggccgaucugagccuggaacugagaaagcccaucaccuucggcgugaucaccgcugacacacuggaacaggccauugagagagccggcaccaagcacggcaacaaaggaugggaagccgcucuguccgccaucgagauggccaaccuguucaagagccugcgguga

SEQ ID NO: 12156 - RNA, 3924 nt, Artificial Sequence
  SARS-CoV-2/Wuhan/WIV05/2019__EPI_ISL_402128 spike protein CDS gc mod (1-1147)(A972C_R995C) LumSynth construct
auguucguguuucuggugcugcugccccugguguccagccagugugugaaccugaccaccagaacacagcugccuccagccuacaccaacagcuucaccagaggcguguacuaccccgacaagguguucagauccagcgugcugcacucuacccaggaccuguuccugccuuucuucagcaacgugaccugguuccacgccauccacguguccggcaccaauggcaccaagagauucgacaaccccgugcugcccuucaacgacgggguguacuuugccagcaccgagaaguccaacaucaucagaggcuggaucuucggcaccacacuggacagcaagacccagagccugcugaucgugaacaacgccaccaacguggucaucaaagugugcgaguuccaguucugcaacgaccccuuccugggcgucuacuaccacaagaacaacaagagcuggauggaaagcgaguuccggguguacagcagcgccaacaacugcaccuucgaguacgugucccagccuuuccugauggaccuggaaggcaagcagggcaacuucaagaaccugcgcgaguucguguucaagaacaucgacggcuacuucaaaaucuacagcaagcacaccccuaucaaccucgugcgggaucugccucagggcuucucugcucuggaaccccugguggaucugcccaucggcaucaacaucacccgguuucagacacugcuggcccugcacagaagcuaccugacaccuggcgauagcagcagcggauggacagcuggugccgccgcuuacuaugugggcuaccugcagccuagaaccuuccugcugaaguacaacgagaacggcaccaucaccgacgccguggauugugcucuggauccucugagcgagacaaagugcacccugaaguccuucaccguggaaaagggcaucuaccagaccagcaacuuccgggugcagcccaccgaauccaucgugcgguuccccaauaucaccaaucugugccccuucggcgagguguucaaugccaccagauucgccucuguguacgccuggaaccggaagcggaucagcaauugcguggccgacuacuccgugcuguacaacuccgccagcuucagcaccuucaagugcuacggcguguccccuaccaagcugaacgaccugugcuucacaaacguguacgccgacagcuucgugauccggggagaugaagugcggcagauugccccuggacagacaggcaagaucgccgacuacaacuacaagcugcccgacgacuucaccggcugugugauugccuggaacagcaacaaccuggacuccaaagucggcggcaacuacaauuaccuguaccggcuguuccggaaguccaaucugaagcccuucgagcgggacaucagcaccgaaaucuaucaggccggcagcaccccuugcaacggcguggaaggcuucaacugcuacuucccacugcaguccuacggcuuucagcccacaaauggcgugggcuaucagcccuacagagugguggugcugagcuucgaacugcugcaugcuccugccacagugugcggcccuaagaaaagcaccaaucucgugaagaacaaaugcgugaacuucaacuucaacggccugaccggcaccggcgugcugacagagagcaacaagaaguuccugccauuccagcaguuuggccgggauaucgccgauaccacagacgccguuagagauccccagacacuggaaauccuggacaucaccccaugcagcuucggcggagugucugugaucaccccuggcaccaacaccagcaaucagguggcagugcuguaccaggacgugaacuguaccgaagugcccguggccauucacgccgaucagcugacaccuacauggcggguguacuccaccggcagcaauguguuucagaccagagccggcugucugaucggagccgagcacgugaacaauagcuacgagugcgacauccccaucggcgcuggcaucugugccagcuaccagacacagacaaacagccccagacgggcuagaagcguggccagccagagcaucauugccuacacaaugucucugggcgccgagaacagcguggccuacuccaacaacucuaucgcuauccccaccaacuucaccaucagcgugaccaccgagauccugccuguguccaugaccaagaccagcguggacugcaccauguacaucugcggcgauuccaccgagugcuccaaccugcugcugcaguacggcagcuucugcacccagcugaauagagcccugacagggaucgccguggaacaggacaagaacacccaagagguguucgcccaagugaagcaaaucuacaagaccccuccuaucaaggacuucggcggcuucaauuucagccagauucugcccgauccuagcaagcccagcaagcggagcuucaucgaggaccugcuguucaacaaagugacacuggccgacgccggcuucaucaagcaguauggcgauugucugggcgacauugccgccagggaucugauuugcgcccagaaguuuaacggacugacagugcugccuccucugcugaccgaugagaugaucgcccaguacacaucugcccugcuggccggcacaaucacaagcggcuggacauuuggagcuggcgccgcucugcagauccccuuugcuaugcagauggccuaccgguucaacggcaucggagugacccagaaugugcuguacgagaaccagaagcugaucgccaaccaguucaacagcgccaucggcaagauccaggacagccugagcagcacagcaagcgcccugggaaagcugcaggacguggucaaccagaaugcccaggcacugaacacccuggucaagcagcuguccuccaacuucggcugcaucagcucugugcugaacgauauccugagcagacuggacaaggucgaggccgaggugcagaucgacugucugaucacaggcagacugcagagccuccagacauacgugacccagcagcugaucagagccgccgagauuagagccucugccaaucuggccgccaccaagaugucugagugugugcugggccagagcaagagaguggacuuuugcggcaagggcuaccaccugaugagcuucccucagucugccccucacggcgugguguuucugcacgugacauaugugcccgcucaagagaagaauuucaccaccgcuccagccaucugccacgacggcaaagcccacuuuccuagagaaggcguguucguguccaacggcacccauugguucgugacacagcggaacuucuacgagccccagaucaucaccaccgacaacaccuucgugucuggcaacugcgacguugugaucggcauugugaacaauaccguguacgacccucugcagcccgagcuggacagcggcggaggaucuggcggaggacagaucuacgagggcaagcugacagccgagggccugagauuuggaaucguggccagccgguucaaucacgcccugguggauagacugguggaaggcgccaucgaugccauugucagacacggcggcagagaagaggacaucacccucguuagagugcccggcucuugggagauuccuguggcugcuggcgagcuggcccggaaagaagauaucgacgccguuaucgccaucggcgugcugaucagaggcgccacaccucacuucgacuauaucgccagcgagguguccaaaggccuggccgaucugagccuggaacugagaaagcccaucaccuucggcgugaucaccgcugacacacuggaacaggccauugagagagccggcaccaagcacggcaacaaaggaugggaagccgcucuguccgccaucgagauggccaaccuguucaagagccugcgguga

SEQ ID NO: 12157 - RNA, 3924 nt, Artificial Sequence
  SARS-CoV-2/Wuhan/WIV05/2019__EPI_ISL_402128 spike protein CDS gc mod (1-1147)(A890C_V1040C) LumSynth construct
auguucguguuucuggugcugcugccccugguguccagccagugugugaaccugaccaccagaacacagcugccuccagccuacaccaacagcuucaccagaggcguguacuaccccgacaagguguucagauccagcgugcugcacucuacccaggaccuguuccugccuuucuucagcaacgugaccugguuccacgccauccacguguccggcaccaauggcaccaagagauucgacaaccccgugcugcccuucaacgacgggguguacuuugccagcaccgagaaguccaacaucaucagaggcuggaucuucggcaccacacuggacagcaagacccagagccugcugaucgugaacaacgccaccaacguggucaucaaagugugcgaguuccaguucugcaacgaccccuuccugggcgucuacuaccacaagaacaacaagagcuggauggaaagcgaguuccggguguacagcagcgccaacaacugcaccuucgaguacgugucccagccuuuccugauggaccuggaaggcaagcagggcaacuucaagaaccugcgcgaguucguguucaagaacaucgacggcuacuucaaaaucuacagcaagcacaccccuaucaaccucgugcgggaucugccucagggcuucucugcucuggaaccccugguggaucugcccaucggcaucaacaucacccgguuucagacacugcuggcccugcacagaagcuaccugacaccuggcgauagcagcagcggauggacagcuggugccgccgcuuacuaugugggcuaccugcagccuagaaccuuccugcugaaguacaacgagaacggcaccaucaccgacgccguggauugugcucuggauccucugagcgagacaaagugcacccugaaguccuucaccguggaaaagggcaucuaccagaccagcaacuuccgggugcagcccaccgaauccaucgugcgguuccccaauaucaccaaucugugccccuucggcgagguguucaaugccaccagauucgccucuguguacgccuggaaccggaagcggaucagcaauugcguggccgacuacuccgugcuguacaacuccgccagcuucagcaccuucaagugcuacggcguguccccuaccaagcugaacgaccugugcuucacaaacguguacgccgacagcuucgugauccggggagaugaagugcggcagauugccccuggacagacaggcaagaucgccgacuacaacuacaagcugcccgacgacuucaccggcugugugauugccuggaacagcaacaaccuggacuccaaagucggcggcaacuacaauuaccuguaccggcuguuccggaaguccaaucugaagcccuucgagcgggacaucagcaccgaaaucuaucaggccggcagcaccccuugcaacggcguggaaggcuucaacugcuacuucccacugcaguccuacggcuuucagcccacaaauggcgugggcuaucagcccuacagagugguggugcugagcuucgaacugcugcaugcuccugccacagugugcggcccuaagaaaagcaccaaucucgugaagaacaaaugcgugaacuucaacuucaacggccugaccggcaccggcgugcugacagagagcaacaagaaguuccugccauuccagcaguuuggccgggauaucgccgauaccacagacgccguuagagauccccagacacuggaaauccuggacaucaccccaugcagcuucggcggagugucugugaucaccccuggcaccaacaccagcaaucagguggcagugcuguaccaggacgugaacuguaccgaagugcccguggccauucacgccgaucagcugacaccuacauggcggguguacuccaccggcagcaauguguuucagaccagagccggcugucugaucggagccgagcacgugaacaauagcuacgagugcgacauccccaucggcgcuggcaucugugccagcuaccagacacagacaaacagccccagacgggcuagaagcguggccagccagagcaucauugccuacacaaugucucugggcgccgagaacagcguggccuacuccaacaacucuaucgcuauccccaccaacuucaccaucagcgugaccaccgagauccugccuguguccaugaccaagaccagcguggacugcaccauguacaucugcggcgauuccaccgagugcuccaaccugcugcugcaguacggcagcuucugcacccagcugaauagagcccugacagggaucgccguggaacaggacaagaacacccaagagguguucgcccaagugaagcaaaucuacaagaccccuccuaucaaggacuucggcggcuucaauuucagccagauucugcccgauccuagcaagcccagcaagcggagcuucaucgaggaccugcuguucaacaaagugacacuggccgacgccggcuucaucaagcaguauggcgauugucugggcgacauugccgccagggaucugauuugcgcccagaaguuuaacggacugacagugcugccuccucugcugaccgaugagaugaucgcccaguacacaucugcccugcuggccggcacaaucacaagcggcuggacauuuggaugcggcgccgcucugcagauccccuuugcuaugcagauggccuaccgguucaacggcaucggagugacccagaaugugcuguacgagaaccagaagcugaucgccaaccaguucaacagcgccaucggcaagauccaggacagccugagcagcacagcaagcgcccugggaaagcugcaggacguggucaaccagaaugcccaggcacugaacacccuggucaagcagcuguccuccaacuucggcgccaucagcucugugcugaacgauauccugagcagacuggacaaggucgaggccgaggugcagaucgacagacugaucacaggcagacugcagagccuccagacauacgugacccagcagcugaucagagccgccgagauuagagccucugccaaucuggccgccaccaagaugucugagugugugcugggccagagcaagagaugugacuuuugcggcaagggcuaccaccugaugagcuucccucagucugccccucacggcgugguguuucugcacgugacauaugugcccgcucaagagaagaauuucaccaccgcuccagccaucugccacgacggcaaagcccacuuuccuagagaaggcguguucguguccaacggcacccauugguucgugacacagcggaacuucuacgagccccagaucaucaccaccgacaacaccuucgugucuggcaacugcgacguugugaucggcauugugaacaauaccguguacgacccucugcagcccgagcuggacagcggcggaggaucuggcggaggacagaucuacgagggcaagcugacagccgagggccugagauuuggaaucguggccagccgguucaaucacgcccugguggauagacugguggaaggcgccaucgaugccauugucagacacggcggcagagaagaggacaucacccucguuagagugcccggcucuugggagauuccuguggcugcuggcgagcuggcccggaaagaagauaucgacgccguuaucgccaucggcgugcugaucagaggcgccacaccucacuucgacuauaucgccagcgagguguccaaaggccuggccgaucugagccuggaacugagaaagcccaucaccuucggcgugaucaccgcugacacacuggaacaggccauugagagagccggcaccaagcacggcaacaaaggaugggaagccgcucuguccgccaucgagauggccaaccuguucaagagccugcgguga

SEQ ID NO: 12158 - RNA, 3924 nt, Artificial Sequence
  SARS-CoV-2/Wuhan/WIV05/2019__EPI_ISL_402128 spike protein CDS gc mod (1-1147)(T874C_S1055C) LumSynth construct
auguucguguuucuggugcugcugccccugguguccagccagugugugaaccugaccaccagaacacagcugccuccagccuacaccaacagcuucaccagaggcguguacuaccccgacaagguguucagauccagcgugcugcacucuacccaggaccuguuccugccuuucuucagcaacgugaccugguuccacgccauccacguguccggcaccaauggcaccaagagauucgacaaccccgugcugcccuucaacgacgggguguacuuugccagcaccgagaaguccaacaucaucagaggcuggaucuucggcaccacacuggacagcaagacccagagccugcugaucgugaacaacgccaccaacguggucaucaaagugugcgaguuccaguucugcaacgaccccuuccugggcgucuacuaccacaagaacaacaagagcuggauggaaagcgaguuccggguguacagcagcgccaacaacugcaccuucgaguacgugucccagccuuuccugauggaccuggaaggcaagcagggcaacuucaagaaccugcgcgaguucguguucaagaacaucgacggcuacuucaaaaucuacagcaagcacaccccuaucaaccucgugcgggaucugccucagggcuucucugcucuggaaccccugguggaucugcccaucggcaucaacaucacccgguuucagacacugcuggcccugcacagaagcuaccugacaccuggcgauagcagcagcggauggacagcuggugccgccgcuuacuaugugggcuaccugcagccuagaaccuuccugcugaaguacaacgagaacggcaccaucaccgacgccguggauugugcucuggauccucugagcgagacaaagugcacccugaaguccuucaccguggaaaagggcaucuaccagaccagcaacuuccgggugcagcccaccgaauccaucgugcgguuccccaauaucaccaaucugugccccuucggcgagguguucaaugccaccagauucgccucuguguacgccuggaaccggaagcggaucagcaauugcguggccgacuacuccgugcuguacaacuccgccagcuucagcaccuucaagugcuacggcguguccccuaccaagcugaacgaccugugcuucacaaacguguacgccgacagcuucgugauccggggagaugaagugcggcagauugccccuggacagacaggcaagaucgccgacuacaacuacaagcugcccgacgacuucaccggcugugugauugccuggaacagcaacaaccuggacuccaaagucggcggcaacuacaauuaccuguaccggcuguuccggaaguccaaucugaagcccuucgagcgggacaucagcaccgaaaucuaucaggccggcagcaccccuugcaacggcguggaaggcuucaacugcuacuucccacugcaguccuacggcuuucagcccacaaauggcgugggcuaucagcccuacagagugguggugcugagcuucgaacugcugcaugcuccugccacagugugcggcccuaagaaaagcaccaaucucgugaagaacaaaugcgugaacuucaacuucaacggccugaccggcaccggcgugcugacagagagcaacaagaaguuccugccauuccagcaguuuggccgggauaucgccgauaccacagacgccguuagagauccccagacacuggaaauccuggacaucaccccaugcagcuucggcggagugucugugaucaccccuggcaccaacaccagcaaucagguggcagugcuguaccaggacgugaacuguaccgaagugcccguggccauucacgccgaucagcugacaccuacauggcggguguacuccaccggcagcaauguguuucagaccagagccggcugucugaucggagccgagcacgugaacaauagcuacgagugcgacauccccaucggcgcuggcaucugugccagcuaccagacacagacaaacagccccagacgggcuagaagcguggccagccagagcaucauugccuacacaaugucucugggcgccgagaacagcguggccuacuccaacaacucuaucgcuauccccaccaacuucaccaucagcgugaccaccgagauccugccuguguccaugaccaagaccagcguggacugcaccauguacaucugcggcgauuccaccgagugcuccaaccugcugcugcaguacggcagcuucugcacccagcugaauagagcccugacagggaucgccguggaacaggacaagaacacccaagagguguucgcccaagugaagcaaaucuacaagaccccuccuaucaaggacuucggcggcuucaauuucagccagauucugcccgauccuagcaagcccagcaagcggagcuucaucgaggaccugcuguucaacaaagugacacuggccgacgccggcuucaucaagcaguauggcgauugucugggcgacauugccgccagggaucugauuugcgcccagaaguuuaacggacugacagugcugccuccucugcugaccgaugagaugaucgcccaguacugcucugcccugcuggccggcacaaucacaagcggcuggacauuuggagcuggcgccgcucugcagauccccuuugcuaugcagauggccuaccgguucaacggcaucggagugacccagaaugugcuguacgagaaccagaagcugaucgccaaccaguucaacagcgccaucggcaagauccaggacagccugagcagcacagcaagcgcccugggaaagcugcaggacguggucaaccagaaugcccaggcacugaacacccuggucaagcagcuguccuccaacuucggcgccaucagcucugugcugaacgauauccugagcagacuggacaaggucgaggccgaggugcagaucgacagacugaucacaggcagacugcagagccuccagacauacgugacccagcagcugaucagagccgccgagauuagagccucugccaaucuggccgccaccaagaugucugagugugugcugggccagagcaagagaguggacuuuugcggcaagggcuaccaccugaugagcuucccucagugcgccccucacggcgugguguuucugcacgugacauaugugcccgcucaagagaagaauuucaccaccgcuccagccaucugccacgacggcaaagcccacuuuccuagagaaggcguguucguguccaacggcacccauugguucgugacacagcggaacuucuacgagccccagaucaucaccaccgacaacaccuucgugucuggcaacugcgacguugugaucggcauugugaacaauaccguguacgacccucugcagcccgagcuggacagcggcggaggaucuggcggaggacagaucuacgagggcaagcugacagccgagggccugagauuuggaaucguggccagccgguucaaucacgcccugguggauagacugguggaaggcgccaucgaugccauugucagacacggcggcagagaagaggacaucacccucguuagagugcccggcucuugggagauuccuguggcugcuggcgagcuggcccggaaagaagauaucgacgccguuaucgccaucggcgugcugaucagaggcgccacaccucacuucgacuauaucgccagcgagguguccaaaggccuggccgaucugagccuggaacugagaaagcccaucaccuucggcgugaucaccgcugacacacuggaacaggccauugagagagccggcaccaagcacggcaacaaaggaugggaagccgcucuguccgccaucgagauggccaaccuguucaagagccugcgguga

SEQ ID NO: 12159 - RNA, 3948 nt, Artificial Sequence
  SARS-CoV-2/Wuhan/WIV05/2019__EPI_ISL_402128 spike protein CDS gc mod (1-1147) Ferritin construct
auguucguguuucuggugcugcugccccugguguccagccagugugugaaccugaccaccagaacacagcugccuccagccuacaccaacagcuucaccagaggcguguacuaccccgacaagguguucagauccagcgugcugcacucuacccaggaccuguuccugccuuucuucagcaacgugaccugguuccacgccauccacguguccggcaccaauggcaccaagagauucgacaaccccgugcugcccuucaacgacgggguguacuuugccagcaccgagaaguccaacaucaucagaggcuggaucuucggcaccacacuggacagcaagacccagagccugcugaucgugaacaacgccaccaacguggucaucaaagugugcgaguuccaguucugcaacgaccccuuccugggcgucuacuaccacaagaacaacaagagcuggauggaaagcgaguuccggguguacagcagcgccaacaacugcaccuucgaguacgugucccagccuuuccugauggaccuggaaggcaagcagggcaacuucaagaaccugcgcgaguucguguucaagaacaucgacggcuacuucaaaaucuacagcaagcacaccccuaucaaccucgugcgggaucugccucagggcuucucugcucuggaaccccugguggaucugcccaucggcaucaacaucacccgguuucagacacugcuggcccugcacagaagcuaccugacaccuggcgauagcagcagcggauggacagcuggugccgccgcuuacuaugugggcuaccugcagccuagaaccuuccugcugaaguacaacgagaacggcaccaucaccgacgccguggauugugcucuggauccucugagcgagacaaagugcacccugaaguccuucaccguggaaaagggcaucuaccagaccagcaacuuccgggugcagcccaccgaauccaucgugcgguuccccaauaucaccaaucugugccccuucggcgagguguucaaugccaccagauucgccucuguguacgccuggaaccggaagcggaucagcaauugcguggccgacuacuccgugcuguacaacuccgccagcuucagcaccuucaagugcuacggcguguccccuaccaagcugaacgaccugugcuucacaaacguguacgccgacagcuucgugauccggggagaugaagugcggcagauugccccuggacagacaggcaagaucgccgacuacaacuacaagcugcccgacgacuucaccggcugugugauugccuggaacagcaacaaccuggacuccaaagucggcggcaacuacaauuaccuguaccggcuguuccggaaguccaaucugaagcccuucgagcgggacaucagcaccgaaaucuaucaggccggcagcaccccuugcaacggcguggaaggcuucaacugcuacuucccacugcaguccuacggcuuucagcccacaaauggcgugggcuaucagcccuacagagugguggugcugagcuucgaacugcugcaugcuccugccacagugugcggcccuaagaaaagcaccaaucucgugaagaacaaaugcgugaacuucaacuucaacggccugaccggcaccggcgugcugacagagagcaacaagaaguuccugccauuccagcaguuuggccgggauaucgccgauaccacagacgccguuagagauccccagacacuggaaauccuggacaucaccccaugcagcuucggcggagugucugugaucaccccuggcaccaacaccagcaaucagguggcagugcuguaccaggacgugaacuguaccgaagugcccguggccauucacgccgaucagcugacaccuacauggcggguguacuccaccggcagcaauguguuucagaccagagccggcugucugaucggagccgagcacgugaacaauagcuacgagugcgacauccccaucggcgcuggcaucugugccagcuaccagacacagacaaacagccccagacgggcuagaagcguggccagccagagcaucauugccuacacaaugucucugggcgccgagaacagcguggccuacuccaacaacucuaucgcuauccccaccaacuucaccaucagcgugaccaccgagauccugccuguguccaugaccaagaccagcguggacugcaccauguacaucugcggcgauuccaccgagugcuccaaccugcugcugcaguacggcagcuucugcacccagcugaauagagcccugacagggaucgccguggaacaggacaagaacacccaagagguguucgcccaagugaagcaaaucuacaagaccccuccuaucaaggacuucggcggcuucaauuucagccagauucugcccgauccuagcaagcccagcaagcggagcuucaucgaggaccugcuguucaacaaagugacacuggccgacgccggcuucaucaagcaguauggcgauugucugggcgacauugccgccagggaucugauuugcgcccagaaguuuaacggacugacagugcugccuccucugcugaccgaugagaugaucgcccaguacacaucugcccugcuggccggcacaaucacaagcggcuggacauuuggagcuggcgccgcucugcagauccccuuugcuaugcagauggccuaccgguucaacggcaucggagugacccagaaugugcuguacgagaaccagaagcugaucgccaaccaguucaacagcgccaucggcaagauccaggacagccugagcagcacagcaagcgcccugggaaagcugcaggacguggucaaccagaaugcccaggcacugaacacccuggucaagcagcuguccuccaacuucggcgccaucagcucugugcugaacgauauccugagcagacuggacaaggucgaggccgaggugcagaucgacagacugaucacaggcagacugcagagccuccagacauacgugacccagcagcugaucagagccgccgagauuagagccucugccaaucuggccgccaccaagaugucugagugugugcugggccagagcaagagaguggacuuuugcggcaagggcuaccaccugaugagcuucccucagucugccccucacggcgugguguuucugcacgugacauaugugcccgcucaagagaagaauuucaccaccgcuccagccaucugccacgacggcaaagcccacuuuccuagagaaggcguguucguguccaacggcacccauugguucgugacacagcggaacuucuacgagccccagaucaucaccaccgacaacaccuucgugucuggcaacugcgacguugugaucggcauugugaacaauaccguguacgacccucugcagcccgagcuggacagcggaggcggaggaucugacaucaucaagcugcugaacgagcaagugaacaaagagaugcagagcagcaaccuguacaugagcaugagcagcuggugcuacacccacagccuugauggcgccggacuguuccuguuugaucacgccgccgaggaauacgagcacgccaagaagcugaucaucuuccugaacgagaacaacgugcccgugcagcugaccagcauuucugccccugagcacaaguucgagggccugacacagaucuuccagaaggccuacgaacacgagcagcacaucagcgagagcaucaacaacaucguggaccacgccauuaagagcaaggaucacgccaccuucaacuuucugcagugguacguggccgaacagcacgaggaagaggugcuguucaaggacauccuggacaagaucgagcugaucggcaacgagaaccacggccuguaucuggccgaccaguacgugaagggaaucgccaagagcagaaagagcuga

SEQ ID NO: 12160 - RNA, 3948 nt, Artificial Sequence
  SARS-CoV-2/Wuhan/WIV05/2019__EPI_ISL_402128 spike protein CDS gc mod (1-1147)(K986P_V987P) Ferritin construct
auguucguguuucuggugcugcugccccugguguccagccagugugugaaccugaccaccagaacacagcugccuccagccuacaccaacagcuucaccagaggcguguacuaccccgacaagguguucagauccagcgugcugcacucuacccaggaccuguuccugccuuucuucagcaacgugaccugguuccacgccauccacguguccggcaccaauggcaccaagagauucgacaaccccgugcugcccuucaacgacgggguguacuuugccagcaccgagaaguccaacaucaucagaggcuggaucuucggcaccacacuggacagcaagacccagagccugcugaucgugaacaacgccaccaacguggucaucaaagugugcgaguuccaguucugcaacgaccccuuccugggcgucuacuaccacaagaacaacaagagcuggauggaaagcgaguuccggguguacagcagcgccaacaacugcaccuucgaguacgugucccagccuuuccugauggaccuggaaggcaagcagggcaacuucaagaaccugcgcgaguucguguucaagaacaucgacggcuacuucaaaaucuacagcaagcacaccccuaucaaccucgugcgggaucugccucagggcuucucugcucuggaaccccugguggaucugcccaucggcaucaacaucacccgguuucagacacugcuggcccugcacagaagcuaccugacaccuggcgauagcagcagcggauggacagcuggugccgccgcuuacuaugugggcuaccugcagccuagaaccuuccugcugaaguacaacgagaacggcaccaucaccgacgccguggauugugcucuggauccucugagcgagacaaagugcacccugaaguccuucaccguggaaaagggcaucuaccagaccagcaacuuccgggugcagcccaccgaauccaucgugcgguuccccaauaucaccaaucugugccccuucggcgagguguucaaugccaccagauucgccucuguguacgccuggaaccggaagcggaucagcaauugcguggccgacuacuccgugcuguacaacuccgccagcuucagcaccuucaagugcuacggcguguccccuaccaagcugaacgaccugugcuucacaaacguguacgccgacagcuucgugauccggggagaugaagugcggcagauugccccuggacagacaggcaagaucgccgacuacaacuacaagcugcccgacgacuucaccggcugugugauugccuggaacagcaacaaccuggacuccaaagucggcggcaacuacaauuaccuguaccggcuguuccggaaguccaaucugaagcccuucgagcgggacaucagcaccgaaaucuaucaggccggcagcaccccuugcaacggcguggaaggcuucaacugcuacuucccacugcaguccuacggcuuucagcccacaaauggcgugggcuaucagcccuacagagugguggugcugagcuucgaacugcugcaugcuccugccacagugugcggcccuaagaaaagcaccaaucucgugaagaacaaaugcgugaacuucaacuucaacggccugaccggcaccggcgugcugacagagagcaacaagaaguuccugccauuccagcaguuuggccgggauaucgccgauaccacagacgccguuagagauccccagacacuggaaauccuggacaucaccccaugcagcuucggcggagugucugugaucaccccuggcaccaacaccagcaaucagguggcagugcuguaccaggacgugaacuguaccgaagugcccguggccauucacgccgaucagcugacaccuacauggcggguguacuccaccggcagcaauguguuucagaccagagccggcugucugaucggagccgagcacgugaacaauagcuacgagugcgacauccccaucggcgcuggcaucugugccagcuaccagacacagacaaacagccccagacgggcuagaagcguggccagccagagcaucauugccuacacaaugucucugggcgccgagaacagcguggccuacuccaacaacucuaucgcuauccccaccaacuucaccaucagcgugaccaccgagauccugccuguguccaugaccaagaccagcguggacugcaccauguacaucugcggcgauuccaccgagugcuccaaccugcugcugcaguacggcagcuucugcacccagcugaauagagcccugacagggaucgccguggaacaggacaagaacacccaagagguguucgcccaagugaagcaaaucuacaagaccccuccuaucaaggacuucggcggcuucaauuucagccagauucugcccgauccuagcaagcccagcaagcggagcuucaucgaggaccugcuguucaacaaagugacacuggccgacgccggcuucaucaagcaguauggcgauugucugggcgacauugccgccagggaucugauuugcgcccagaaguuuaacggacugacagugcugccuccucugcugaccgaugagaugaucgcccaguacacaucugcccugcuggccggcacaaucacaagcggcuggacauuuggagcuggcgccgcucugcagauccccuuugcuaugcagauggccuaccgguucaacggcaucggagugacccagaaugugcuguacgagaaccagaagcugaucgccaaccaguucaacagcgccaucggcaagauccaggacagccugagcagcacagcaagcgcccugggaaagcugcaggacguggucaaccagaaugcccaggcacugaacacccuggucaagcagcuguccuccaacuucggcgccaucagcucugugcugaacgauauccugagcagacuggacccuccugaggccgaggugcagaucgacagacugaucacaggcagacugcagagccuccagacauacgugacccagcagcugaucagagccgccgagauuagagccucugccaaucuggccgccaccaagaugucugagugugugcugggccagagcaagagaguggacuuuugcggcaagggcuaccaccugaugagcuucccucagucugccccucacggcgugguguuucugcacgugacauaugugcccgcucaagagaagaauuucaccaccgcuccagccaucugccacgacggcaaagcccacuuuccuagagaaggcguguucguguccaacggcacccauugguucgugacacagcggaacuucuacgagccccagaucaucaccaccgacaacaccuucgugucuggcaacugcgacguugugaucggcauugugaacaauaccguguacgacccucugcagcccgagcuggacagcggaggcggaggaucugacaucaucaagcugcugaacgagcaagugaacaaagagaugcagagcagcaaccuguacaugagcaugagcagcuggugcuacacccacagccuugauggcgccggacuguuccuguuugaucacgccgccgaggaauacgagcacgccaagaagcugaucaucuuccugaacgagaacaacgugcccgugcagcugaccagcauuucugccccugagcacaaguucgagggccugacacagaucuuccagaaggccuacgaacacgagcagcacaucagcgagagcaucaacaacaucguggaccacgccauuaagagcaaggaucacgccaccuucaacuuucugcagugguacguggccgaacagcacgaggaagaggugcuguucaaggacauccuggacaagaucgagcugaucggcaacgagaaccacggccuguaucuggccgaccaguacgugaagggaaucgccaagagcagaaagagcuga

SEQ ID NO: 12161 - RNA, 3948 nt, Artificial Sequence
  SARS-CoV-2/Wuhan/WIV05/2019__EPI_ISL_402128 spike protein CDS gc mod (1-1147)(K986P_V987P_T887WN_A1020W) Ferritin construct
auguucguguuucuggugcugcugccccugguguccagccagugugugaaccugaccaccagaacacagcugccuccagccuacaccaacagcuucaccagaggcguguacuaccccgacaagguguucagauccagcgugcugcacucuacccaggaccuguuccugccuuucuucagcaacgugaccugguuccacgccauccacguguccggcaccaauggcaccaagagauucgacaaccccgugcugcccuucaacgacgggguguacuuugccagcaccgagaaguccaacaucaucagaggcuggaucuucggcaccacacuggacagcaagacccagagccugcugaucgugaacaacgccaccaacguggucaucaaagugugcgaguuccaguucugcaacgaccccuuccugggcgucuacuaccacaagaacaacaagagcuggauggaaagcgaguuccggguguacagcagcgccaacaacugcaccuucgaguacgugucccagccuuuccugauggaccuggaaggcaagcagggcaacuucaagaaccugcgcgaguucguguucaagaacaucgacggcuacuucaaaaucuacagcaagcacaccccuaucaaccucgugcgggaucugccucagggcuucucugcucuggaaccccugguggaucugcccaucggcaucaacaucacccgguuucagacacugcuggcccugcacagaagcuaccugacaccuggcgauagcagcagcggauggacagcuggugccgccgcuuacuaugugggcuaccugcagccuagaaccuuccugcugaaguacaacgagaacggcaccaucaccgacgccguggauugugcucuggauccucugagcgagacaaagugcacccugaaguccuucaccguggaaaagggcaucuaccagaccagcaacuuccgggugcagcccaccgaauccaucgugcgguuccccaauaucaccaaucugugccccuucggcgagguguucaaugccaccagauucgccucuguguacgccuggaaccggaagcggaucagcaauugcguggccgacuacuccgugcuguacaacuccgccagcuucagcaccuucaagugcuacggcguguccccuaccaagcugaacgaccugugcuucacaaacguguacgccgacagcuucgugauccggggagaugaagugcggcagauugccccuggacagacaggcaagaucgccgacuacaacuacaagcugcccgacgacuucaccggcugugugauugccuggaacagcaacaaccuggacuccaaagucggcggcaacuacaauuaccuguaccggcuguuccggaaguccaaucugaagcccuucgagcgggacaucagcaccgaaaucuaucaggccggcagcaccccuugcaacggcguggaaggcuucaacugcuacuucccacugcaguccuacggcuuucagcccacaaauggcgugggcuaucagcccuacagagugguggugcugagcuucgaacugcugcaugcuccugccacagugugcggcccuaagaaaagcaccaaucucgugaagaacaaaugcgugaacuucaacuucaacggccugaccggcaccggcgugcugacagagagcaacaagaaguuccugccauuccagcaguuuggccgggauaucgccgauaccacagacgccguuagagauccccagacacuggaaauccuggacaucaccccaugcagcuucggcggagugucugugaucaccccuggcaccaacaccagcaaucagguggcagugcuguaccaggacgugaacuguaccgaagugcccguggccauucacgccgaucagcugacaccuacauggcggguguacuccaccggcagcaauguguuucagaccagagccggcugucugaucggagccgagcacgugaacaauagcuacgagugcgacauccccaucggcgcuggcaucugugccagcuaccagacacagacaaacagccccagacgggcuagaagcguggccagccagagcaucauugccuacacaaugucucugggcgccgagaacagcguggccuacuccaacaacucuaucgcuauccccaccaacuucaccaucagcgugaccaccgagauccugccuguguccaugaccaagaccagcguggacugcaccauguacaucugcggcgauuccaccgagugcuccaaccugcugcugcaguacggcagcuucugcacccagcugaauagagcccugacagggaucgccguggaacaggacaagaacacccaagagguguucgcccaagugaagcaaaucuacaagaccccuccuaucaaggacuucggcggcuucaauuucagccagauucugcccgauccuagcaagcccagcaagcggagcuucaucgaggaccugcuguucaacaaagugacacuggccgacgccggcuucaucaagcaguauggcgauugucugggcgacauugccgccagggaucugauuugcgcccagaaguuuaacggacugacagugcugccuccucugcugaccgaugagaugaucgcccaguacacaucugcccugcuggccggcacaaucacaagcggcuggugguuuggagcuggcgccgcucugcagauccccuuugcuaugcagauggccuaccgguucaacggcaucggagugacccagaaugugcuguacgagaaccagaagcugaucgccaaccaguucaacagcgccaucggcaagauccaggacagccugagcagcacagcaagcgcccugggaaagcugcaggacguggucaaccagaaugcccaggcacugaacacccuggucaagcagcuguccuccaacuucggcgccaucagcucugugcugaacgauauccugagcagacuggacccuccugaggccgaggugcagaucgacagacugaucacaggcagacugcagagccuccagacauacgugacccagcagcugaucagagccgccgagauuagauggucugccaaucuggccgccaccaagaugucugagugugugcugggccagagcaagagaguggacuuuugcggcaagggcuaccaccugaugagcuucccucagucugccccucacggcgugguguuucugcacgugacauaugugcccgcucaagagaagaauuucaccaccgcuccagccaucugccacgacggcaaagcccacuuuccuagagaaggcguguucguguccaacggcacccauugguucgugacacagcggaacuucuacgagccccagaucaucaccaccgacaacaccuucgugucuggcaacugcgacguugugaucggcauugugaacaauaccguguacgacccucugcagcccgagcuggacagcggaggcggaggaucugacaucaucaagcugcugaacgagcaagugaacaaagagaugcagagcagcaaccuguacaugagcaugagcagcuggugcuacacccacagccuugauggcgccggacuguuccuguuugaucacgccgccgaggaauacgagcacgccaagaagcugaucaucuuccugaacgagaacaacgugcccgugcagcugaccagcauuucugccccugagcacaaguucgagggccugacacagaucuuccagaaggccuacgaacacgagcagcacaucagcgagagcaucaacaacaucguggaccacgccauuaagagcaaggaucacgccaccuucaacuuucugcagugguacguggccgaacagcacgaggaagaggugcuguucaaggacauccuggacaagaucgagcugaucggcaacgagaaccacggccuguaucuggccgaccaguacgugaagggaaucgccaagagcagaaagagcuga

SEQ ID NO: 12162 - RNA, 3948 nt, Artificial Sequence
  SARS-CoV-2/Wuhan/WIV05/2019__EPI_ISL_402128 spike protein CDS gc mod (1-1147)(K986P_V987P_P1069F) Ferritin construct
auguucguguuucuggugcugcugccccugguguccagccagugugugaaccugaccaccagaacacagcugccuccagccuacaccaacagcuucaccagaggcguguacuaccccgacaagguguucagauccagcgugcugcacucuacccaggaccuguuccugccuuucuucagcaacgugaccugguuccacgccauccacguguccggcaccaauggcaccaagagauucgacaaccccgugcugcccuucaacgacgggguguacuuugccagcaccgagaaguccaacaucaucagaggcuggaucuucggcaccacacuggacagcaagacccagagccugcugaucgugaacaacgccaccaacguggucaucaaagugugcgaguuccaguucugcaacgaccccuuccugggcgucuacuaccacaagaacaacaagagcuggauggaaagcgaguuccggguguacagcagcgccaacaacugcaccuucgaguacgugucccagccuuuccugauggaccuggaaggcaagcagggcaacuucaagaaccugcgcgaguucguguucaagaacaucgacggcuacuucaaaaucuacagcaagcacaccccuaucaaccucgugcgggaucugccucagggcuucucugcucuggaaccccugguggaucugcccaucggcaucaacaucacccgguuucagacacugcuggcccugcacagaagcuaccugacaccuggcgauagcagcagcggauggacagcuggugccgccgcuuacuaugugggcuaccugcagccuagaaccuuccugcugaaguacaacgagaacggcaccaucaccgacgccguggauugugcucuggauccucugagcgagacaaagugcacccugaaguccuucaccguggaaaagggcaucuaccagaccagcaacuuccgggugcagcccaccgaauccaucgugcgguuccccaauaucaccaaucugugccccuucggcgagguguucaaugccaccagauucgccucuguguacgccuggaaccggaagcggaucagcaauugcguggccgacuacuccgugcuguacaacuccgccagcuucagcaccuucaagugcuacggcguguccccuaccaagcugaacgaccugugcuucacaaacguguacgccgacagcuucgugauccggggagaugaagugcggcagauugccccuggacagacaggcaagaucgccgacuacaacuacaagcugcccgacgacuucaccggcugugugauugccuggaacagcaacaaccuggacuccaaagucggcggcaacuacaauuaccuguaccggcuguuccggaaguccaaucugaagcccuucgagcgggacaucagcaccgaaaucuaucaggccggcagcaccccuugcaacggcguggaaggcuucaacugcuacuucccacugcaguccuacggcuuucagcccacaaauggcgugggcuaucagcccuacagagugguggugcugagcuucgaacugcugcaugcuccugccacagugugcggcccuaagaaaagcaccaaucucgugaagaacaaaugcgugaacuucaacuucaacggccugaccggcaccggcgugcugacagagagcaacaagaaguuccugccauuccagcaguuuggccgggauaucgccgauaccacagacgccguuagagauccccagacacuggaaauccuggacaucaccccaugcagcuucggcggagugucugugaucaccccuggcaccaacaccagcaaucagguggcagugcuguaccaggacgugaacuguaccgaagugcccguggccauucacgccgaucagcugacaccuacauggcggguguacuccaccggcagcaauguguuucagaccagagccggcugucugaucggagccgagcacgugaacaauagcuacgagugcgacauccccaucggcgcuggcaucugugccagcuaccagacacagacaaacagccccagacgggcuagaagcguggccagccagagcaucauugccuacacaaugucucugggcgccgagaacagcguggccuacuccaacaacucuaucgcuauccccaccaacuucaccaucagcgugaccaccgagauccugccuguguccaugaccaagaccagcguggacugcaccauguacaucugcggcgauuccaccgagugcuccaaccugcugcugcaguacggcagcuucugcacccagcugaauagagcccugacagggaucgccguggaacaggacaagaacacccaagagguguucgcccaagugaagcaaaucuacaagaccccuccuaucaaggacuucggcggcuucaauuucagccagauucugcccgauccuagcaagcccagcaagcggagcuucaucgaggaccugcuguucaacaaagugacacuggccgacgccggcuucaucaagcaguauggcgauugucugggcgacauugccgccagggaucugauuugcgcccagaaguuuaacggacugacagugcugccuccucugcugaccgaugagaugaucgcccaguacacaucugcccugcuggccggcacaaucacaagcggcuggacauuuggagcuggcgccgcucugcagauccccuuugcuaugcagauggccuaccgguucaacggcaucggagugacccagaaugugcuguacgagaaccagaagcugaucgccaaccaguucaacagcgccaucggcaagauccaggacagccugagcagcacagcaagcgcccugggaaagcugcaggacguggucaaccagaaugcccaggcacugaacacccuggucaagcagcuguccuccaacuucggcgccaucagcucugugcugaacgauauccugagcagacuggacccuccugaggccgaggugcagaucgacagacugaucacaggcagacugcagagccuccagacauacgugacccagcagcugaucagagccgccgagauuagagccucugccaaucuggccgccaccaagaugucugagugugugcugggccagagcaagagaguggacuuuugcggcaagggcuaccaccugaugagcuucccucagucugccccucacggcgugguguuucugcacgugacauauguguucgcucaagagaagaauuucaccaccgcuccagccaucugccacgacggcaaagcccacuuuccuagagaaggcguguucguguccaacggcacccauugguucgugacacagcggaacuucuacgagccccagaucaucaccaccgacaacaccuucgugucuggcaacugcgacguugugaucggcauugugaacaauaccguguacgacccucugcagcccgagcuggacagcggaggcggaggaucugacaucaucaagcugcugaacgagcaagugaacaaagagaugcagagcagcaaccuguacaugagcaugagcagcuggugcuacacccacagccuugauggcgccggacuguuccuguuugaucacgccgccgaggaauacgagcacgccaagaagcugaucaucuuccugaacgagaacaacgugcccgugcagcugaccagcauuucugccccugagcacaaguucgagggccugacacagaucuuccagaaggccuacgaacacgagcagcacaucagcgagagcaucaacaacaucguggaccacgccauuaagagcaaggaucacgccaccuucaacuuucugcagugguacguggccgaacagcacgaggaagaggugcuguucaaggacauccuggacaagaucgagcugaucggcaacgagaaccacggccuguaucuggccgaccaguacgugaagggaaucgccaagagcagaaagagcuga

SEQ ID NO: 12163 - RNA, 3948 nt, Artificial Sequence
  SARS-CoV-2/Wuhan/WIV05/2019__EPI_ISL_402128 spike protein CDS gc mod (1-1147)(K986P_V987P_ H1048Q_H1064N_ H1083N_H1101N) Ferritin construct
auguucguguuucuggugcugcugccccugguguccagccagugugugaaccugaccaccagaacacagcugccuccagccuacaccaacagcuucaccagaggcguguacuaccccgacaagguguucagauccagcgugcugcacucuacccaggaccuguuccugccuuucuucagcaacgugaccugguuccacgccauccacguguccggcaccaauggcaccaagagauucgacaaccccgugcugcccuucaacgacgggguguacuuugccagcaccgagaaguccaacaucaucagaggcuggaucuucggcaccacacuggacagcaagacccagagccugcugaucgugaacaacgccaccaacguggucaucaaagugugcgaguuccaguucugcaacgaccccuuccugggcgucuacuaccacaagaacaacaagagcuggauggaaagcgaguuccggguguacagcagcgccaacaacugcaccuucgaguacgugucccagccuuuccugauggaccuggaaggcaagcagggcaacuucaagaaccugcgcgaguucguguucaagaacaucgacggcuacuucaaaaucuacagcaagcacaccccuaucaaccucgugcgggaucugccucagggcuucucugcucuggaaccccugguggaucugcccaucggcaucaacaucacccgguuucagacacugcuggcccugcacagaagcuaccugacaccuggcgauagcagcagcggauggacagcuggugccgccgcuuacuaugugggcuaccugcagccuagaaccuuccugcugaaguacaacgagaacggcaccaucaccgacgccguggauugugcucuggauccucugagcgagacaaagugcacccugaaguccuucaccguggaaaagggcaucuaccagaccagcaacuuccgggugcagcccaccgaauccaucgugcgguuccccaauaucaccaaucugugccccuucggcgagguguucaaugccaccagauucgccucuguguacgccuggaaccggaagcggaucagcaauugcguggccgacuacuccgugcuguacaacuccgccagcuucagcaccuucaagugcuacggcguguccccuaccaagcugaacgaccugugcuucacaaacguguacgccgacagcuucgugauccggggagaugaagugcggcagauugccccuggacagacaggcaagaucgccgacuacaacuacaagcugcccgacgacuucaccggcugugugauugccuggaacagcaacaaccuggacuccaaagucggcggcaacuacaauuaccuguaccggcuguuccggaaguccaaucugaagcccuucgagcgggacaucagcaccgaaaucuaucaggccggcagcaccccuugcaacggcguggaaggcuucaacugcuacuucccacugcaguccuacggcuuucagcccacaaauggcgugggcuaucagcccuacagagugguggugcugagcuucgaacugcugcaugcuccugccacagugugcggcccuaagaaaagcaccaaucucgugaagaacaaaugcgugaacuucaacuucaacggccugaccggcaccggcgugcugacagagagcaacaagaaguuccugccauuccagcaguuuggccgggauaucgccgauaccacagacgccguuagagauccccagacacuggaaauccuggacaucaccccaugcagcuucggcggagugucugugaucaccccuggcaccaacaccagcaaucagguggcagugcuguaccaggacgugaacuguaccgaagugcccguggccauucacgccgaucagcugacaccuacauggcggguguacuccaccggcagcaauguguuucagaccagagccggcugucugaucggagccgagcacgugaacaauagcuacgagugcgacauccccaucggcgcuggcaucugugccagcuaccagacacagacaaacagccccagacgggcuagaagcguggccagccagagcaucauugccuacacaaugucucugggcgccgagaacagcguggccuacuccaacaacucuaucgcuauccccaccaacuucaccaucagcgugaccaccgagauccugccuguguccaugaccaagaccagcguggacugcaccauguacaucugcggcgauuccaccgagugcuccaaccugcugcugcaguacggcagcuucugcacccagcugaauagagcccugacagggaucgccguggaacaggacaagaacacccaagagguguucgcccaagugaagcaaaucuacaagaccccuccuaucaaggacuucggcggcuucaauuucagccagauucugcccgauccuagcaagcccagcaagcggagcuucaucgaggaccugcuguucaacaaagugacacuggccgacgccggcuucaucaagcaguauggcgauugucugggcgacauugccgccagggaucugauuugcgcccagaaguuuaacggacugacagugcugccuccucugcugaccgaugagaugaucgcccaguacacaucugcccugcuggccggcacaaucacaagcggcuggacauuuggagcuggcgccgcucugcagauccccuuugcuaugcagauggccuaccgguucaacggcaucggagugacccagaaugugcuguacgagaaccagaagcugaucgccaaccaguucaacagcgccaucggcaagauccaggacagccugagcagcacagcaagcgcccugggaaagcugcaggacguggucaaccagaaugcccaggcacugaacacccuggucaagcagcuguccuccaacuucggcgccaucagcucugugcugaacgauauccugagcagacuggacccuccugaggccgaggugcagaucgacagacugaucacaggcagacugcagagccuccagacauacgugacccagcagcugaucagagccgccgagauuagagccucugccaaucuggccgccaccaagaugucugagugugugcugggccagagcaagagaguggacuuuugcggcaagggcuaccagcugaugagcuucccucagucugccccucacggcgugguguuucugaacgugacauaugugcccgcucaagagaagaauuucaccaccgcuccagccaucugcaacgacggcaaagcccacuuuccuagagaaggcguguucguguccaacggcaccaacugguucgugacacagcggaacuucuacgagccccagaucaucaccaccgacaacaccuucgugucuggcaacugcgacguugugaucggcauugugaacaauaccguguacgacccucugcagcccgagcuggacagcggaggcggaggaucugacaucaucaagcugcugaacgagcaagugaacaaagagaugcagagcagcaaccuguacaugagcaugagcagcuggugcuacacccacagccuugauggcgccggacuguuccuguuugaucacgccgccgaggaauacgagcacgccaagaagcugaucaucuuccugaacgagaacaacgugcccgugcagcugaccagcauuucugccccugagcacaaguucgagggccugacacagaucuuccagaaggccuacgaacacgagcagcacaucagcgagagcaucaacaacaucguggaccacgccauuaagagcaaggaucacgccaccuucaacuuucugcagugguacguggccgaacagcacgaggaagaggugcuguucaaggacauccuggacaagaucgagcugaucggcaacgagaaccacggccuguaucuggccgaccaguacgugaagggaaucgccaagagcagaaagagcuga

SEQ ID NO: 12164 - RNA, 3948 nt, Artificial Sequence
  SARS-CoV-2/Wuhan/WIV05/2019__EPI_ISL_402128 spike protein CDS gc mod (1-1147)(I712C_T1077C) Ferritin construct
auguucguguuucuggugcugcugccccugguguccagccagugugugaaccugaccaccagaacacagcugccuccagccuacaccaacagcuucaccagaggcguguacuaccccgacaagguguucagauccagcgugcugcacucuacccaggaccuguuccugccuuucuucagcaacgugaccugguuccacgccauccacguguccggcaccaauggcaccaagagauucgacaaccccgugcugcccuucaacgacgggguguacuuugccagcaccgagaaguccaacaucaucagaggcuggaucuucggcaccacacuggacagcaagacccagagccugcugaucgugaacaacgccaccaacguggucaucaaagugugcgaguuccaguucugcaacgaccccuuccugggcgucuacuaccacaagaacaacaagagcuggauggaaagcgaguuccggguguacagcagcgccaacaacugcaccuucgaguacgugucccagccuuuccugauggaccuggaaggcaagcagggcaacuucaagaaccugcgcgaguucguguucaagaacaucgacggcuacuucaaaaucuacagcaagcacaccccuaucaaccucgugcgggaucugccucagggcuucucugcucuggaaccccugguggaucugcccaucggcaucaacaucacccgguuucagacacugcuggcccugcacagaagcuaccugacaccuggcgauagcagcagcggauggacagcuggugccgccgcuuacuaugugggcuaccugcagccuagaaccuuccugcugaaguacaacgagaacggcaccaucaccgacgccguggauugugcucuggauccucugagcgagacaaagugcacccugaaguccuucaccguggaaaagggcaucuaccagaccagcaacuuccgggugcagcccaccgaauccaucgugcgguuccccaauaucaccaaucugugccccuucggcgagguguucaaugccaccagauucgccucuguguacgccuggaaccggaagcggaucagcaauugcguggccgacuacuccgugcuguacaacuccgccagcuucagcaccuucaagugcuacggcguguccccuaccaagcugaacgaccugugcuucacaaacguguacgccgacagcuucgugauccggggagaugaagugcggcagauugccccuggacagacaggcaagaucgccgacuacaacuacaagcugcccgacgacuucaccggcugugugauugccuggaacagcaacaaccuggacuccaaagucggcggcaacuacaauuaccuguaccggcuguuccggaaguccaaucugaagcccuucgagcgggacaucagcaccgaaaucuaucaggccggcagcaccccuugcaacggcguggaaggcuucaacugcuacuucccacugcaguccuacggcuuucagcccacaaauggcgugggcuaucagcccuacagagugguggugcugagcuucgaacugcugcaugcuccugccacagugugcggcccuaagaaaagcaccaaucucgugaagaacaaaugcgugaacuucaacuucaacggccugaccggcaccggcgugcugacagagagcaacaagaaguuccugccauuccagcaguuuggccgggauaucgccgauaccacagacgccguuagagauccccagacacuggaaauccuggacaucaccccaugcagcuucggcggagugucugugaucaccccuggcaccaacaccagcaaucagguggcagugcuguaccaggacgugaacuguaccgaagugcccguggccauucacgccgaucagcugacaccuacauggcggguguacuccaccggcagcaauguguuucagaccagagccggcugucugaucggagccgagcacgugaacaauagcuacgagugcgacauccccaucggcgcuggcaucugugccagcuaccagacacagacaaacagccccagacgggcuagaagcguggccagccagagcaucauugccuacacaaugucucugggcgccgagaacagcguggccuacuccaacaacucuugcgcuauccccaccaacuucaccaucagcgugaccaccgagauccugccuguguccaugaccaagaccagcguggacugcaccauguacaucugcggcgauuccaccgagugcuccaaccugcugcugcaguacggcagcuucugcacccagcugaauagagcccugacagggaucgccguggaacaggacaagaacacccaagagguguucgcccaagugaagcaaaucuacaagaccccuccuaucaaggacuucggcggcuucaauuucagccagauucugcccgauccuagcaagcccagcaagcggagcuucaucgaggaccugcuguucaacaaagugacacuggccgacgccggcuucaucaagcaguauggcgauugucugggcgacauugccgccagggaucugauuugcgcccagaaguuuaacggacugacagugcugccuccucugcugaccgaugagaugaucgcccaguacacaucugcccugcuggccggcacaaucacaagcggcuggacauuuggagcuggcgccgcucugcagauccccuuugcuaugcagauggccuaccgguucaacggcaucggagugacccagaaugugcuguacgagaaccagaagcugaucgccaaccaguucaacagcgccaucggcaagauccaggacagccugagcagcacagcaagcgcccugggaaagcugcaggacguggucaaccagaaugcccaggcacugaacacccuggucaagcagcuguccuccaacuucggcgccaucagcucugugcugaacgauauccugagcagacuggacaaggucgaggccgaggugcagaucgacagacugaucacaggcagacugcagagccuccagacauacgugacccagcagcugaucagagccgccgagauuagagccucugccaaucuggccgccaccaagaugucugagugugugcugggccagagcaagagaguggacuuuugcggcaagggcuaccaccugaugagcuucccucagucugccccucacggcgugguguuucugcacgugacauaugugcccgcucaagagaagaauuucaccugugcuccagccaucugccacgacggcaaagcccacuuuccuagagaaggcguguucguguccaacggcacccauugguucgugacacagcggaacuucuacgagccccagaucaucaccaccgacaacaccuucgugucuggcaacugcgacguugugaucggcauugugaacaauaccguguacgacccucugcagcccgagcuggacagcggaggcggaggaucugacaucaucaagcugcugaacgagcaagugaacaaagagaugcagagcagcaaccuguacaugagcaugagcagcuggugcuacacccacagccuugauggcgccggacuguuccuguuugaucacgccgccgaggaauacgagcacgccaagaagcugaucaucuuccugaacgagaacaacgugcccgugcagcugaccagcauuucugccccugagcacaaguucgagggccugacacagaucuuccagaaggccuacgaacacgagcagcacaucagcgagagcaucaacaacaucguggaccacgccauuaagagcaaggaucacgccaccuucaacuuucugcagugguacguggccgaacagcacgaggaagaggugcuguucaaggacauccuggacaagaucgagcugaucggcaacgagaaccacggccuguaucuggccgaccaguacgugaagggaaucgccaagagcagaaagagcuga

SEQ ID NO: 12165 - RNA, 3948 nt, Artificial Sequence
  SARS-CoV-2/Wuhan/WIV05/2019__EPI_ISL_402128 spike protein CDS gc mod (1-1147)(I714C_Y1110C) Ferritin construct
auguucguguuucuggugcugcugccccugguguccagccagugugugaaccugaccaccagaacacagcugccuccagccuacaccaacagcuucaccagaggcguguacuaccccgacaagguguucagauccagcgugcugcacucuacccaggaccuguuccugccuuucuucagcaacgugaccugguuccacgccauccacguguccggcaccaauggcaccaagagauucgacaaccccgugcugcccuucaacgacgggguguacuuugccagcaccgagaaguccaacaucaucagaggcuggaucuucggcaccacacuggacagcaagacccagagccugcugaucgugaacaacgccaccaacguggucaucaaagugugcgaguuccaguucugcaacgaccccuuccugggcgucuacuaccacaagaacaacaagagcuggauggaaagcgaguuccggguguacagcagcgccaacaacugcaccuucgaguacgugucccagccuuuccugauggaccuggaaggcaagcagggcaacuucaagaaccugcgcgaguucguguucaagaacaucgacggcuacuucaaaaucuacagcaagcacaccccuaucaaccucgugcgggaucugccucagggcuucucugcucuggaaccccugguggaucugcccaucggcaucaacaucacccgguuucagacacugcuggcccugcacagaagcuaccugacaccuggcgauagcagcagcggauggacagcuggugccgccgcuuacuaugugggcuaccugcagccuagaaccuuccugcugaaguacaacgagaacggcaccaucaccgacgccguggauugugcucuggauccucugagcgagacaaagugcacccugaaguccuucaccguggaaaagggcaucuaccagaccagcaacuuccgggugcagcccaccgaauccaucgugcgguuccccaauaucaccaaucugugccccuucggcgagguguucaaugccaccagauucgccucuguguacgccuggaaccggaagcggaucagcaauugcguggccgacuacuccgugcuguacaacuccgccagcuucagcaccuucaagugcuacggcguguccccuaccaagcugaacgaccugugcuucacaaacguguacgccgacagcuucgugauccggggagaugaagugcggcagauugccccuggacagacaggcaagaucgccgacuacaacuacaagcugcccgacgacuucaccggcugugugauugccuggaacagcaacaaccuggacuccaaagucggcggcaacuacaauuaccuguaccggcuguuccggaaguccaaucugaagcccuucgagcgggacaucagcaccgaaaucuaucaggccggcagcaccccuugcaacggcguggaaggcuucaacugcuacuucccacugcaguccuacggcuuucagcccacaaauggcgugggcuaucagcccuacagagugguggugcugagcuucgaacugcugcaugcuccugccacagugugcggcccuaagaaaagcaccaaucucgugaagaacaaaugcgugaacuucaacuucaacggccugaccggcaccggcgugcugacagagagcaacaagaaguuccugccauuccagcaguuuggccgggauaucgccgauaccacagacgccguuagagauccccagacacuggaaauccuggacaucaccccaugcagcuucggcggagugucugugaucaccccuggcaccaacaccagcaaucagguggcagugcuguaccaggacgugaacuguaccgaagugcccguggccauucacgccgaucagcugacaccuacauggcggguguacuccaccggcagcaauguguuucagaccagagccggcugucugaucggagccgagcacgugaacaauagcuacgagugcgacauccccaucggcgcuggcaucugugccagcuaccagacacagacaaacagccccagacgggcuagaagcguggccagccagagcaucauugccuacacaaugucucugggcgccgagaacagcguggccuacuccaacaacucuaucgcuugccccaccaacuucaccaucagcgugaccaccgagauccugccuguguccaugaccaagaccagcguggacugcaccauguacaucugcggcgauuccaccgagugcuccaaccugcugcugcaguacggcagcuucugcacccagcugaauagagcccugacagggaucgccguggaacaggacaagaacacccaagagguguucgcccaagugaagcaaaucuacaagaccccuccuaucaaggacuucggcggcuucaauuucagccagauucugcccgauccuagcaagcccagcaagcggagcuucaucgaggaccugcuguucaacaaagugacacuggccgacgccggcuucaucaagcaguauggcgauugucugggcgacauugccgccagggaucugauuugcgcccagaaguuuaacggacugacagugcugccuccucugcugaccgaugagaugaucgcccaguacacaucugcccugcuggccggcacaaucacaagcggcuggacauuuggagcuggcgccgcucugcagauccccuuugcuaugcagauggccuaccgguucaacggcaucggagugacccagaaugugcuguacgagaaccagaagcugaucgccaaccaguucaacagcgccaucggcaagauccaggacagccugagcagcacagcaagcgcccugggaaagcugcaggacguggucaaccagaaugcccaggcacugaacacccuggucaagcagcuguccuccaacuucggcgccaucagcucugugcugaacgauauccugagcagacuggacaaggucgaggccgaggugcagaucgacagacugaucacaggcagacugcagagccuccagacauacgugacccagcagcugaucagagccgccgagauuagagccucugccaaucuggccgccaccaagaugucugagugugugcugggccagagcaagagaguggacuuuugcggcaagggcuaccaccugaugagcuucccucagucugccccucacggcgugguguuucugcacgugacauaugugcccgcucaagagaagaauuucaccaccgcuccagccaucugccacgacggcaaagcccacuuuccuagagaaggcguguucguguccaacggcacccauugguucgugacacagcggaacuucugugagccccagaucaucaccaccgacaacaccuucgugucuggcaacugcgacguugugaucggcauugugaacaauaccguguacgacccucugcagcccgagcuggacagcggaggcggaggaucugacaucaucaagcugcugaacgagcaagugaacaaagagaugcagagcagcaaccuguacaugagcaugagcagcuggugcuacacccacagccuugauggcgccggacuguuccuguuugaucacgccgccgaggaauacgagcacgccaagaagcugaucaucuuccugaacgagaacaacgugcccgugcagcugaccagcauuucugccccugagcacaaguucgagggccugacacagaucuuccagaaggccuacgaacacgagcagcacaucagcgagagcaucaacaacaucguggaccacgccauuaagagcaaggaucacgccaccuucaacuuucugcagugguacguggccgaacagcacgaggaagaggugcuguucaaggacauccuggacaagaucgagcugaucggcaacgagaaccacggccuguaucuggccgaccaguacgugaagggaaucgccaagagcagaaagagcuga

SEQ ID NO: 12166 - RNA, 3948 nt, Artificial Sequence
  SARS-CoV-2/Wuhan/WIV05/2019__EPI_ISL_402128 spike protein CDS gc mod (1-1147)(P715C_P1069C) Ferritin construct
auguucguguuucuggugcugcugccccugguguccagccagugugugaaccugaccaccagaacacagcugccuccagccuacaccaacagcuucaccagaggcguguacuaccccgacaagguguucagauccagcgugcugcacucuacccaggaccuguuccugccuuucuucagcaacgugaccugguuccacgccauccacguguccggcaccaauggcaccaagagauucgacaaccccgugcugcccuucaacgacgggguguacuuugccagcaccgagaaguccaacaucaucagaggcuggaucuucggcaccacacuggacagcaagacccagagccugcugaucgugaacaacgccaccaacguggucaucaaagugugcgaguuccaguucugcaacgaccccuuccugggcgucuacuaccacaagaacaacaagagcuggauggaaagcgaguuccggguguacagcagcgccaacaacugcaccuucgaguacgugucccagccuuuccugauggaccuggaaggcaagcagggcaacuucaagaaccugcgcgaguucguguucaagaacaucgacggcuacuucaaaaucuacagcaagcacaccccuaucaaccucgugcgggaucugccucagggcuucucugcucuggaaccccugguggaucugcccaucggcaucaacaucacccgguuucagacacugcuggcccugcacagaagcuaccugacaccuggcgauagcagcagcggauggacagcuggugccgccgcuuacuaugugggcuaccugcagccuagaaccuuccugcugaaguacaacgagaacggcaccaucaccgacgccguggauugugcucuggauccucugagcgagacaaagugcacccugaaguccuucaccguggaaaagggcaucuaccagaccagcaacuuccgggugcagcccaccgaauccaucgugcgguuccccaauaucaccaaucugugccccuucggcgagguguucaaugccaccagauucgccucuguguacgccuggaaccggaagcggaucagcaauugcguggccgacuacuccgugcuguacaacuccgccagcuucagcaccuucaagugcuacggcguguccccuaccaagcugaacgaccugugcuucacaaacguguacgccgacagcuucgugauccggggagaugaagugcggcagauugccccuggacagacaggcaagaucgccgacuacaacuacaagcugcccgacgacuucaccggcugugugauugccuggaacagcaacaaccuggacuccaaagucggcggcaacuacaauuaccuguaccggcuguuccggaaguccaaucugaagcccuucgagcgggacaucagcaccgaaaucuaucaggccggcagcaccccuugcaacggcguggaaggcuucaacugcuacuucccacugcaguccuacggcuuucagcccacaaauggcgugggcuaucagcccuacagagugguggugcugagcuucgaacugcugcaugcuccugccacagugugcggcccuaagaaaagcaccaaucucgugaagaacaaaugcgugaacuucaacuucaacggccugaccggcaccggcgugcugacagagagcaacaagaaguuccugccauuccagcaguuuggccgggauaucgccgauaccacagacgccguuagagauccccagacacuggaaauccuggacaucaccccaugcagcuucggcggagugucugugaucaccccuggcaccaacaccagcaaucagguggcagugcuguaccaggacgugaacuguaccgaagugcccguggccauucacgccgaucagcugacaccuacauggcggguguacuccaccggcagcaauguguuucagaccagagccggcugucugaucggagccgagcacgugaacaauagcuacgagugcgacauccccaucggcgcuggcaucugugccagcuaccagacacagacaaacagccccagacgggcuagaagcguggccagccagagcaucauugccuacacaaugucucugggcgccgagaacagcguggccuacuccaacaacucuaucgcuaucugcaccaacuucaccaucagcgugaccaccgagauccugccuguguccaugaccaagaccagcguggacugcaccauguacaucugcggcgauuccaccgagugcuccaaccugcugcugcaguacggcagcuucugcacccagcugaauagagcccugacagggaucgccguggaacaggacaagaacacccaagagguguucgcccaagugaagcaaaucuacaagaccccuccuaucaaggacuucggcggcuucaauuucagccagauucugcccgauccuagcaagcccagcaagcggagcuucaucgaggaccugcuguucaacaaagugacacuggccgacgccggcuucaucaagcaguauggcgauugucugggcgacauugccgccagggaucugauuugcgcccagaaguuuaacggacugacagugcugccuccucugcugaccgaugagaugaucgcccaguacacaucugcccugcuggccggcacaaucacaagcggcuggacauuuggagcuggcgccgcucugcagauccccuuugcuaugcagauggccuaccgguucaacggcaucggagugacccagaaugugcuguacgagaaccagaagcugaucgccaaccaguucaacagcgccaucggcaagauccaggacagccugagcagcacagcaagcgcccugggaaagcugcaggacguggucaaccagaaugcccaggcacugaacacccuggucaagcagcuguccuccaacuucggcgccaucagcucugugcugaacgauauccugagcagacuggacaaggucgaggccgaggugcagaucgacagacugaucacaggcagacugcagagccuccagacauacgugacccagcagcugaucagagccgccgagauuagagccucugccaaucuggccgccaccaagaugucugagugugugcugggccagagcaagagaguggacuuuugcggcaagggcuaccaccugaugagcuucccucagucugccccucacggcgugguguuucugcacgugacauaugugugugcucaagagaagaauuucaccaccgcuccagccaucugccacgacggcaaagcccacuuuccuagagaaggcguguucguguccaacggcacccauugguucgugacacagcggaacuucuacgagccccagaucaucaccaccgacaacaccuucgugucuggcaacugcgacguugugaucggcauugugaacaauaccguguacgacccucugcagcccgagcuggacagcggaggcggaggaucugacaucaucaagcugcugaacgagcaagugaacaaagagaugcagagcagcaaccuguacaugagcaugagcagcuggugcuacacccacagccuugauggcgccggacuguuccuguuugaucacgccgccgaggaauacgagcacgccaagaagcugaucaucuuccugaacgagaacaacgugcccgugcagcugaccagcauuucugccccugagcacaaguucgagggccugacacagaucuuccagaaggccuacgaacacgagcagcacaucagcgagagcaucaacaacaucguggaccacgccauuaagagcaaggaucacgccaccuucaacuuucugcagugguacguggccgaacagcacgaggaagaggugcuguucaaggacauccuggacaagaucgagcugaucggcaacgagaaccacggccuguaucuggccgaccaguacgugaagggaaucgccaagagcagaaagagcuga

SEQ ID NO: 12167 - RNA, 3948 nt, Artificial Sequence
  SARS-CoV-2/Wuhan/WIV05/2019__EPI_ISL_402128 spike protein CDS gc mod (1-1147)(G889C_L1034C) Ferritin construct
auguucguguuucuggugcugcugccccugguguccagccagugugugaaccugaccaccagaacacagcugccuccagccuacaccaacagcuucaccagaggcguguacuaccccgacaagguguucagauccagcgugcugcacucuacccaggaccuguuccugccuuucuucagcaacgugaccugguuccacgccauccacguguccggcaccaauggcaccaagagauucgacaaccccgugcugcccuucaacgacgggguguacuuugccagcaccgagaaguccaacaucaucagaggcuggaucuucggcaccacacuggacagcaagacccagagccugcugaucgugaacaacgccaccaacguggucaucaaagugugcgaguuccaguucugcaacgaccccuuccugggcgucuacuaccacaagaacaacaagagcuggauggaaagcgaguuccggguguacagcagcgccaacaacugcaccuucgaguacgugucccagccuuuccugauggaccuggaaggcaagcagggcaacuucaagaaccugcgcgaguucguguucaagaacaucgacggcuacuucaaaaucuacagcaagcacaccccuaucaaccucgugcgggaucugccucagggcuucucugcucuggaaccccugguggaucugcccaucggcaucaacaucacccgguuucagacacugcuggcccugcacagaagcuaccugacaccuggcgauagcagcagcggauggacagcuggugccgccgcuuacuaugugggcuaccugcagccuagaaccuuccugcugaaguacaacgagaacggcaccaucaccgacgccguggauugugcucuggauccucugagcgagacaaagugcacccugaaguccuucaccguggaaaagggcaucuaccagaccagcaacuuccgggugcagcccaccgaauccaucgugcgguuccccaauaucaccaaucugugccccuucggcgagguguucaaugccaccagauucgccucuguguacgccuggaaccggaagcggaucagcaauugcguggccgacuacuccgugcuguacaacuccgccagcuucagcaccuucaagugcuacggcguguccccuaccaagcugaacgaccugugcuucacaaacguguacgccgacagcuucgugauccggggagaugaagugcggcagauugccccuggacagacaggcaagaucgccgacuacaacuacaagcugcccgacgacuucaccggcugugugauugccuggaacagcaacaaccuggacuccaaagucggcggcaacuacaauuaccuguaccggcuguuccggaaguccaaucugaagcccuucgagcgggacaucagcaccgaaaucuaucaggccggcagcaccccuugcaacggcguggaaggcuucaacugcuacuucccacugcaguccuacggcuuucagcccacaaauggcgugggcuaucagcccuacagagugguggugcugagcuucgaacugcugcaugcuccugccacagugugcggcccuaagaaaagcaccaaucucgugaagaacaaaugcgugaacuucaacuucaacggccugaccggcaccggcgugcugacagagagcaacaagaaguuccugccauuccagcaguuuggccgggauaucgccgauaccacagacgccguuagagauccccagacacuggaaauccuggacaucaccccaugcagcuucggcggagugucugugaucaccccuggcaccaacaccagcaaucagguggcagugcuguaccaggacgugaacuguaccgaagugcccguggccauucacgccgaucagcugacaccuacauggcggguguacuccaccggcagcaauguguuucagaccagagccggcugucugaucggagccgagcacgugaacaauagcuacgagugcgacauccccaucggcgcuggcaucugugccagcuaccagacacagacaaacagccccagacgggcuagaagcguggccagccagagcaucauugccuacacaaugucucugggcgccgagaacagcguggccuacuccaacaacucuaucgcuauccccaccaacuucaccaucagcgugaccaccgagauccugccuguguccaugaccaagaccagcguggacugcaccauguacaucugcggcgauuccaccgagugcuccaaccugcugcugcaguacggcagcuucugcacccagcugaauagagcccugacagggaucgccguggaacaggacaagaacacccaagagguguucgcccaagugaagcaaaucuacaagaccccuccuaucaaggacuucggcggcuucaauuucagccagauucugcccgauccuagcaagcccagcaagcggagcuucaucgaggaccugcuguucaacaaagugacacuggccgacgccggcuucaucaagcaguauggcgauugucugggcgacauugccgccagggaucugauuugcgcccagaaguuuaacggacugacagugcugccuccucugcugaccgaugagaugaucgcccaguacacaucugcccugcuggccggcacaaucacaagcggcuggacauuuugcgcuggcgccgcucugcagauccccuuugcuaugcagauggccuaccgguucaacggcaucggagugacccagaaugugcuguacgagaaccagaagcugaucgccaaccaguucaacagcgccaucggcaagauccaggacagccugagcagcacagcaagcgcccugggaaagcugcaggacguggucaaccagaaugcccaggcacugaacacccuggucaagcagcuguccuccaacuucggcgccaucagcucugugcugaacgauauccugagcagacuggacaaggucgaggccgaggugcagaucgacagacugaucacaggcagacugcagagccuccagacauacgugacccagcagcugaucagagccgccgagauuagagccucugccaaucuggccgccaccaagaugucugaguguguguguggccagagcaagagaguggacuuuugcggcaagggcuaccaccugaugagcuucccucagucugccccucacggcgugguguuucugcacgugacauaugugcccgcucaagagaagaauuucaccaccgcuccagccaucugccacgacggcaaagcccacuuuccuagagaaggcguguucguguccaacggcacccauugguucgugacacagcggaacuucuacgagccccagaucaucaccaccgacaacaccuucgugucuggcaacugcgacguugugaucggcauugugaacaauaccguguacgacccucugcagcccgagcuggacagcggaggcggaggaucugacaucaucaagcugcugaacgagcaagugaacaaagagaugcagagcagcaaccuguacaugagcaugagcagcuggugcuacacccacagccuugauggcgccggacuguuccuguuugaucacgccgccgaggaauacgagcacgccaagaagcugaucaucuuccugaacgagaacaacgugcccgugcagcugaccagcauuucugccccugagcacaaguucgagggccugacacagaucuuccagaaggccuacgaacacgagcagcacaucagcgagagcaucaacaacaucguggaccacgccauuaagagcaaggaucacgccaccuucaacuuucugcagugguacguggccgaacagcacgaggaagaggugcuguucaaggacauccuggacaagaucgagcugaucggcaacgagaaccacggccuguaucuggccgaccaguacgugaagggaaucgccaagagcagaaagagcuga

SEQ ID NO: 12168 - RNA, 3948 nt, Artificial Sequence
  SARS-CoV-2/Wuhan/WIV05/2019__EPI_ISL_402128 spike protein CDS gc mod (1-1147)(I909C_Y1047C) Ferritin construct
auguucguguuucuggugcugcugccccugguguccagccagugugugaaccugaccaccagaacacagcugccuccagccuacaccaacagcuucaccagaggcguguacuaccccgacaagguguucagauccagcgugcugcacucuacccaggaccuguuccugccuuucuucagcaacgugaccugguuccacgccauccacguguccggcaccaauggcaccaagagauucgacaaccccgugcugcccuucaacgacgggguguacuuugccagcaccgagaaguccaacaucaucagaggcuggaucuucggcaccacacuggacagcaagacccagagccugcugaucgugaacaacgccaccaacguggucaucaaagugugcgaguuccaguucugcaacgaccccuuccugggcgucuacuaccacaagaacaacaagagcuggauggaaagcgaguuccggguguacagcagcgccaacaacugcaccuucgaguacgugucccagccuuuccugauggaccuggaaggcaagcagggcaacuucaagaaccugcgcgaguucguguucaagaacaucgacggcuacuucaaaaucuacagcaagcacaccccuaucaaccucgugcgggaucugccucagggcuucucugcucuggaaccccugguggaucugcccaucggcaucaacaucacccgguuucagacacugcuggcccugcacagaagcuaccugacaccuggcgauagcagcagcggauggacagcuggugccgccgcuuacuaugugggcuaccugcagccuagaaccuuccugcugaaguacaacgagaacggcaccaucaccgacgccguggauugugcucuggauccucugagcgagacaaagugcacccugaaguccuucaccguggaaaagggcaucuaccagaccagcaacuuccgggugcagcccaccgaauccaucgugcgguuccccaauaucaccaaucugugccccuucggcgagguguucaaugccaccagauucgccucuguguacgccuggaaccggaagcggaucagcaauugcguggccgacuacuccgugcuguacaacuccgccagcuucagcaccuucaagugcuacggcguguccccuaccaagcugaacgaccugugcuucacaaacguguacgccgacagcuucgugauccggggagaugaagugcggcagauugccccuggacagacaggcaagaucgccgacuacaacuacaagcugcccgacgacuucaccggcugugugauugccuggaacagcaacaaccuggacuccaaagucggcggcaacuacaauuaccuguaccggcuguuccggaaguccaaucugaagcccuucgagcgggacaucagcaccgaaaucuaucaggccggcagcaccccuugcaacggcguggaaggcuucaacugcuacuucccacugcaguccuacggcuuucagcccacaaauggcgugggcuaucagcccuacagagugguggugcugagcuucgaacugcugcaugcuccugccacagugugcggcccuaagaaaagcaccaaucucgugaagaacaaaugcgugaacuucaacuucaacggccugaccggcaccggcgugcugacagagagcaacaagaaguuccugccauuccagcaguuuggccgggauaucgccgauaccacagacgccguuagagauccccagacacuggaaauccuggacaucaccccaugcagcuucggcggagugucugugaucaccccuggcaccaacaccagcaaucagguggcagugcuguaccaggacgugaacuguaccgaagugcccguggccauucacgccgaucagcugacaccuacauggcggguguacuccaccggcagcaauguguuucagaccagagccggcugucugaucggagccgagcacgugaacaauagcuacgagugcgacauccccaucggcgcuggcaucugugccagcuaccagacacagacaaacagccccagacgggcuagaagcguggccagccagagcaucauugccuacacaaugucucugggcgccgagaacagcguggccuacuccaacaacucuaucgcuauccccaccaacuucaccaucagcgugaccaccgagauccugccuguguccaugaccaagaccagcguggacugcaccauguacaucugcggcgauuccaccgagugcuccaaccugcugcugcaguacggcagcuucugcacccagcugaauagagcccugacagggaucgccguggaacaggacaagaacacccaagagguguucgcccaagugaagcaaaucuacaagaccccuccuaucaaggacuucggcggcuucaauuucagccagauucugcccgauccuagcaagcccagcaagcggagcuucaucgaggaccugcuguucaacaaagugacacuggccgacgccggcuucaucaagcaguauggcgauugucugggcgacauugccgccagggaucugauuugcgcccagaaguuuaacggacugacagugcugccuccucugcugaccgaugagaugaucgcccaguacacaucugcccugcuggccggcacaaucacaagcggcuggacauuuggagcuggcgccgcucugcagauccccuuugcuaugcagauggccuaccgguucaacggcugcggagugacccagaaugugcuguacgagaaccagaagcugaucgccaaccaguucaacagcgccaucggcaagauccaggacagccugagcagcacagcaagcgcccugggaaagcugcaggacguggucaaccagaaugcccaggcacugaacacccuggucaagcagcuguccuccaacuucggcgccaucagcucugugcugaacgauauccugagcagacuggacaaggucgaggccgaggugcagaucgacagacugaucacaggcagacugcagagccuccagacauacgugacccagcagcugaucagagccgccgagauuagagccucugccaaucuggccgccaccaagaugucugagugugugcugggccagagcaagagaguggacuuuugcggcaagggcugucaccugaugagcuucccucagucugccccucacggcgugguguuucugcacgugacauaugugcccgcucaagagaagaauuucaccaccgcuccagccaucugccacgacggcaaagcccacuuuccuagagaaggcguguucguguccaacggcacccauugguucgugacacagcggaacuucuacgagccccagaucaucaccaccgacaacaccuucgugucuggcaacugcgacguugugaucggcauugugaacaauaccguguacgacccucugcagcccgagcuggacagcggaggcggaggaucugacaucaucaagcugcugaacgagcaagugaacaaagagaugcagagcagcaaccuguacaugagcaugagcagcuggugcuacacccacagccuugauggcgccggacuguuccuguuugaucacgccgccgaggaauacgagcacgccaagaagcugaucaucuuccugaacgagaacaacgugcccgugcagcugaccagcauuucugccccugagcacaaguucgagggccugacacagaucuuccagaaggccuacgaacacgagcagcacaucagcgagagcaucaacaacaucguggaccacgccauuaagagcaaggaucacgccaccuucaacuuucugcagugguacguggccgaacagcacgaggaagaggugcuguucaaggacauccuggacaagaucgagcugaucggcaacgagaaccacggccuguaucuggccgaccaguacgugaagggaaucgccaagagcagaaagagcuga

SEQ ID NO: 12169 - RNA, 3948 nt, Artificial Sequence
  SARS-CoV-2/Wuhan/WIV05/2019__EPI_ISL_402128 spike protein CDS gc mod (1-1147)(Q965C_S1003C) Ferritin construct
auguucguguuucuggugcugcugccccugguguccagccagugugugaaccugaccaccagaacacagcugccuccagccuacaccaacagcuucaccagaggcguguacuaccccgacaagguguucagauccagcgugcugcacucuacccaggaccuguuccugccuuucuucagcaacgugaccugguuccacgccauccacguguccggcaccaauggcaccaagagauucgacaaccccgugcugcccuucaacgacgggguguacuuugccagcaccgagaaguccaacaucaucagaggcuggaucuucggcaccacacuggacagcaagacccagagccugcugaucgugaacaacgccaccaacguggucaucaaagugugcgaguuccaguucugcaacgaccccuuccugggcgucuacuaccacaagaacaacaagagcuggauggaaagcgaguuccggguguacagcagcgccaacaacugcaccuucgaguacgugucccagccuuuccugauggaccuggaaggcaagcagggcaacuucaagaaccugcgcgaguucguguucaagaacaucgacggcuacuucaaaaucuacagcaagcacaccccuaucaaccucgugcgggaucugccucagggcuucucugcucuggaaccccugguggaucugcccaucggcaucaacaucacccgguuucagacacugcuggcccugcacagaagcuaccugacaccuggcgauagcagcagcggauggacagcuggugccgccgcuuacuaugugggcuaccugcagccuagaaccuuccugcugaaguacaacgagaacggcaccaucaccgacgccguggauugugcucuggauccucugagcgagacaaagugcacccugaaguccuucaccguggaaaagggcaucuaccagaccagcaacuuccgggugcagcccaccgaauccaucgugcgguuccccaauaucaccaaucugugccccuucggcgagguguucaaugccaccagauucgccucuguguacgccuggaaccggaagcggaucagcaauugcguggccgacuacuccgugcuguacaacuccgccagcuucagcaccuucaagugcuacggcguguccccuaccaagcugaacgaccugugcuucacaaacguguacgccgacagcuucgugauccggggagaugaagugcggcagauugccccuggacagacaggcaagaucgccgacuacaacuacaagcugcccgacgacuucaccggcugugugauugccuggaacagcaacaaccuggacuccaaagucggcggcaacuacaauuaccuguaccggcuguuccggaaguccaaucugaagcccuucgagcgggacaucagcaccgaaaucuaucaggccggcagcaccccuugcaacggcguggaaggcuucaacugcuacuucccacugcaguccuacggcuuucagcccacaaauggcgugggcuaucagcccuacagagugguggugcugagcuucgaacugcugcaugcuccugccacagugugcggcccuaagaaaagcaccaaucucgugaagaacaaaugcgugaacuucaacuucaacggccugaccggcaccggcgugcugacagagagcaacaagaaguuccugccauuccagcaguuuggccgggauaucgccgauaccacagacgccguuagagauccccagacacuggaaauccuggacaucaccccaugcagcuucggcggagugucugugaucaccccuggcaccaacaccagcaaucagguggcagugcuguaccaggacgugaacuguaccgaagugcccguggccauucacgccgaucagcugacaccuacauggcggguguacuccaccggcagcaauguguuucagaccagagccggcugucugaucggagccgagcacgugaacaauagcuacgagugcgacauccccaucggcgcuggcaucugugccagcuaccagacacagacaaacagccccagacgggcuagaagcguggccagccagagcaucauugccuacacaaugucucugggcgccgagaacagcguggccuacuccaacaacucuaucgcuauccccaccaacuucaccaucagcgugaccaccgagauccugccuguguccaugaccaagaccagcguggacugcaccauguacaucugcggcgauuccaccgagugcuccaaccugcugcugcaguacggcagcuucugcacccagcugaauagagcccugacagggaucgccguggaacaggacaagaacacccaagagguguucgcccaagugaagcaaaucuacaagaccccuccuaucaaggacuucggcggcuucaauuucagccagauucugcccgauccuagcaagcccagcaagcggagcuucaucgaggaccugcuguucaacaaagugacacuggccgacgccggcuucaucaagcaguauggcgauugucugggcgacauugccgccagggaucugauuugcgcccagaaguuuaacggacugacagugcugccuccucugcugaccgaugagaugaucgcccaguacacaucugcccugcuggccggcacaaucacaagcggcuggacauuuggagcuggcgccgcucugcagauccccuuugcuaugcagauggccuaccgguucaacggcaucggagugacccagaaugugcuguacgagaaccagaagcugaucgccaaccaguucaacagcgccaucggcaagauccaggacagccugagcagcacagcaagcgcccugggaaagcugcaggacguggucaaccagaaugcccaggcacugaacacccuggucaagugccuguccuccaacuucggcgccaucagcucugugcugaacgauauccugagcagacuggacaaggucgaggccgaggugcagaucgacagacugaucacaggcagacugcagugucuccagacauacgugacccagcagcugaucagagccgccgagauuagagccucugccaaucuggccgccaccaagaugucugagugugugcugggccagagcaagagaguggacuuuugcggcaagggcuaccaccugaugagcuucccucagucugccccucacggcgugguguuucugcacgugacauaugugcccgcucaagagaagaauuucaccaccgcuccagccaucugccacgacggcaaagcccacuuuccuagagaaggcguguucguguccaacggcacccauugguucgugacacagcggaacuucuacgagccccagaucaucaccaccgacaacaccuucgugucuggcaacugcgacguugugaucggcauugugaacaauaccguguacgacccucugcagcccgagcuggacagcggaggcggaggaucugacaucaucaagcugcugaacgagcaagugaacaaagagaugcagagcagcaaccuguacaugagcaugagcagcuggugcuacacccacagccuugauggcgccggacuguuccuguuugaucacgccgccgaggaauacgagcacgccaagaagcugaucaucuuccugaacgagaacaacgugcccgugcagcugaccagcauuucugccccugagcacaaguucgagggccugacacagaucuuccagaaggccuacgaacacgagcagcacaucagcgagagcaucaacaacaucguggaccacgccauuaagagcaaggaucacgccaccuucaacuuucugcagugguacguggccgaacagcacgaggaagaggugcuguucaaggacauccuggacaagaucgagcugaucggcaacgagaaccacggccuguaucuggccgaccaguacgugaagggaaucgccaagagcagaaagagcuga

SEQ ID NO: 12170 - RNA, 3948 nt, Artificial Sequence
  SARS-CoV-2/Wuhan/WIV05/2019__EPI_ISL_402128 spike protein CDS gc mod (1-1147)(F970C_G999C) Ferritin construct
auguucguguuucuggugcugcugccccugguguccagccagugugugaaccugaccaccagaacacagcugccuccagccuacaccaacagcuucaccagaggcguguacuaccccgacaagguguucagauccagcgugcugcacucuacccaggaccuguuccugccuuucuucagcaacgugaccugguuccacgccauccacguguccggcaccaauggcaccaagagauucgacaaccccgugcugcccuucaacgacgggguguacuuugccagcaccgagaaguccaacaucaucagaggcuggaucuucggcaccacacuggacagcaagacccagagccugcugaucgugaacaacgccaccaacguggucaucaaagugugcgaguuccaguucugcaacgaccccuuccugggcgucuacuaccacaagaacaacaagagcuggauggaaagcgaguuccggguguacagcagcgccaacaacugcaccuucgaguacgugucccagccuuuccugauggaccuggaaggcaagcagggcaacuucaagaaccugcgcgaguucguguucaagaacaucgacggcuacuucaaaaucuacagcaagcacaccccuaucaaccucgugcgggaucugccucagggcuucucugcucuggaaccccugguggaucugcccaucggcaucaacaucacccgguuucagacacugcuggcccugcacagaagcuaccugacaccuggcgauagcagcagcggauggacagcuggugccgccgcuuacuaugugggcuaccugcagccuagaaccuuccugcugaaguacaacgagaacggcaccaucaccgacgccguggauugugcucuggauccucugagcgagacaaagugcacccugaaguccuucaccguggaaaagggcaucuaccagaccagcaacuuccgggugcagcccaccgaauccaucgugcgguuccccaauaucaccaaucugugccccuucggcgagguguucaaugccaccagauucgccucuguguacgccuggaaccggaagcggaucagcaauugcguggccgacuacuccgugcuguacaacuccgccagcuucagcaccuucaagugcuacggcguguccccuaccaagcugaacgaccugugcuucacaaacguguacgccgacagcuucgugauccggggagaugaagugcggcagauugccccuggacagacaggcaagaucgccgacuacaacuacaagcugcccgacgacuucaccggcugugugauugccuggaacagcaacaaccuggacuccaaagucggcggcaacuacaauuaccuguaccggcuguuccggaaguccaaucugaagcccuucgagcgggacaucagcaccgaaaucuaucaggccggcagcaccccuugcaacggcguggaaggcuucaacugcuacuucccacugcaguccuacggcuuucagcccacaaauggcgugggcuaucagcccuacagagugguggugcugagcuucgaacugcugcaugcuccugccacagugugcggcccuaagaaaagcaccaaucucgugaagaacaaaugcgugaacuucaacuucaacggccugaccggcaccggcgugcugacagagagcaacaagaaguuccugccauuccagcaguuuggccgggauaucgccgauaccacagacgccguuagagauccccagacacuggaaauccuggacaucaccccaugcagcuucggcggagugucugugaucaccccuggcaccaacaccagcaaucagguggcagugcuguaccaggacgugaacuguaccgaagugcccguggccauucacgccgaucagcugacaccuacauggcggguguacuccaccggcagcaauguguuucagaccagagccggcugucugaucggagccgagcacgugaacaauagcuacgagugcgacauccccaucggcgcuggcaucugugccagcuaccagacacagacaaacagccccagacgggcuagaagcguggccagccagagcaucauugccuacacaaugucucugggcgccgagaacagcguggccuacuccaacaacucuaucgcuauccccaccaacuucaccaucagcgugaccaccgagauccugccuguguccaugaccaagaccagcguggacugcaccauguacaucugcggcgauuccaccgagugcuccaaccugcugcugcaguacggcagcuucugcacccagcugaauagagcccugacagggaucgccguggaacaggacaagaacacccaagagguguucgcccaagugaagcaaaucuacaagaccccuccuaucaaggacuucggcggcuucaauuucagccagauucugcccgauccuagcaagcccagcaagcggagcuucaucgaggaccugcuguucaacaaagugacacuggccgacgccggcuucaucaagcaguauggcgauugucugggcgacauugccgccagggaucugauuugcgcccagaaguuuaacggacugacagugcugccuccucugcugaccgaugagaugaucgcccaguacacaucugcccugcuggccggcacaaucacaagcggcuggacauuuggagcuggcgccgcucugcagauccccuuugcuaugcagauggccuaccgguucaacggcaucggagugacccagaaugugcuguacgagaaccagaagcugaucgccaaccaguucaacagcgccaucggcaagauccaggacagccugagcagcacagcaagcgcccugggaaagcugcaggacguggucaaccagaaugcccaggcacugaacacccuggucaagcagcuguccuccaacugcggcgccaucagcucugugcugaacgauauccugagcagacuggacaaggucgaggccgaggugcagaucgacagacugaucacauguagacugcagagccuccagacauacgugacccagcagcugaucagagccgccgagauuagagccucugccaaucuggccgccaccaagaugucugagugugugcugggccagagcaagagaguggacuuuugcggcaagggcuaccaccugaugagcuucccucagucugccccucacggcgugguguuucugcacgugacauaugugcccgcucaagagaagaauuucaccaccgcuccagccaucugccacgacggcaaagcccacuuuccuagagaaggcguguucguguccaacggcacccauugguucgugacacagcggaacuucuacgagccccagaucaucaccaccgacaacaccuucgugucuggcaacugcgacguugugaucggcauugugaacaauaccguguacgacccucugcagcccgagcuggacagcggaggcggaggaucugacaucaucaagcugcugaacgagcaagugaacaaagagaugcagagcagcaaccuguacaugagcaugagcagcuggugcuacacccacagccuugauggcgccggacuguuccuguuugaucacgccgccgaggaauacgagcacgccaagaagcugaucaucuuccugaacgagaacaacgugcccgugcagcugaccagcauuucugccccugagcacaaguucgagggccugacacagaucuuccagaaggccuacgaacacgagcagcacaucagcgagagcaucaacaacaucguggaccacgccauuaagagcaaggaucacgccaccuucaacuuucugcagugguacguggccgaacagcacgaggaagaggugcuguucaaggacauccuggacaagaucgagcugaucggcaacgagaaccacggccuguaucuggccgaccaguacgugaagggaaucgccaagagcagaaagagcuga

SEQ ID NO: 12171 - RNA, 3948 nt, Artificial Sequence
  SARS-CoV-2/Wuhan/WIV05/2019__EPI_ISL_402128 spike protein CDS gc mod (1-1147)(A972C_R995C) Ferritin construct
auguucguguuucuggugcugcugccccugguguccagccagugugugaaccugaccaccagaacacagcugccuccagccuacaccaacagcuucaccagaggcguguacuaccccgacaagguguucagauccagcgugcugcacucuacccaggaccuguuccugccuuucuucagcaacgugaccugguuccacgccauccacguguccggcaccaauggcaccaagagauucgacaaccccgugcugcccuucaacgacgggguguacuuugccagcaccgagaaguccaacaucaucagaggcuggaucuucggcaccacacuggacagcaagacccagagccugcugaucgugaacaacgccaccaacguggucaucaaagugugcgaguuccaguucugcaacgaccccuuccugggcgucuacuaccacaagaacaacaagagcuggauggaaagcgaguuccggguguacagcagcgccaacaacugcaccuucgaguacgugucccagccuuuccugauggaccuggaaggcaagcagggcaacuucaagaaccugcgcgaguucguguucaagaacaucgacggcuacuucaaaaucuacagcaagcacaccccuaucaaccucgugcgggaucugccucagggcuucucugcucuggaaccccugguggaucugcccaucggcaucaacaucacccgguuucagacacugcuggcccugcacagaagcuaccugacaccuggcgauagcagcagcggauggacagcuggugccgccgcuuacuaugugggcuaccugcagccuagaaccuuccugcugaaguacaacgagaacggcaccaucaccgacgccguggauugugcucuggauccucugagcgagacaaagugcacccugaaguccuucaccguggaaaagggcaucuaccagaccagcaacuuccgggugcagcccaccgaauccaucgugcgguuccccaauaucaccaaucugugccccuucggcgagguguucaaugccaccagauucgccucuguguacgccuggaaccggaagcggaucagcaauugcguggccgacuacuccgugcuguacaacuccgccagcuucagcaccuucaagugcuacggcguguccccuaccaagcugaacgaccugugcuucacaaacguguacgccgacagcuucgugauccggggagaugaagugcggcagauugccccuggacagacaggcaagaucgccgacuacaacuacaagcugcccgacgacuucaccggcugugugauugccuggaacagcaacaaccuggacuccaaagucggcggcaacuacaauuaccuguaccggcuguuccggaaguccaaucugaagcccuucgagcgggacaucagcaccgaaaucuaucaggccggcagcaccccuugcaacggcguggaaggcuucaacugcuacuucccacugcaguccuacggcuuucagcccacaaauggcgugggcuaucagcccuacagagugguggugcugagcuucgaacugcugcaugcuccugccacagugugcggcccuaagaaaagcaccaaucucgugaagaacaaaugcgugaacuucaacuucaacggccugaccggcaccggcgugcugacagagagcaacaagaaguuccugccauuccagcaguuuggccgggauaucgccgauaccacagacgccguuagagauccccagacacuggaaauccuggacaucaccccaugcagcuucggcggagugucugugaucaccccuggcaccaacaccagcaaucagguggcagugcuguaccaggacgugaacuguaccgaagugcccguggccauucacgccgaucagcugacaccuacauggcggguguacuccaccggcagcaauguguuucagaccagagccggcugucugaucggagccgagcacgugaacaauagcuacgagugcgacauccccaucggcgcuggcaucugugccagcuaccagacacagacaaacagccccagacgggcuagaagcguggccagccagagcaucauugccuacacaaugucucugggcgccgagaacagcguggccuacuccaacaacucuaucgcuauccccaccaacuucaccaucagcgugaccaccgagauccugccuguguccaugaccaagaccagcguggacugcaccauguacaucugcggcgauuccaccgagugcuccaaccugcugcugcaguacggcagcuucugcacccagcugaauagagcccugacagggaucgccguggaacaggacaagaacacccaagagguguucgcccaagugaagcaaaucuacaagaccccuccuaucaaggacuucggcggcuucaauuucagccagauucugcccgauccuagcaagcccagcaagcggagcuucaucgaggaccugcuguucaacaaagugacacuggccgacgccggcuucaucaagcaguauggcgauugucugggcgacauugccgccagggaucugauuugcgcccagaaguuuaacggacugacagugcugccuccucugcugaccgaugagaugaucgcccaguacacaucugcccugcuggccggcacaaucacaagcggcuggacauuuggagcuggcgccgcucugcagauccccuuugcuaugcagauggccuaccgguucaacggcaucggagugacccagaaugugcuguacgagaaccagaagcugaucgccaaccaguucaacagcgccaucggcaagauccaggacagccugagcagcacagcaagcgcccugggaaagcugcaggacguggucaaccagaaugcccaggcacugaacacccuggucaagcagcuguccuccaacuucggcugcaucagcucugugcugaacgauauccugagcagacuggacaaggucgaggccgaggugcagaucgacugucugaucacaggcagacugcagagccuccagacauacgugacccagcagcugaucagagccgccgagauuagagccucugccaaucuggccgccaccaagaugucugagugugugcugggccagagcaagagaguggacuuuugcggcaagggcuaccaccugaugagcuucccucagucugccccucacggcgugguguuucugcacgugacauaugugcccgcucaagagaagaauuucaccaccgcuccagccaucugccacgacggcaaagcccacuuuccuagagaaggcguguucguguccaacggcacccauugguucgugacacagcggaacuucuacgagccccagaucaucaccaccgacaacaccuucgugucuggcaacugcgacguugugaucggcauugugaacaauaccguguacgacccucugcagcccgagcuggacagcggaggcggaggaucugacaucaucaagcugcugaacgagcaagugaacaaagagaugcagagcagcaaccuguacaugagcaugagcagcuggugcuacacccacagccuugauggcgccggacuguuccuguuugaucacgccgccgaggaauacgagcacgccaagaagcugaucaucuuccugaacgagaacaacgugcccgugcagcugaccagcauuucugccccugagcacaaguucgagggccugacacagaucuuccagaaggccuacgaacacgagcagcacaucagcgagagcaucaacaacaucguggaccacgccauuaagagcaaggaucacgccaccuucaacuuucugcagugguacguggccgaacagcacgaggaagaggugcuguucaaggacauccuggacaagaucgagcugaucggcaacgagaaccacggccuguaucuggccgaccaguacgugaagggaaucgccaagagcagaaagagcuga

SEQ ID NO: 12172 - RNA, 3948 nt, Artificial Sequence
  SARS-CoV-2/Wuhan/WIV05/2019__EPI_ISL_402128 spike protein CDS gc mod (1-1147)(A890C_V1040C) Ferritin construct
auguucguguuucuggugcugcugccccugguguccagccagugugugaaccugaccaccagaacacagcugccuccagccuacaccaacagcuucaccagaggcguguacuaccccgacaagguguucagauccagcgugcugcacucuacccaggaccuguuccugccuuucuucagcaacgugaccugguuccacgccauccacguguccggcaccaauggcaccaagagauucgacaaccccgugcugcccuucaacgacgggguguacuuugccagcaccgagaaguccaacaucaucagaggcuggaucuucggcaccacacuggacagcaagacccagagccugcugaucgugaacaacgccaccaacguggucaucaaagugugcgaguuccaguucugcaacgaccccuuccugggcgucuacuaccacaagaacaacaagagcuggauggaaagcgaguuccggguguacagcagcgccaacaacugcaccuucgaguacgugucccagccuuuccugauggaccuggaaggcaagcagggcaacuucaagaaccugcgcgaguucguguucaagaacaucgacggcuacuucaaaaucuacagcaagcacaccccuaucaaccucgugcgggaucugccucagggcuucucugcucuggaaccccugguggaucugcccaucggcaucaacaucacccgguuucagacacugcuggcccugcacagaagcuaccugacaccuggcgauagcagcagcggauggacagcuggugccgccgcuuacuaugugggcuaccugcagccuagaaccuuccugcugaaguacaacgagaacggcaccaucaccgacgccguggauugugcucuggauccucugagcgagacaaagugcacccugaaguccuucaccguggaaaagggcaucuaccagaccagcaacuuccgggugcagcccaccgaauccaucgugcgguuccccaauaucaccaaucugugccccuucggcgagguguucaaugccaccagauucgccucuguguacgccuggaaccggaagcggaucagcaauugcguggccgacuacuccgugcuguacaacuccgccagcuucagcaccuucaagugcuacggcguguccccuaccaagcugaacgaccugugcuucacaaacguguacgccgacagcuucgugauccggggagaugaagugcggcagauugccccuggacagacaggcaagaucgccgacuacaacuacaagcugcccgacgacuucaccggcugugugauugccuggaacagcaacaaccuggacuccaaagucggcggcaacuacaauuaccuguaccggcuguuccggaaguccaaucugaagcccuucgagcgggacaucagcaccgaaaucuaucaggccggcagcaccccuugcaacggcguggaaggcuucaacugcuacuucccacugcaguccuacggcuuucagcccacaaauggcgugggcuaucagcccuacagagugguggugcugagcuucgaacugcugcaugcuccugccacagugugcggcccuaagaaaagcaccaaucucgugaagaacaaaugcgugaacuucaacuucaacggccugaccggcaccggcgugcugacagagagcaacaagaaguuccugccauuccagcaguuuggccgggauaucgccgauaccacagacgccguuagagauccccagacacuggaaauccuggacaucaccccaugcagcuucggcggagugucugugaucaccccuggcaccaacaccagcaaucagguggcagugcuguaccaggacgugaacuguaccgaagugcccguggccauucacgccgaucagcugacaccuacauggcggguguacuccaccggcagcaauguguuucagaccagagccggcugucugaucggagccgagcacgugaacaauagcuacgagugcgacauccccaucggcgcuggcaucugugccagcuaccagacacagacaaacagccccagacgggcuagaagcguggccagccagagcaucauugccuacacaaugucucugggcgccgagaacagcguggccuacuccaacaacucuaucgcuauccccaccaacuucaccaucagcgugaccaccgagauccugccuguguccaugaccaagaccagcguggacugcaccauguacaucugcggcgauuccaccgagugcuccaaccugcugcugcaguacggcagcuucugcacccagcugaauagagcccugacagggaucgccguggaacaggacaagaacacccaagagguguucgcccaagugaagcaaaucuacaagaccccuccuaucaaggacuucggcggcuucaauuucagccagauucugcccgauccuagcaagcccagcaagcggagcuucaucgaggaccugcuguucaacaaagugacacuggccgacgccggcuucaucaagcaguauggcgauugucugggcgacauugccgccagggaucugauuugcgcccagaaguuuaacggacugacagugcugccuccucugcugaccgaugagaugaucgcccaguacacaucugcccugcuggccggcacaaucacaagcggcuggacauuuggaugcggcgccgcucugcagauccccuuugcuaugcagauggccuaccgguucaacggcaucggagugacccagaaugugcuguacgagaaccagaagcugaucgccaaccaguucaacagcgccaucggcaagauccaggacagccugagcagcacagcaagcgcccugggaaagcugcaggacguggucaaccagaaugcccaggcacugaacacccuggucaagcagcuguccuccaacuucggcgccaucagcucugugcugaacgauauccugagcagacuggacaaggucgaggccgaggugcagaucgacagacugaucacaggcagacugcagagccuccagacauacgugacccagcagcugaucagagccgccgagauuagagccucugccaaucuggccgccaccaagaugucugagugugugcugggccagagcaagagaugugacuuuugcggcaagggcuaccaccugaugagcuucccucagucugccccucacggcgugguguuucugcacgugacauaugugcccgcucaagagaagaauuucaccaccgcuccagccaucugccacgacggcaaagcccacuuuccuagagaaggcguguucguguccaacggcacccauugguucgugacacagcggaacuucuacgagccccagaucaucaccaccgacaacaccuucgugucuggcaacugcgacguugugaucggcauugugaacaauaccguguacgacccucugcagcccgagcuggacagcggaggcggaggaucugacaucaucaagcugcugaacgagcaagugaacaaagagaugcagagcagcaaccuguacaugagcaugagcagcuggugcuacacccacagccuugauggcgccggacuguuccuguuugaucacgccgccgaggaauacgagcacgccaagaagcugaucaucuuccugaacgagaacaacgugcccgugcagcugaccagcauuucugccccugagcacaaguucgagggccugacacagaucuuccagaaggccuacgaacacgagcagcacaucagcgagagcaucaacaacaucguggaccacgccauuaagagcaaggaucacgccaccuucaacuuucugcagugguacguggccgaacagcacgaggaagaggugcuguucaaggacauccuggacaagaucgagcugaucggcaacgagaaccacggccuguaucuggccgaccaguacgugaagggaaucgccaagagcagaaagagcuga

SEQ ID NO: 12173 - RNA, 3948 nt, Artificial Sequence
  SARS-CoV-2/Wuhan/WIV05/2019__EPI_ISL_402128 spike protein CDS gc mod (1-1147)(T874C_S1055C) Ferritin construct
auguucguguuucuggugcugcugccccugguguccagccagugugugaaccugaccaccagaacacagcugccuccagccuacaccaacagcuucaccagaggcguguacuaccccgacaagguguucagauccagcgugcugcacucuacccaggaccuguuccugccuuucuucagcaacgugaccugguuccacgccauccacguguccggcaccaauggcaccaagagauucgacaaccccgugcugcccuucaacgacgggguguacuuugccagcaccgagaaguccaacaucaucagaggcuggaucuucggcaccacacuggacagcaagacccagagccugcugaucgugaacaacgccaccaacguggucaucaaagugugcgaguuccaguucugcaacgaccccuuccugggcgucuacuaccacaagaacaacaagagcuggauggaaagcgaguuccggguguacagcagcgccaacaacugcaccuucgaguacgugucccagccuuuccugauggaccuggaaggcaagcagggcaacuucaagaaccugcgcgaguucguguucaagaacaucgacggcuacuucaaaaucuacagcaagcacaccccuaucaaccucgugcgggaucugccucagggcuucucugcucuggaaccccugguggaucugcccaucggcaucaacaucacccgguuucagacacugcuggcccugcacagaagcuaccugacaccuggcgauagcagcagcggauggacagcuggugccgccgcuuacuaugugggcuaccugcagccuagaaccuuccugcugaaguacaacgagaacggcaccaucaccgacgccguggauugugcucuggauccucugagcgagacaaagugcacccugaaguccuucaccguggaaaagggcaucuaccagaccagcaacuuccgggugcagcccaccgaauccaucgugcgguuccccaauaucaccaaucugugccccuucggcgagguguucaaugccaccagauucgccucuguguacgccuggaaccggaagcggaucagcaauugcguggccgacuacuccgugcuguacaacuccgccagcuucagcaccuucaagugcuacggcguguccccuaccaagcugaacgaccugugcuucacaaacguguacgccgacagcuucgugauccggggagaugaagugcggcagauugccccuggacagacaggcaagaucgccgacuacaacuacaagcugcccgacgacuucaccggcugugugauugccuggaacagcaacaaccuggacuccaaagucggcggcaacuacaauuaccuguaccggcuguuccggaaguccaaucugaagcccuucgagcgggacaucagcaccgaaaucuaucaggccggcagcaccccuugcaacggcguggaaggcuucaacugcuacuucccacugcaguccuacggcuuucagcccacaaauggcgugggcuaucagcccuacagagugguggugcugagcuucgaacugcugcaugcuccugccacagugugcggcccuaagaaaagcaccaaucucgugaagaacaaaugcgugaacuucaacuucaacggccugaccggcaccggcgugcugacagagagcaacaagaaguuccugccauuccagcaguuuggccgggauaucgccgauaccacagacgccguuagagauccccagacacuggaaauccuggacaucaccccaugcagcuucggcggagugucugugaucaccccuggcaccaacaccagcaaucagguggcagugcuguaccaggacgugaacuguaccgaagugcccguggccauucacgccgaucagcugacaccuacauggcggguguacuccaccggcagcaauguguuucagaccagagccggcugucugaucggagccgagcacgugaacaauagcuacgagugcgacauccccaucggcgcuggcaucugugccagcuaccagacacagacaaacagccccagacgggcuagaagcguggccagccagagcaucauugccuacacaaugucucugggcgccgagaacagcguggccuacuccaacaacucuaucgcuauccccaccaacuucaccaucagcgugaccaccgagauccugccuguguccaugaccaagaccagcguggacugcaccauguacaucugcggcgauuccaccgagugcuccaaccugcugcugcaguacggcagcuucugcacccagcugaauagagcccugacagggaucgccguggaacaggacaagaacacccaagagguguucgcccaagugaagcaaaucuacaagaccccuccuaucaaggacuucggcggcuucaauuucagccagauucugcccgauccuagcaagcccagcaagcggagcuucaucgaggaccugcuguucaacaaagugacacuggccgacgccggcuucaucaagcaguauggcgauugucugggcgacauugccgccagggaucugauuugcgcccagaaguuuaacggacugacagugcugccuccucugcugaccgaugagaugaucgcccaguacugcucugcccugcuggccggcacaaucacaagcggcuggacauuuggagcuggcgccgcucugcagauccccuuugcuaugcagauggccuaccgguucaacggcaucggagugacccagaaugugcuguacgagaaccagaagcugaucgccaaccaguucaacagcgccaucggcaagauccaggacagccugagcagcacagcaagcgcccugggaaagcugcaggacguggucaaccagaaugcccaggcacugaacacccuggucaagcagcuguccuccaacuucggcgccaucagcucugugcugaacgauauccugagcagacuggacaaggucgaggccgaggugcagaucgacagacugaucacaggcagacugcagagccuccagacauacgugacccagcagcugaucagagccgccgagauuagagccucugccaaucuggccgccaccaagaugucugagugugugcugggccagagcaagagaguggacuuuugcggcaagggcuaccaccugaugagcuucccucagugcgccccucacggcgugguguuucugcacgugacauaugugcccgcucaagagaagaauuucaccaccgcuccagccaucugccacgacggcaaagcccacuuuccuagagaaggcguguucguguccaacggcacccauugguucgugacacagcggaacuucuacgagccccagaucaucaccaccgacaacaccuucgugucuggcaacugcgacguugugaucggcauugugaacaauaccguguacgacccucugcagcccgagcuggacagcggaggcggaggaucugacaucaucaagcugcugaacgagcaagugaacaaagagaugcagagcagcaaccuguacaugagcaugagcagcuggugcuacacccacagccuugauggcgccggacuguuccuguuugaucacgccgccgaggaauacgagcacgccaagaagcugaucaucuuccugaacgagaacaacgugcccgugcagcugaccagcauuucugccccugagcacaaguucgagggccugacacagaucuuccagaaggccuacgaacacgagcagcacaucagcgagagcaucaacaacaucguggaccacgccauuaagagcaaggaucacgccaccuucaacuuucugcagugguacguggccgaacagcacgaggaagaggugcuguucaaggacauccuggacaagaucgagcugaucggcaacgagaaccacggccuguaucuggccgaccaguacgugaagggaaucgccaagagcagaaagagcuga

SEQ ID NO: 12174 - RNA, 3534 nt, Artificial Sequence
  SARS-CoV-2/Wuhan/WIV05/2019__EPI_ISL_402128 spike protein CDS gc mod (1-1147) Foldon construct
auguucguguuucuggugcugcugccccugguguccagccagugugugaaccugaccaccagaacacagcugccuccagccuacaccaacagcuucaccagaggcguguacuaccccgacaagguguucagauccagcgugcugcacucuacccaggaccuguuccugccuuucuucagcaacgugaccugguuccacgccauccacguguccggcaccaauggcaccaagagauucgacaaccccgugcugcccuucaacgacgggguguacuuugccagcaccgagaaguccaacaucaucagaggcuggaucuucggcaccacacuggacagcaagacccagagccugcugaucgugaacaacgccaccaacguggucaucaaagugugcgaguuccaguucugcaacgaccccuuccugggcgucuacuaccacaagaacaacaagagcuggauggaaagcgaguuccggguguacagcagcgccaacaacugcaccuucgaguacgugucccagccuuuccugauggaccuggaaggcaagcagggcaacuucaagaaccugcgcgaguucguguucaagaacaucgacggcuacuucaaaaucuacagcaagcacaccccuaucaaccucgugcgggaucugccucagggcuucucugcucuggaaccccugguggaucugcccaucggcaucaacaucacccgguuucagacacugcuggcccugcacagaagcuaccugacaccuggcgauagcagcagcggauggacagcuggugccgccgcuuacuaugugggcuaccugcagccuagaaccuuccugcugaaguacaacgagaacggcaccaucaccgacgccguggauugugcucuggauccucugagcgagacaaagugcacccugaaguccuucaccguggaaaagggcaucuaccagaccagcaacuuccgggugcagcccaccgaauccaucgugcgguuccccaauaucaccaaucugugccccuucggcgagguguucaaugccaccagauucgccucuguguacgccuggaaccggaagcggaucagcaauugcguggccgacuacuccgugcuguacaacuccgccagcuucagcaccuucaagugcuacggcguguccccuaccaagcugaacgaccugugcuucacaaacguguacgccgacagcuucgugauccggggagaugaagugcggcagauugccccuggacagacaggcaagaucgccgacuacaacuacaagcugcccgacgacuucaccggcugugugauugccuggaacagcaacaaccuggacuccaaagucggcggcaacuacaauuaccuguaccggcuguuccggaaguccaaucugaagcccuucgagcgggacaucagcaccgaaaucuaucaggccggcagcaccccuugcaacggcguggaaggcuucaacugcuacuucccacugcaguccuacggcuuucagcccacaaauggcgugggcuaucagcccuacagagugguggugcugagcuucgaacugcugcaugcuccugccacagugugcggcccuaagaaaagcaccaaucucgugaagaacaaaugcgugaacuucaacuucaacggccugaccggcaccggcgugcugacagagagcaacaagaaguuccugccauuccagcaguuuggccgggauaucgccgauaccacagacgccguuagagauccccagacacuggaaauccuggacaucaccccaugcagcuucggcggagugucugugaucaccccuggcaccaacaccagcaaucagguggcagugcuguaccaggacgugaacuguaccgaagugcccguggccauucacgccgaucagcugacaccuacauggcggguguacuccaccggcagcaauguguuucagaccagagccggcugucugaucggagccgagcacgugaacaauagcuacgagugcgacauccccaucggcgcuggcaucugugccagcuaccagacacagacaaacagccccagacgggcuagaagcguggccagccagagcaucauugccuacacaaugucucugggcgccgagaacagcguggccuacuccaacaacucuaucgcuauccccaccaacuucaccaucagcgugaccaccgagauccugccuguguccaugaccaagaccagcguggacugcaccauguacaucugcggcgauuccaccgagugcuccaaccugcugcugcaguacggcagcuucugcacccagcugaauagagcccugacagggaucgccguggaacaggacaagaacacccaagagguguucgcccaagugaagcaaaucuacaagaccccuccuaucaaggacuucggcggcuucaauuucagccagauucugcccgauccuagcaagcccagcaagcggagcuucaucgaggaccugcuguucaacaaagugacacuggccgacgccggcuucaucaagcaguauggcgauugucugggcgacauugccgccagggaucugauuugcgcccagaaguuuaacggacugacagugcugccuccucugcugaccgaugagaugaucgcccaguacacaucugcccugcuggccggcacaaucacaagcggcuggacauuuggagcuggcgccgcucugcagauccccuuugcuaugcagauggccuaccgguucaacggcaucggagugacccagaaugugcuguacgagaaccagaagcugaucgccaaccaguucaacagcgccaucggcaagauccaggacagccugagcagcacagcaagcgcccugggaaagcugcaggacguggucaaccagaaugcccaggcacugaacacccuggucaagcagcuguccuccaacuucggcgccaucagcucugugcugaacgauauccugagcagacuggacaaggucgaggccgaggugcagaucgacagacugaucacaggcagacugcagagccuccagacauacgugacccagcagcugaucagagccgccgagauuagagccucugccaaucuggccgccaccaagaugucugagugugugcugggccagagcaagagaguggacuuuugcggcaagggcuaccaccugaugagcuucccucagucugccccucacggcgugguguuucugcacgugacauaugugcccgcucaagagaagaauuucaccaccgcuccagccaucugccacgacggcaaagcccacuuuccuagagaaggcguguucguguccaacggcacccauugguucgugacacagcggaacuucuacgagccccagaucaucaccaccgacaacaccuucgugucuggcaacugcgacguugugaucggcauugugaacaauaccguguacgacccucugcagcccgagcuggacagcggaggaucuggcuauauccccgaggcuccuagagauggccaggccuauguucggaaggauggcgaaugggugcugcugagcaccuuccuuuga

SEQ ID NO: 12175 - RNA, 3534 nt, Artificial Sequence
  SARS-CoV-2/Wuhan/WIV05/2019__EPI_ISL_402128 spike protein CDS gc mod (1-1147)(K986P_V987P) Foldon construct
auguucguguuucuggugcugcugccccugguguccagccagugugugaaccugaccaccagaacacagcugccuccagccuacaccaacagcuucaccagaggcguguacuaccccgacaagguguucagauccagcgugcugcacucuacccaggaccuguuccugccuuucuucagcaacgugaccugguuccacgccauccacguguccggcaccaauggcaccaagagauucgacaaccccgugcugcccuucaacgacgggguguacuuugccagcaccgagaaguccaacaucaucagaggcuggaucuucggcaccacacuggacagcaagacccagagccugcugaucgugaacaacgccaccaacguggucaucaaagugugcgaguuccaguucugcaacgaccccuuccugggcgucuacuaccacaagaacaacaagagcuggauggaaagcgaguuccggguguacagcagcgccaacaacugcaccuucgaguacgugucccagccuuuccugauggaccuggaaggcaagcagggcaacuucaagaaccugcgcgaguucguguucaagaacaucgacggcuacuucaaaaucuacagcaagcacaccccuaucaaccucgugcgggaucugccucagggcuucucugcucuggaaccccugguggaucugcccaucggcaucaacaucacccgguuucagacacugcuggcccugcacagaagcuaccugacaccuggcgauagcagcagcggauggacagcuggugccgccgcuuacuaugugggcuaccugcagccuagaaccuuccugcugaaguacaacgagaacggcaccaucaccgacgccguggauugugcucuggauccucugagcgagacaaagugcacccugaaguccuucaccguggaaaagggcaucuaccagaccagcaacuuccgggugcagcccaccgaauccaucgugcgguuccccaauaucaccaaucugugccccuucggcgagguguucaaugccaccagauucgccucuguguacgccuggaaccggaagcggaucagcaauugcguggccgacuacuccgugcuguacaacuccgccagcuucagcaccuucaagugcuacggcguguccccuaccaagcugaacgaccugugcuucacaaacguguacgccgacagcuucgugauccggggagaugaagugcggcagauugccccuggacagacaggcaagaucgccgacuacaacuacaagcugcccgacgacuucaccggcugugugauugccuggaacagcaacaaccuggacuccaaagucggcggcaacuacaauuaccuguaccggcuguuccggaaguccaaucugaagcccuucgagcgggacaucagcaccgaaaucuaucaggccggcagcaccccuugcaacggcguggaaggcuucaacugcuacuucccacugcaguccuacggcuuucagcccacaaauggcgugggcuaucagcccuacagagugguggugcugagcuucgaacugcugcaugcuccugccacagugugcggcccuaagaaaagcaccaaucucgugaagaacaaaugcgugaacuucaacuucaacggccugaccggcaccggcgugcugacagagagcaacaagaaguuccugccauuccagcaguuuggccgggauaucgccgauaccacagacgccguuagagauccccagacacuggaaauccuggacaucaccccaugcagcuucggcggagugucugugaucaccccuggcaccaacaccagcaaucagguggcagugcuguaccaggacgugaacuguaccgaagugcccguggccauucacgccgaucagcugacaccuacauggcggguguacuccaccggcagcaauguguuucagaccagagccggcugucugaucggagccgagcacgugaacaauagcuacgagugcgacauccccaucggcgcuggcaucugugccagcuaccagacacagacaaacagccccagacgggcuagaagcguggccagccagagcaucauugccuacacaaugucucugggcgccgagaacagcguggccuacuccaacaacucuaucgcuauccccaccaacuucaccaucagcgugaccaccgagauccugccuguguccaugaccaagaccagcguggacugcaccauguacaucugcggcgauuccaccgagugcuccaaccugcugcugcaguacggcagcuucugcacccagcugaauagagcccugacagggaucgccguggaacaggacaagaacacccaagagguguucgcccaagugaagcaaaucuacaagaccccuccuaucaaggacuucggcggcuucaauuucagccagauucugcccgauccuagcaagcccagcaagcggagcuucaucgaggaccugcuguucaacaaagugacacuggccgacgccggcuucaucaagcaguauggcgauugucugggcgacauugccgccagggaucugauuugcgcccagaaguuuaacggacugacagugcugccuccucugcugaccgaugagaugaucgcccaguacacaucugcccugcuggccggcacaaucacaagcggcuggacauuuggagcuggcgccgcucugcagauccccuuugcuaugcagauggccuaccgguucaacggcaucggagugacccagaaugugcuguacgagaaccagaagcugaucgccaaccaguucaacagcgccaucggcaagauccaggacagccugagcagcacagcaagcgcccugggaaagcugcaggacguggucaaccagaaugcccaggcacugaacacccuggucaagcagcuguccuccaacuucggcgccaucagcucugugcugaacgauauccugagcagacuggacccuccugaggccgaggugcagaucgacagacugaucacaggcagacugcagagccuccagacauacgugacccagcagcugaucagagccgccgagauuagagccucugccaaucuggccgccaccaagaugucugagugugugcugggccagagcaagagaguggacuuuugcggcaagggcuaccaccugaugagcuucccucagucugccccucacggcgugguguuucugcacgugacauaugugcccgcucaagagaagaauuucaccaccgcuccagccaucugccacgacggcaaagcccacuuuccuagagaaggcguguucguguccaacggcacccauugguucgugacacagcggaacuucuacgagccccagaucaucaccaccgacaacaccuucgugucuggcaacugcgacguugugaucggcauugugaacaauaccguguacgacccucugcagcccgagcuggacagcggaggaucuggcuauauccccgaggcuccuagagauggccaggccuauguucggaaggauggcgaaugggugcugcugagcaccuuccuuuga

SEQ ID NO: 12176 - RNA, 3534 nt, Artificial Sequence
  SARS-CoV-2/Wuhan/WIV05/2019__EPI_ISL_402128 spike protein CDS gc mod (1-1147)(K986P_V987P_T887WN_A1020W) Foldon construct
auguucguguuucuggugcugcugccccugguguccagccagugugugaaccugaccaccagaacacagcugccuccagccuacaccaacagcuucaccagaggcguguacuaccccgacaagguguucagauccagcgugcugcacucuacccaggaccuguuccugccuuucuucagcaacgugaccugguuccacgccauccacguguccggcaccaauggcaccaagagauucgacaaccccgugcugcccuucaacgacgggguguacuuugccagcaccgagaaguccaacaucaucagaggcuggaucuucggcaccacacuggacagcaagacccagagccugcugaucgugaacaacgccaccaacguggucaucaaagugugcgaguuccaguucugcaacgaccccuuccugggcgucuacuaccacaagaacaacaagagcuggauggaaagcgaguuccggguguacagcagcgccaacaacugcaccuucgaguacgugucccagccuuuccugauggaccuggaaggcaagcagggcaacuucaagaaccugcgcgaguucguguucaagaacaucgacggcuacuucaaaaucuacagcaagcacaccccuaucaaccucgugcgggaucugccucagggcuucucugcucuggaaccccugguggaucugcccaucggcaucaacaucacccgguuucagacacugcuggcccugcacagaagcuaccugacaccuggcgauagcagcagcggauggacagcuggugccgccgcuuacuaugugggcuaccugcagccuagaaccuuccugcugaaguacaacgagaacggcaccaucaccgacgccguggauugugcucuggauccucugagcgagacaaagugcacccugaaguccuucaccguggaaaagggcaucuaccagaccagcaacuuccgggugcagcccaccgaauccaucgugcgguuccccaauaucaccaaucugugccccuucggcgagguguucaaugccaccagauucgccucuguguacgccuggaaccggaagcggaucagcaauugcguggccgacuacuccgugcuguacaacuccgccagcuucagcaccuucaagugcuacggcguguccccuaccaagcugaacgaccugugcuucacaaacguguacgccgacagcuucgugauccggggagaugaagugcggcagauugccccuggacagacaggcaagaucgccgacuacaacuacaagcugcccgacgacuucaccggcugugugauugccuggaacagcaacaaccuggacuccaaagucggcggcaacuacaauuaccuguaccggcuguuccggaaguccaaucugaagcccuucgagcgggacaucagcaccgaaaucuaucaggccggcagcaccccuugcaacggcguggaaggcuucaacugcuacuucccacugcaguccuacggcuuucagcccacaaauggcgugggcuaucagcccuacagagugguggugcugagcuucgaacugcugcaugcuccugccacagugugcggcccuaagaaaagcaccaaucucgugaagaacaaaugcgugaacuucaacuucaacggccugaccggcaccggcgugcugacagagagcaacaagaaguuccugccauuccagcaguuuggccgggauaucgccgauaccacagacgccguuagagauccccagacacuggaaauccuggacaucaccccaugcagcuucggcggagugucugugaucaccccuggcaccaacaccagcaaucagguggcagugcuguaccaggacgugaacuguaccgaagugcccguggccauucacgccgaucagcugacaccuacauggcggguguacuccaccggcagcaauguguuucagaccagagccggcugucugaucggagccgagcacgugaacaauagcuacgagugcgacauccccaucggcgcuggcaucugugccagcuaccagacacagacaaacagccccagacgggcuagaagcguggccagccagagcaucauugccuacacaaugucucugggcgccgagaacagcguggccuacuccaacaacucuaucgcuauccccaccaacuucaccaucagcgugaccaccgagauccugccuguguccaugaccaagaccagcguggacugcaccauguacaucugcggcgauuccaccgagugcuccaaccugcugcugcaguacggcagcuucugcacccagcugaauagagcccugacagggaucgccguggaacaggacaagaacacccaagagguguucgcccaagugaagcaaaucuacaagaccccuccuaucaaggacuucggcggcuucaauuucagccagauucugcccgauccuagcaagcccagcaagcggagcuucaucgaggaccugcuguucaacaaagugacacuggccgacgccggcuucaucaagcaguauggcgauugucugggcgacauugccgccagggaucugauuugcgcccagaaguuuaacggacugacagugcugccuccucugcugaccgaugagaugaucgcccaguacacaucugcccugcuggccggcacaaucacaagcggcuggugguuuggagcuggcgccgcucugcagauccccuuugcuaugcagauggccuaccgguucaacggcaucggagugacccagaaugugcuguacgagaaccagaagcugaucgccaaccaguucaacagcgccaucggcaagauccaggacagccugagcagcacagcaagcgcccugggaaagcugcaggacguggucaaccagaaugcccaggcacugaacacccuggucaagcagcuguccuccaacuucggcgccaucagcucugugcugaacgauauccugagcagacuggacccuccugaggccgaggugcagaucgacagacugaucacaggcagacugcagagccuccagacauacgugacccagcagcugaucagagccgccgagauuagauggucugccaaucuggccgccaccaagaugucugagugugugcugggccagagcaagagaguggacuuuugcggcaagggcuaccaccugaugagcuucccucagucugccccucacggcgugguguuucugcacgugacauaugugcccgcucaagagaagaauuucaccaccgcuccagccaucugccacgacggcaaagcccacuuuccuagagaaggcguguucguguccaacggcacccauugguucgugacacagcggaacuucuacgagccccagaucaucaccaccgacaacaccuucgugucuggcaacugcgacguugugaucggcauugugaacaauaccguguacgacccucugcagcccgagcuggacagcggaggaucuggcuauauccccgaggcuccuagagauggccaggccuauguucggaaggauggcgaaugggugcugcugagcaccuuccuuuga

SEQ ID NO: 12177 - RNA, 3534 nt, Artificial Sequence
  SARS-CoV-2/Wuhan/WIV05/2019__EPI_ISL_402128 spike protein CDS gc mod (1-1147)(K986P_V987P_P1069F) Foldon construct
auguucguguuucuggugcugcugccccugguguccagccagugugugaaccugaccaccagaacacagcugccuccagccuacaccaacagcuucaccagaggcguguacuaccccgacaagguguucagauccagcgugcugcacucuacccaggaccuguuccugccuuucuucagcaacgugaccugguuccacgccauccacguguccggcaccaauggcaccaagagauucgacaaccccgugcugcccuucaacgacgggguguacuuugccagcaccgagaaguccaacaucaucagaggcuggaucuucggcaccacacuggacagcaagacccagagccugcugaucgugaacaacgccaccaacguggucaucaaagugugcgaguuccaguucugcaacgaccccuuccugggcgucuacuaccacaagaacaacaagagcuggauggaaagcgaguuccggguguacagcagcgccaacaacugcaccuucgaguacgugucccagccuuuccugauggaccuggaaggcaagcagggcaacuucaagaaccugcgcgaguucguguucaagaacaucgacggcuacuucaaaaucuacagcaagcacaccccuaucaaccucgugcgggaucugccucagggcuucucugcucuggaaccccugguggaucugcccaucggcaucaacaucacccgguuucagacacugcuggcccugcacagaagcuaccugacaccuggcgauagcagcagcggauggacagcuggugccgccgcuuacuaugugggcuaccugcagccuagaaccuuccugcugaaguacaacgagaacggcaccaucaccgacgccguggauugugcucuggauccucugagcgagacaaagugcacccugaaguccuucaccguggaaaagggcaucuaccagaccagcaacuuccgggugcagcccaccgaauccaucgugcgguuccccaauaucaccaaucugugccccuucggcgagguguucaaugccaccagauucgccucuguguacgccuggaaccggaagcggaucagcaauugcguggccgacuacuccgugcuguacaacuccgccagcuucagcaccuucaagugcuacggcguguccccuaccaagcugaacgaccugugcuucacaaacguguacgccgacagcuucgugauccggggagaugaagugcggcagauugccccuggacagacaggcaagaucgccgacuacaacuacaagcugcccgacgacuucaccggcugugugauugccuggaacagcaacaaccuggacuccaaagucggcggcaacuacaauuaccuguaccggcuguuccggaaguccaaucugaagcccuucgagcgggacaucagcaccgaaaucuaucaggccggcagcaccccuugcaacggcguggaaggcuucaacugcuacuucccacugcaguccuacggcuuucagcccacaaauggcgugggcuaucagcccuacagagugguggugcugagcuucgaacugcugcaugcuccugccacagugugcggcccuaagaaaagcaccaaucucgugaagaacaaaugcgugaacuucaacuucaacggccugaccggcaccggcgugcugacagagagcaacaagaaguuccugccauuccagcaguuuggccgggauaucgccgauaccacagacgccguuagagauccccagacacuggaaauccuggacaucaccccaugcagcuucggcggagugucugugaucaccccuggcaccaacaccagcaaucagguggcagugcuguaccaggacgugaacuguaccgaagugcccguggccauucacgccgaucagcugacaccuacauggcggguguacuccaccggcagcaauguguuucagaccagagccggcugucugaucggagccgagcacgugaacaauagcuacgagugcgacauccccaucggcgcuggcaucugugccagcuaccagacacagacaaacagccccagacgggcuagaagcguggccagccagagcaucauugccuacacaaugucucugggcgccgagaacagcguggccuacuccaacaacucuaucgcuauccccaccaacuucaccaucagcgugaccaccgagauccugccuguguccaugaccaagaccagcguggacugcaccauguacaucugcggcgauuccaccgagugcuccaaccugcugcugcaguacggcagcuucugcacccagcugaauagagcccugacagggaucgccguggaacaggacaagaacacccaagagguguucgcccaagugaagcaaaucuacaagaccccuccuaucaaggacuucggcggcuucaauuucagccagauucugcccgauccuagcaagcccagcaagcggagcuucaucgaggaccugcuguucaacaaagugacacuggccgacgccggcuucaucaagcaguauggcgauugucugggcgacauugccgccagggaucugauuugcgcccagaaguuuaacggacugacagugcugccuccucugcugaccgaugagaugaucgcccaguacacaucugcccugcuggccggcacaaucacaagcggcuggacauuuggagcuggcgccgcucugcagauccccuuugcuaugcagauggccuaccgguucaacggcaucggagugacccagaaugugcuguacgagaaccagaagcugaucgccaaccaguucaacagcgccaucggcaagauccaggacagccugagcagcacagcaagcgcccugggaaagcugcaggacguggucaaccagaaugcccaggcacugaacacccuggucaagcagcuguccuccaacuucggcgccaucagcucugugcugaacgauauccugagcagacuggacccuccugaggccgaggugcagaucgacagacugaucacaggcagacugcagagccuccagacauacgugacccagcagcugaucagagccgccgagauuagagccucugccaaucuggccgccaccaagaugucugagugugugcugggccagagcaagagaguggacuuuugcggcaagggcuaccaccugaugagcuucccucagucugccccucacggcgugguguuucugcacgugacauauguguucgcucaagagaagaauuucaccaccgcuccagccaucugccacgacggcaaagcccacuuuccuagagaaggcguguucguguccaacggcacccauugguucgugacacagcggaacuucuacgagccccagaucaucaccaccgacaacaccuucgugucuggcaacugcgacguugugaucggcauugugaacaauaccguguacgacccucugcagcccgagcuggacagcggaggaucuggcuauauccccgaggcuccuagagauggccaggccuauguucggaaggauggcgaaugggugcugcugagcaccuuccuuuga

SEQ ID NO: 12178 - RNA, 3534 nt, Artificial Sequence
  SARS-CoV-2/Wuhan/WIV05/2019__EPI_ISL_402128 spike protein CDS gc mod (1-1147)(K986P_V987P_ H1048Q_H1064N_ H1083N_H1101N) Foldon construct
auguucguguuucuggugcugcugccccugguguccagccagugugugaaccugaccaccagaacacagcugccuccagccuacaccaacagcuucaccagaggcguguacuaccccgacaagguguucagauccagcgugcugcacucuacccaggaccuguuccugccuuucuucagcaacgugaccugguuccacgccauccacguguccggcaccaauggcaccaagagauucgacaaccccgugcugcccuucaacgacgggguguacuuugccagcaccgagaaguccaacaucaucagaggcuggaucuucggcaccacacuggacagcaagacccagagccugcugaucgugaacaacgccaccaacguggucaucaaagugugcgaguuccaguucugcaacgaccccuuccugggcgucuacuaccacaagaacaacaagagcuggauggaaagcgaguuccggguguacagcagcgccaacaacugcaccuucgaguacgugucccagccuuuccugauggaccuggaaggcaagcagggcaacuucaagaaccugcgcgaguucguguucaagaacaucgacggcuacuucaaaaucuacagcaagcacaccccuaucaaccucgugcgggaucugccucagggcuucucugcucuggaaccccugguggaucugcccaucggcaucaacaucacccgguuucagacacugcuggcccugcacagaagcuaccugacaccuggcgauagcagcagcggauggacagcuggugccgccgcuuacuaugugggcuaccugcagccuagaaccuuccugcugaaguacaacgagaacggcaccaucaccgacgccguggauugugcucuggauccucugagcgagacaaagugcacccugaaguccuucaccguggaaaagggcaucuaccagaccagcaacuuccgggugcagcccaccgaauccaucgugcgguuccccaauaucaccaaucugugccccuucggcgagguguucaaugccaccagauucgccucuguguacgccuggaaccggaagcggaucagcaauugcguggccgacuacuccgugcuguacaacuccgccagcuucagcaccuucaagugcuacggcguguccccuaccaagcugaacgaccugugcuucacaaacguguacgccgacagcuucgugauccggggagaugaagugcggcagauugccccuggacagacaggcaagaucgccgacuacaacuacaagcugcccgacgacuucaccggcugugugauugccuggaacagcaacaaccuggacuccaaagucggcggcaacuacaauuaccuguaccggcuguuccggaaguccaaucugaagcccuucgagcgggacaucagcaccgaaaucuaucaggccggcagcaccccuugcaacggcguggaaggcuucaacugcuacuucccacugcaguccuacggcuuucagcccacaaauggcgugggcuaucagcccuacagagugguggugcugagcuucgaacugcugcaugcuccugccacagugugcggcccuaagaaaagcaccaaucucgugaagaacaaaugcgugaacuucaacuucaacggccugaccggcaccggcgugcugacagagagcaacaagaaguuccugccauuccagcaguuuggccgggauaucgccgauaccacagacgccguuagagauccccagacacuggaaauccuggacaucaccccaugcagcuucggcggagugucugugaucaccccuggcaccaacaccagcaaucagguggcagugcuguaccaggacgugaacuguaccgaagugcccguggccauucacgccgaucagcugacaccuacauggcggguguacuccaccggcagcaauguguuucagaccagagccggcugucugaucggagccgagcacgugaacaauagcuacgagugcgacauccccaucggcgcuggcaucugugccagcuaccagacacagacaaacagccccagacgggcuagaagcguggccagccagagcaucauugccuacacaaugucucugggcgccgagaacagcguggccuacuccaacaacucuaucgcuauccccaccaacuucaccaucagcgugaccaccgagauccugccuguguccaugaccaagaccagcguggacugcaccauguacaucugcggcgauuccaccgagugcuccaaccugcugcugcaguacggcagcuucugcacccagcugaauagagcccugacagggaucgccguggaacaggacaagaacacccaagagguguucgcccaagugaagcaaaucuacaagaccccuccuaucaaggacuucggcggcuucaauuucagccagauucugcccgauccuagcaagcccagcaagcggagcuucaucgaggaccugcuguucaacaaagugacacuggccgacgccggcuucaucaagcaguauggcgauugucugggcgacauugccgccagggaucugauuugcgcccagaaguuuaacggacugacagugcugccuccucugcugaccgaugagaugaucgcccaguacacaucugcccugcuggccggcacaaucacaagcggcuggacauuuggagcuggcgccgcucugcagauccccuuugcuaugcagauggccuaccgguucaacggcaucggagugacccagaaugugcuguacgagaaccagaagcugaucgccaaccaguucaacagcgccaucggcaagauccaggacagccugagcagcacagcaagcgcccugggaaagcugcaggacguggucaaccagaaugcccaggcacugaacacccuggucaagcagcuguccuccaacuucggcgccaucagcucugugcugaacgauauccugagcagacuggacccuccugaggccgaggugcagaucgacagacugaucacaggcagacugcagagccuccagacauacgugacccagcagcugaucagagccgccgagauuagagccucugccaaucuggccgccaccaagaugucugagugugugcugggccagagcaagagaguggacuuuugcggcaagggcuaccagcugaugagcuucccucagucugccccucacggcgugguguuucugaacgugacauaugugcccgcucaagagaagaauuucaccaccgcuccagccaucugcaacgacggcaaagcccacuuuccuagagaaggcguguucguguccaacggcaccaacugguucgugacacagcggaacuucuacgagccccagaucaucaccaccgacaacaccuucgugucuggcaacugcgacguugugaucggcauugugaacaauaccguguacgacccucugcagcccgagcuggacagcggaggaucuggcuauauccccgaggcuccuagagauggccaggccuauguucggaaggauggcgaaugggugcugcugagcaccuuccuuuga

SEQ ID NO: 12179 - RNA, 3534 nt, Artificial Sequence
  SARS-CoV-2/Wuhan/WIV05/2019__EPI_ISL_402128 spike protein CDS gc mod (1-1147)(I712C_T1077C) Foldon construct
auguucguguuucuggugcugcugccccugguguccagccagugugugaaccugaccaccagaacacagcugccuccagccuacaccaacagcuucaccagaggcguguacuaccccgacaagguguucagauccagcgugcugcacucuacccaggaccuguuccugccuuucuucagcaacgugaccugguuccacgccauccacguguccggcaccaauggcaccaagagauucgacaaccccgugcugcccuucaacgacgggguguacuuugccagcaccgagaaguccaacaucaucagaggcuggaucuucggcaccacacuggacagcaagacccagagccugcugaucgugaacaacgccaccaacguggucaucaaagugugcgaguuccaguucugcaacgaccccuuccugggcgucuacuaccacaagaacaacaagagcuggauggaaagcgaguuccggguguacagcagcgccaacaacugcaccuucgaguacgugucccagccuuuccugauggaccuggaaggcaagcagggcaacuucaagaaccugcgcgaguucguguucaagaacaucgacggcuacuucaaaaucuacagcaagcacaccccuaucaaccucgugcgggaucugccucagggcuucucugcucuggaaccccugguggaucugcccaucggcaucaacaucacccgguuucagacacugcuggcccugcacagaagcuaccugacaccuggcgauagcagcagcggauggacagcuggugccgccgcuuacuaugugggcuaccugcagccuagaaccuuccugcugaaguacaacgagaacggcaccaucaccgacgccguggauugugcucuggauccucugagcgagacaaagugcacccugaaguccuucaccguggaaaagggcaucuaccagaccagcaacuuccgggugcagcccaccgaauccaucgugcgguuccccaauaucaccaaucugugccccuucggcgagguguucaaugccaccagauucgccucuguguacgccuggaaccggaagcggaucagcaauugcguggccgacuacuccgugcuguacaacuccgccagcuucagcaccuucaagugcuacggcguguccccuaccaagcugaacgaccugugcuucacaaacguguacgccgacagcuucgugauccggggagaugaagugcggcagauugccccuggacagacaggcaagaucgccgacuacaacuacaagcugcccgacgacuucaccggcugugugauugccuggaacagcaacaaccuggacuccaaagucggcggcaacuacaauuaccuguaccggcuguuccggaaguccaaucugaagcccuucgagcgggacaucagcaccgaaaucuaucaggccggcagcaccccuugcaacggcguggaaggcuucaacugcuacuucccacugcaguccuacggcuuucagcccacaaauggcgugggcuaucagcccuacagagugguggugcugagcuucgaacugcugcaugcuccugccacagugugcggcccuaagaaaagcaccaaucucgugaagaacaaaugcgugaacuucaacuucaacggccugaccggcaccggcgugcugacagagagcaacaagaaguuccugccauuccagcaguuuggccgggauaucgccgauaccacagacgccguuagagauccccagacacuggaaauccuggacaucaccccaugcagcuucggcggagugucugugaucaccccuggcaccaacaccagcaaucagguggcagugcuguaccaggacgugaacuguaccgaagugcccguggccauucacgccgaucagcugacaccuacauggcggguguacuccaccggcagcaauguguuucagaccagagccggcugucugaucggagccgagcacgugaacaauagcuacgagugcgacauccccaucggcgcuggcaucugugccagcuaccagacacagacaaacagccccagacgggcuagaagcguggccagccagagcaucauugccuacacaaugucucugggcgccgagaacagcguggccuacuccaacaacucuugcgcuauccccaccaacuucaccaucagcgugaccaccgagauccugccuguguccaugaccaagaccagcguggacugcaccauguacaucugcggcgauuccaccgagugcuccaaccugcugcugcaguacggcagcuucugcacccagcugaauagagcccugacagggaucgccguggaacaggacaagaacacccaagagguguucgcccaagugaagcaaaucuacaagaccccuccuaucaaggacuucggcggcuucaauuucagccagauucugcccgauccuagcaagcccagcaagcggagcuucaucgaggaccugcuguucaacaaagugacacuggccgacgccggcuucaucaagcaguauggcgauugucugggcgacauugccgccagggaucugauuugcgcccagaaguuuaacggacugacagugcugccuccucugcugaccgaugagaugaucgcccaguacacaucugcccugcuggccggcacaaucacaagcggcuggacauuuggagcuggcgccgcucugcagauccccuuugcuaugcagauggccuaccgguucaacggcaucggagugacccagaaugugcuguacgagaaccagaagcugaucgccaaccaguucaacagcgccaucggcaagauccaggacagccugagcagcacagcaagcgcccugggaaagcugcaggacguggucaaccagaaugcccaggcacugaacacccuggucaagcagcuguccuccaacuucggcgccaucagcucugugcugaacgauauccugagcagacuggacaaggucgaggccgaggugcagaucgacagacugaucacaggcagacugcagagccuccagacauacgugacccagcagcugaucagagccgccgagauuagagccucugccaaucuggccgccaccaagaugucugagugugugcugggccagagcaagagaguggacuuuugcggcaagggcuaccaccugaugagcuucccucagucugccccucacggcgugguguuucugcacgugacauaugugcccgcucaagagaagaauuucaccugugcuccagccaucugccacgacggcaaagcccacuuuccuagagaaggcguguucguguccaacggcacccauugguucgugacacagcggaacuucuacgagccccagaucaucaccaccgacaacaccuucgugucuggcaacugcgacguugugaucggcauugugaacaauaccguguacgacccucugcagcccgagcuggacagcggaggaucuggcuauauccccgaggcuccuagagauggccaggccuauguucggaaggauggcgaaugggugcugcugagcaccuuccuuuga

SEQ ID NO: 12180 - RNA, 3534 nt, Artificial Sequence
  SARS-CoV-2/Wuhan/WIV05/2019__EPI_ISL_402128 spike protein CDS gc mod (1-1147)(I714C_Y1110C) Foldon construct
auguucguguuucuggugcugcugccccugguguccagccagugugugaaccugaccaccagaacacagcugccuccagccuacaccaacagcuucaccagaggcguguacuaccccgacaagguguucagauccagcgugcugcacucuacccaggaccuguuccugccuuucuucagcaacgugaccugguuccacgccauccacguguccggcaccaauggcaccaagagauucgacaaccccgugcugcccuucaacgacgggguguacuuugccagcaccgagaaguccaacaucaucagaggcuggaucuucggcaccacacuggacagcaagacccagagccugcugaucgugaacaacgccaccaacguggucaucaaagugugcgaguuccaguucugcaacgaccccuuccugggcgucuacuaccacaagaacaacaagagcuggauggaaagcgaguuccggguguacagcagcgccaacaacugcaccuucgaguacgugucccagccuuuccugauggaccuggaaggcaagcagggcaacuucaagaaccugcgcgaguucguguucaagaacaucgacggcuacuucaaaaucuacagcaagcacaccccuaucaaccucgugcgggaucugccucagggcuucucugcucuggaaccccugguggaucugcccaucggcaucaacaucacccgguuucagacacugcuggcccugcacagaagcuaccugacaccuggcgauagcagcagcggauggacagcuggugccgccgcuuacuaugugggcuaccugcagccuagaaccuuccugcugaaguacaacgagaacggcaccaucaccgacgccguggauugugcucuggauccucugagcgagacaaagugcacccugaaguccuucaccguggaaaagggcaucuaccagaccagcaacuuccgggugcagcccaccgaauccaucgugcgguuccccaauaucaccaaucugugccccuucggcgagguguucaaugccaccagauucgccucuguguacgccuggaaccggaagcggaucagcaauugcguggccgacuacuccgugcuguacaacuccgccagcuucagcaccuucaagugcuacggcguguccccuaccaagcugaacgaccugugcuucacaaacguguacgccgacagcuucgugauccggggagaugaagugcggcagauugccccuggacagacaggcaagaucgccgacuacaacuacaagcugcccgacgacuucaccggcugugugauugccuggaacagcaacaaccuggacuccaaagucggcggcaacuacaauuaccuguaccggcuguuccggaaguccaaucugaagcccuucgagcgggacaucagcaccgaaaucuaucaggccggcagcaccccuugcaacggcguggaaggcuucaacugcuacuucccacugcaguccuacggcuuucagcccacaaauggcgugggcuaucagcccuacagagugguggugcugagcuucgaacugcugcaugcuccugccacagugugcggcccuaagaaaagcaccaaucucgugaagaacaaaugcgugaacuucaacuucaacggccugaccggcaccggcgugcugacagagagcaacaagaaguuccugccauuccagcaguuuggccgggauaucgccgauaccacagacgccguuagagauccccagacacuggaaauccuggacaucaccccaugcagcuucggcggagugucugugaucaccccuggcaccaacaccagcaaucagguggcagugcuguaccaggacgugaacuguaccgaagugcccguggccauucacgccgaucagcugacaccuacauggcggguguacuccaccggcagcaauguguuucagaccagagccggcugucugaucggagccgagcacgugaacaauagcuacgagugcgacauccccaucggcgcuggcaucugugccagcuaccagacacagacaaacagccccagacgggcuagaagcguggccagccagagcaucauugccuacacaaugucucugggcgccgagaacagcguggccuacuccaacaacucuaucgcuugccccaccaacuucaccaucagcgugaccaccgagauccugccuguguccaugaccaagaccagcguggacugcaccauguacaucugcggcgauuccaccgagugcuccaaccugcugcugcaguacggcagcuucugcacccagcugaauagagcccugacagggaucgccguggaacaggacaagaacacccaagagguguucgcccaagugaagcaaaucuacaagaccccuccuaucaaggacuucggcggcuucaauuucagccagauucugcccgauccuagcaagcccagcaagcggagcuucaucgaggaccugcuguucaacaaagugacacuggccgacgccggcuucaucaagcaguauggcgauugucugggcgacauugccgccagggaucugauuugcgcccagaaguuuaacggacugacagugcugccuccucugcugaccgaugagaugaucgcccaguacacaucugcccugcuggccggcacaaucacaagcggcuggacauuuggagcuggcgccgcucugcagauccccuuugcuaugcagauggccuaccgguucaacggcaucggagugacccagaaugugcuguacgagaaccagaagcugaucgccaaccaguucaacagcgccaucggcaagauccaggacagccugagcagcacagcaagcgcccugggaaagcugcaggacguggucaaccagaaugcccaggcacugaacacccuggucaagcagcuguccuccaacuucggcgccaucagcucugugcugaacgauauccugagcagacuggacaaggucgaggccgaggugcagaucgacagacugaucacaggcagacugcagagccuccagacauacgugacccagcagcugaucagagccgccgagauuagagccucugccaaucuggccgccaccaagaugucugagugugugcugggccagagcaagagaguggacuuuugcggcaagggcuaccaccugaugagcuucccucagucugccccucacggcgugguguuucugcacgugacauaugugcccgcucaagagaagaauuucaccaccgcuccagccaucugccacgacggcaaagcccacuuuccuagagaaggcguguucguguccaacggcacccauugguucgugacacagcggaacuucugugagccccagaucaucaccaccgacaacaccuucgugucuggcaacugcgacguugugaucggcauugugaacaauaccguguacgacccucugcagcccgagcuggacagcggaggaucuggcuauauccccgaggcuccuagagauggccaggccuauguucggaaggauggcgaaugggugcugcugagcaccuuccuuuga

SEQ ID NO: 12181 - RNA, 3534 nt, Artificial Sequence
  SARS-CoV-2/Wuhan/WIV05/2019__EPI_ISL_402128 spike protein CDS gc mod (1-1147)(P715C_P1069C) Foldon construct
auguucguguuucuggugcugcugccccugguguccagccagugugugaaccugaccaccagaacacagcugccuccagccuacaccaacagcuucaccagaggcguguacuaccccgacaagguguucagauccagcgugcugcacucuacccaggaccuguuccugccuuucuucagcaacgugaccugguuccacgccauccacguguccggcaccaauggcaccaagagauucgacaaccccgugcugcccuucaacgacgggguguacuuugccagcaccgagaaguccaacaucaucagaggcuggaucuucggcaccacacuggacagcaagacccagagccugcugaucgugaacaacgccaccaacguggucaucaaagugugcgaguuccaguucugcaacgaccccuuccugggcgucuacuaccacaagaacaacaagagcuggauggaaagcgaguuccggguguacagcagcgccaacaacugcaccuucgaguacgugucccagccuuuccugauggaccuggaaggcaagcagggcaacuucaagaaccugcgcgaguucguguucaagaacaucgacggcuacuucaaaaucuacagcaagcacaccccuaucaaccucgugcgggaucugccucagggcuucucugcucuggaaccccugguggaucugcccaucggcaucaacaucacccgguuucagacacugcuggcccugcacagaagcuaccugacaccuggcgauagcagcagcggauggacagcuggugccgccgcuuacuaugugggcuaccugcagccuagaaccuuccugcugaaguacaacgagaacggcaccaucaccgacgccguggauugugcucuggauccucugagcgagacaaagugcacccugaaguccuucaccguggaaaagggcaucuaccagaccagcaacuuccgggugcagcccaccgaauccaucgugcgguuccccaauaucaccaaucugugccccuucggcgagguguucaaugccaccagauucgccucuguguacgccuggaaccggaagcggaucagcaauugcguggccgacuacuccgugcuguacaacuccgccagcuucagcaccuucaagugcuacggcguguccccuaccaagcugaacgaccugugcuucacaaacguguacgccgacagcuucgugauccggggagaugaagugcggcagauugccccuggacagacaggcaagaucgccgacuacaacuacaagcugcccgacgacuucaccggcugugugauugccuggaacagcaacaaccuggacuccaaagucggcggcaacuacaauuaccuguaccggcuguuccggaaguccaaucugaagcccuucgagcgggacaucagcaccgaaaucuaucaggccggcagcaccccuugcaacggcguggaaggcuucaacugcuacuucccacugcaguccuacggcuuucagcccacaaauggcgugggcuaucagcccuacagagugguggugcugagcuucgaacugcugcaugcuccugccacagugugcggcccuaagaaaagcaccaaucucgugaagaacaaaugcgugaacuucaacuucaacggccugaccggcaccggcgugcugacagagagcaacaagaaguuccugccauuccagcaguuuggccgggauaucgccgauaccacagacgccguuagagauccccagacacuggaaauccuggacaucaccccaugcagcuucggcggagugucugugaucaccccuggcaccaacaccagcaaucagguggcagugcuguaccaggacgugaacuguaccgaagugcccguggccauucacgccgaucagcugacaccuacauggcggguguacuccaccggcagcaauguguuucagaccagagccggcugucugaucggagccgagcacgugaacaauagcuacgagugcgacauccccaucggcgcuggcaucugugccagcuaccagacacagacaaacagccccagacgggcuagaagcguggccagccagagcaucauugccuacacaaugucucugggcgccgagaacagcguggccuacuccaacaacucuaucgcuaucugcaccaacuucaccaucagcgugaccaccgagauccugccuguguccaugaccaagaccagcguggacugcaccauguacaucugcggcgauuccaccgagugcuccaaccugcugcugcaguacggcagcuucugcacccagcugaauagagcccugacagggaucgccguggaacaggacaagaacacccaagagguguucgcccaagugaagcaaaucuacaagaccccuccuaucaaggacuucggcggcuucaauuucagccagauucugcccgauccuagcaagcccagcaagcggagcuucaucgaggaccugcuguucaacaaagugacacuggccgacgccggcuucaucaagcaguauggcgauugucugggcgacauugccgccagggaucugauuugcgcccagaaguuuaacggacugacagugcugccuccucugcugaccgaugagaugaucgcccaguacacaucugcccugcuggccggcacaaucacaagcggcuggacauuuggagcuggcgccgcucugcagauccccuuugcuaugcagauggccuaccgguucaacggcaucggagugacccagaaugugcuguacgagaaccagaagcugaucgccaaccaguucaacagcgccaucggcaagauccaggacagccugagcagcacagcaagcgcccugggaaagcugcaggacguggucaaccagaaugcccaggcacugaacacccuggucaagcagcuguccuccaacuucggcgccaucagcucugugcugaacgauauccugagcagacuggacaaggucgaggccgaggugcagaucgacagacugaucacaggcagacugcagagccuccagacauacgugacccagcagcugaucagagccgccgagauuagagccucugccaaucuggccgccaccaagaugucugagugugugcugggccagagcaagagaguggacuuuugcggcaagggcuaccaccugaugagcuucccucagucugccccucacggcgugguguuucugcacgugacauaugugugugcucaagagaagaauuucaccaccgcuccagccaucugccacgacggcaaagcccacuuuccuagagaaggcguguucguguccaacggcacccauugguucgugacacagcggaacuucuacgagccccagaucaucaccaccgacaacaccuucgugucuggcaacugcgacguugugaucggcauugugaacaauaccguguacgacccucugcagcccgagcuggacagcggaggaucuggcuauauccccgaggcuccuagagauggccaggccuauguucggaaggauggcgaaugggugcugcugagcaccuuccuuuga

SEQ ID NO: 12182 - RNA, 3534 nt, Artificial Sequence
  SARS-CoV-2/Wuhan/WIV05/2019__EPI_ISL_402128 spike protein CDS gc mod (1-1147)(G889C_L1034C) Foldon construct
auguucguguuucuggugcugcugccccugguguccagccagugugugaaccugaccaccagaacacagcugccuccagccuacaccaacagcuucaccagaggcguguacuaccccgacaagguguucagauccagcgugcugcacucuacccaggaccuguuccugccuuucuucagcaacgugaccugguuccacgccauccacguguccggcaccaauggcaccaagagauucgacaaccccgugcugcccuucaacgacgggguguacuuugccagcaccgagaaguccaacaucaucagaggcuggaucuucggcaccacacuggacagcaagacccagagccugcugaucgugaacaacgccaccaacguggucaucaaagugugcgaguuccaguucugcaacgaccccuuccugggcgucuacuaccacaagaacaacaagagcuggauggaaagcgaguuccggguguacagcagcgccaacaacugcaccuucgaguacgugucccagccuuuccugauggaccuggaaggcaagcagggcaacuucaagaaccugcgcgaguucguguucaagaacaucgacggcuacuucaaaaucuacagcaagcacaccccuaucaaccucgugcgggaucugccucagggcuucucugcucuggaaccccugguggaucugcccaucggcaucaacaucacccgguuucagacacugcuggcccugcacagaagcuaccugacaccuggcgauagcagcagcggauggacagcuggugccgccgcuuacuaugugggcuaccugcagccuagaaccuuccugcugaaguacaacgagaacggcaccaucaccgacgccguggauugugcucuggauccucugagcgagacaaagugcacccugaaguccuucaccguggaaaagggcaucuaccagaccagcaacuuccgggugcagcccaccgaauccaucgugcgguuccccaauaucaccaaucugugccccuucggcgagguguucaaugccaccagauucgccucuguguacgccuggaaccggaagcggaucagcaauugcguggccgacuacuccgugcuguacaacuccgccagcuucagcaccuucaagugcuacggcguguccccuaccaagcugaacgaccugugcuucacaaacguguacgccgacagcuucgugauccggggagaugaagugcggcagauugccccuggacagacaggcaagaucgccgacuacaacuacaagcugcccgacgacuucaccggcugugugauugccuggaacagcaacaaccuggacuccaaagucggcggcaacuacaauuaccuguaccggcuguuccggaaguccaaucugaagcccuucgagcgggacaucagcaccgaaaucuaucaggccggcagcaccccuugcaacggcguggaaggcuucaacugcuacuucccacugcaguccuacggcuuucagcccacaaauggcgugggcuaucagcccuacagagugguggugcugagcuucgaacugcugcaugcuccugccacagugugcggcccuaagaaaagcaccaaucucgugaagaacaaaugcgugaacuucaacuucaacggccugaccggcaccggcgugcugacagagagcaacaagaaguuccugccauuccagcaguuuggccgggauaucgccgauaccacagacgccguuagagauccccagacacuggaaauccuggacaucaccccaugcagcuucggcggagugucugugaucaccccuggcaccaacaccagcaaucagguggcagugcuguaccaggacgugaacuguaccgaagugcccguggccauucacgccgaucagcugacaccuacauggcggguguacuccaccggcagcaauguguuucagaccagagccggcugucugaucggagccgagcacgugaacaauagcuacgagugcgacauccccaucggcgcuggcaucugugccagcuaccagacacagacaaacagccccagacgggcuagaagcguggccagccagagcaucauugccuacacaaugucucugggcgccgagaacagcguggccuacuccaacaacucuaucgcuauccccaccaacuucaccaucagcgugaccaccgagauccugccuguguccaugaccaagaccagcguggacugcaccauguacaucugcggcgauuccaccgagugcuccaaccugcugcugcaguacggcagcuucugcacccagcugaauagagcccugacagggaucgccguggaacaggacaagaacacccaagagguguucgcccaagugaagcaaaucuacaagaccccuccuaucaaggacuucggcggcuucaauuucagccagauucugcccgauccuagcaagcccagcaagcggagcuucaucgaggaccugcuguucaacaaagugacacuggccgacgccggcuucaucaagcaguauggcgauugucugggcgacauugccgccagggaucugauuugcgcccagaaguuuaacggacugacagugcugccuccucugcugaccgaugagaugaucgcccaguacacaucugcccugcuggccggcacaaucacaagcggcuggacauuuugcgcuggcgccgcucugcagauccccuuugcuaugcagauggccuaccgguucaacggcaucggagugacccagaaugugcuguacgagaaccagaagcugaucgccaaccaguucaacagcgccaucggcaagauccaggacagccugagcagcacagcaagcgcccugggaaagcugcaggacguggucaaccagaaugcccaggcacugaacacccuggucaagcagcuguccuccaacuucggcgccaucagcucugugcugaacgauauccugagcagacuggacaaggucgaggccgaggugcagaucgacagacugaucacaggcagacugcagagccuccagacauacgugacccagcagcugaucagagccgccgagauuagagccucugccaaucuggccgccaccaagaugucugaguguguguguggccagagcaagagaguggacuuuugcggcaagggcuaccaccugaugagcuucccucagucugccccucacggcgugguguuucugcacgugacauaugugcccgcucaagagaagaauuucaccaccgcuccagccaucugccacgacggcaaagcccacuuuccuagagaaggcguguucguguccaacggcacccauugguucgugacacagcggaacuucuacgagccccagaucaucaccaccgacaacaccuucgugucuggcaacugcgacguugugaucggcauugugaacaauaccguguacgacccucugcagcccgagcuggacagcggaggaucuggcuauauccccgaggcuccuagagauggccaggccuauguucggaaggauggcgaaugggugcugcugagcaccuuccuuuga

SEQ ID NO: 12183 - RNA, 3534 nt, Artificial Sequence
  SARS-CoV-2/Wuhan/WIV05/2019__EPI_ISL_402128 spike protein CDS gc mod (1-1147)(I909C_Y1047C) Foldon construct
auguucguguuucuggugcugcugccccugguguccagccagugugugaaccugaccaccagaacacagcugccuccagccuacaccaacagcuucaccagaggcguguacuaccccgacaagguguucagauccagcgugcugcacucuacccaggaccuguuccugccuuucuucagcaacgugaccugguuccacgccauccacguguccggcaccaauggcaccaagagauucgacaaccccgugcugcccuucaacgacgggguguacuuugccagcaccgagaaguccaacaucaucagaggcuggaucuucggcaccacacuggacagcaagacccagagccugcugaucgugaacaacgccaccaacguggucaucaaagugugcgaguuccaguucugcaacgaccccuuccugggcgucuacuaccacaagaacaacaagagcuggauggaaagcgaguuccggguguacagcagcgccaacaacugcaccuucgaguacgugucccagccuuuccugauggaccuggaaggcaagcagggcaacuucaagaaccugcgcgaguucguguucaagaacaucgacggcuacuucaaaaucuacagcaagcacaccccuaucaaccucgugcgggaucugccucagggcuucucugcucuggaaccccugguggaucugcccaucggcaucaacaucacccgguuucagacacugcuggcccugcacagaagcuaccugacaccuggcgauagcagcagcggauggacagcuggugccgccgcuuacuaugugggcuaccugcagccuagaaccuuccugcugaaguacaacgagaacggcaccaucaccgacgccguggauugugcucuggauccucugagcgagacaaagugcacccugaaguccuucaccguggaaaagggcaucuaccagaccagcaacuuccgggugcagcccaccgaauccaucgugcgguuccccaauaucaccaaucugugccccuucggcgagguguucaaugccaccagauucgccucuguguacgccuggaaccggaagcggaucagcaauugcguggccgacuacuccgugcuguacaacuccgccagcuucagcaccuucaagugcuacggcguguccccuaccaagcugaacgaccugugcuucacaaacguguacgccgacagcuucgugauccggggagaugaagugcggcagauugccccuggacagacaggcaagaucgccgacuacaacuacaagcugcccgacgacuucaccggcugugugauugccuggaacagcaacaaccuggacuccaaagucggcggcaacuacaauuaccuguaccggcuguuccggaaguccaaucugaagcccuucgagcgggacaucagcaccgaaaucuaucaggccggcagcaccccuugcaacggcguggaaggcuucaacugcuacuucccacugcaguccuacggcuuucagcccacaaauggcgugggcuaucagcccuacagagugguggugcugagcuucgaacugcugcaugcuccugccacagugugcggcccuaagaaaagcaccaaucucgugaagaacaaaugcgugaacuucaacuucaacggccugaccggcaccggcgugcugacagagagcaacaagaaguuccugccauuccagcaguuuggccgggauaucgccgauaccacagacgccguuagagauccccagacacuggaaauccuggacaucaccccaugcagcuucggcggagugucugugaucaccccuggcaccaacaccagcaaucagguggcagugcuguaccaggacgugaacuguaccgaagugcccguggccauucacgccgaucagcugacaccuacauggcggguguacuccaccggcagcaauguguuucagaccagagccggcugucugaucggagccgagcacgugaacaauagcuacgagugcgacauccccaucggcgcuggcaucugugccagcuaccagacacagacaaacagccccagacgggcuagaagcguggccagccagagcaucauugccuacacaaugucucugggcgccgagaacagcguggccuacuccaacaacucuaucgcuauccccaccaacuucaccaucagcgugaccaccgagauccugccuguguccaugaccaagaccagcguggacugcaccauguacaucugcggcgauuccaccgagugcuccaaccugcugcugcaguacggcagcuucugcacccagcugaauagagcccugacagggaucgccguggaacaggacaagaacacccaagagguguucgcccaagugaagcaaaucuacaagaccccuccuaucaaggacuucggcggcuucaauuucagccagauucugcccgauccuagcaagcccagcaagcggagcuucaucgaggaccugcuguucaacaaagugacacuggccgacgccggcuucaucaagcaguauggcgauugucugggcgacauugccgccagggaucugauuugcgcccagaaguuuaacggacugacagugcugccuccucugcugaccgaugagaugaucgcccaguacacaucugcccugcuggccggcacaaucacaagcggcuggacauuuggagcuggcgccgcucugcagauccccuuugcuaugcagauggccuaccgguucaacggcugcggagugacccagaaugugcuguacgagaaccagaagcugaucgccaaccaguucaacagcgccaucggcaagauccaggacagccugagcagcacagcaagcgcccugggaaagcugcaggacguggucaaccagaaugcccaggcacugaacacccuggucaagcagcuguccuccaacuucggcgccaucagcucugugcugaacgauauccugagcagacuggacaaggucgaggccgaggugcagaucgacagacugaucacaggcagacugcagagccuccagacauacgugacccagcagcugaucagagccgccgagauuagagccucugccaaucuggccgccaccaagaugucugagugugugcugggccagagcaagagaguggacuuuugcggcaagggcugucaccugaugagcuucccucagucugccccucacggcgugguguuucugcacgugacauaugugcccgcucaagagaagaauuucaccaccgcuccagccaucugccacgacggcaaagcccacuuuccuagagaaggcguguucguguccaacggcacccauugguucgugacacagcggaacuucuacgagccccagaucaucaccaccgacaacaccuucgugucuggcaacugcgacguugugaucggcauugugaacaauaccguguacgacccucugcagcccgagcuggacagcggaggaucuggcuauauccccgaggcuccuagagauggccaggccuauguucggaaggauggcgaaugggugcugcugagcaccuuccuuuga

SEQ ID NO: 12184 - RNA, 3534 nt, Artificial Sequence
  SARS-CoV-2/Wuhan/WIV05/2019__EPI_ISL_402128 spike protein CDS gc mod (1-1147)(Q965C_S1003C) Foldon construct
auguucguguuucuggugcugcugccccugguguccagccagugugugaaccugaccaccagaacacagcugccuccagccuacaccaacagcuucaccagaggcguguacuaccccgacaagguguucagauccagcgugcugcacucuacccaggaccuguuccugccuuucuucagcaacgugaccugguuccacgccauccacguguccggcaccaauggcaccaagagauucgacaaccccgugcugcccuucaacgacgggguguacuuugccagcaccgagaaguccaacaucaucagaggcuggaucuucggcaccacacuggacagcaagacccagagccugcugaucgugaacaacgccaccaacguggucaucaaagugugcgaguuccaguucugcaacgaccccuuccugggcgucuacuaccacaagaacaacaagagcuggauggaaagcgaguuccggguguacagcagcgccaacaacugcaccuucgaguacgugucccagccuuuccugauggaccuggaaggcaagcagggcaacuucaagaaccugcgcgaguucguguucaagaacaucgacggcuacuucaaaaucuacagcaagcacaccccuaucaaccucgugcgggaucugccucagggcuucucugcucuggaaccccugguggaucugcccaucggcaucaacaucacccgguuucagacacugcuggcccugcacagaagcuaccugacaccuggcgauagcagcagcggauggacagcuggugccgccgcuuacuaugugggcuaccugcagccuagaaccuuccugcugaaguacaacgagaacggcaccaucaccgacgccguggauugugcucuggauccucugagcgagacaaagugcacccugaaguccuucaccguggaaaagggcaucuaccagaccagcaacuuccgggugcagcccaccgaauccaucgugcgguuccccaauaucaccaaucugugccccuucggcgagguguucaaugccaccagauucgccucuguguacgccuggaaccggaagcggaucagcaauugcguggccgacuacuccgugcuguacaacuccgccagcuucagcaccuucaagugcuacggcguguccccuaccaagcugaacgaccugugcuucacaaacguguacgccgacagcuucgugauccggggagaugaagugcggcagauugccccuggacagacaggcaagaucgccgacuacaacuacaagcugcccgacgacuucaccggcugugugauugccuggaacagcaacaaccuggacuccaaagucggcggcaacuacaauuaccuguaccggcuguuccggaaguccaaucugaagcccuucgagcgggacaucagcaccgaaaucuaucaggccggcagcaccccuugcaacggcguggaaggcuucaacugcuacuucccacugcaguccuacggcuuucagcccacaaauggcgugggcuaucagcccuacagagugguggugcugagcuucgaacugcugcaugcuccugccacagugugcggcccuaagaaaagcaccaaucucgugaagaacaaaugcgugaacuucaacuucaacggccugaccggcaccggcgugcugacagagagcaacaagaaguuccugccauuccagcaguuuggccgggauaucgccgauaccacagacgccguuagagauccccagacacuggaaauccuggacaucaccccaugcagcuucggcggagugucugugaucaccccuggcaccaacaccagcaaucagguggcagugcuguaccaggacgugaacuguaccgaagugcccguggccauucacgccgaucagcugacaccuacauggcggguguacuccaccggcagcaauguguuucagaccagagccggcugucugaucggagccgagcacgugaacaauagcuacgagugcgacauccccaucggcgcuggcaucugugccagcuaccagacacagacaaacagccccagacgggcuagaagcguggccagccagagcaucauugccuacacaaugucucugggcgccgagaacagcguggccuacuccaacaacucuaucgcuauccccaccaacuucaccaucagcgugaccaccgagauccugccuguguccaugaccaagaccagcguggacugcaccauguacaucugcggcgauuccaccgagugcuccaaccugcugcugcaguacggcagcuucugcacccagcugaauagagcccugacagggaucgccguggaacaggacaagaacacccaagagguguucgcccaagugaagcaaaucuacaagaccccuccuaucaaggacuucggcggcuucaauuucagccagauucugcccgauccuagcaagcccagcaagcggagcuucaucgaggaccugcuguucaacaaagugacacuggccgacgccggcuucaucaagcaguauggcgauugucugggcgacauugccgccagggaucugauuugcgcccagaaguuuaacggacugacagugcugccuccucugcugaccgaugagaugaucgcccaguacacaucugcccugcuggccggcacaaucacaagcggcuggacauuuggagcuggcgccgcucugcagauccccuuugcuaugcagauggccuaccgguucaacggcaucggagugacccagaaugugcuguacgagaaccagaagcugaucgccaaccaguucaacagcgccaucggcaagauccaggacagccugagcagcacagcaagcgcccugggaaagcugcaggacguggucaaccagaaugcccaggcacugaacacccuggucaagugccuguccuccaacuucggcgccaucagcucugugcugaacgauauccugagcagacuggacaaggucgaggccgaggugcagaucgacagacugaucacaggcagacugcagugucuccagacauacgugacccagcagcugaucagagccgccgagauuagagccucugccaaucuggccgccaccaagaugucugagugugugcugggccagagcaagagaguggacuuuugcggcaagggcuaccaccugaugagcuucccucagucugccccucacggcgugguguuucugcacgugacauaugugcccgcucaagagaagaauuucaccaccgcuccagccaucugccacgacggcaaagcccacuuuccuagagaaggcguguucguguccaacggcacccauugguucgugacacagcggaacuucuacgagccccagaucaucaccaccgacaacaccuucgugucuggcaacugcgacguugugaucggcauugugaacaauaccguguacgacccucugcagcccgagcuggacagcggaggaucuggcuauauccccgaggcuccuagagauggccaggccuauguucggaaggauggcgaaugggugcugcugagcaccuuccuuuga

SEQ ID NO: 12185 - RNA, 3534 nt, Artificial Sequence
  SARS-CoV-2/Wuhan/WIV05/2019__EPI_ISL_402128 spike protein CDS gc mod (1-1147)(F970C_G999C) Foldon construct
auguucguguuucuggugcugcugccccugguguccagccagugugugaaccugaccaccagaacacagcugccuccagccuacaccaacagcuucaccagaggcguguacuaccccgacaagguguucagauccagcgugcugcacucuacccaggaccuguuccugccuuucuucagcaacgugaccugguuccacgccauccacguguccggcaccaauggcaccaagagauucgacaaccccgugcugcccuucaacgacgggguguacuuugccagcaccgagaaguccaacaucaucagaggcuggaucuucggcaccacacuggacagcaagacccagagccugcugaucgugaacaacgccaccaacguggucaucaaagugugcgaguuccaguucugcaacgaccccuuccugggcgucuacuaccacaagaacaacaagagcuggauggaaagcgaguuccggguguacagcagcgccaacaacugcaccuucgaguacgugucccagccuuuccugauggaccuggaaggcaagcagggcaacuucaagaaccugcgcgaguucguguucaagaacaucgacggcuacuucaaaaucuacagcaagcacaccccuaucaaccucgugcgggaucugccucagggcuucucugcucuggaaccccugguggaucugcccaucggcaucaacaucacccgguuucagacacugcuggcccugcacagaagcuaccugacaccuggcgauagcagcagcggauggacagcuggugccgccgcuuacuaugugggcuaccugcagccuagaaccuuccugcugaaguacaacgagaacggcaccaucaccgacgccguggauugugcucuggauccucugagcgagacaaagugcacccugaaguccuucaccguggaaaagggcaucuaccagaccagcaacuuccgggugcagcccaccgaauccaucgugcgguuccccaauaucaccaaucugugccccuucggcgagguguucaaugccaccagauucgccucuguguacgccuggaaccggaagcggaucagcaauugcguggccgacuacuccgugcuguacaacuccgccagcuucagcaccuucaagugcuacggcguguccccuaccaagcugaacgaccugugcuucacaaacguguacgccgacagcuucgugauccggggagaugaagugcggcagauugccccuggacagacaggcaagaucgccgacuacaacuacaagcugcccgacgacuucaccggcugugugauugccuggaacagcaacaaccuggacuccaaagucggcggcaacuacaauuaccuguaccggcuguuccggaaguccaaucugaagcccuucgagcgggacaucagcaccgaaaucuaucaggccggcagcaccccuugcaacggcguggaaggcuucaacugcuacuucccacugcaguccuacggcuuucagcccacaaauggcgugggcuaucagcccuacagagugguggugcugagcuucgaacugcugcaugcuccugccacagugugcggcccuaagaaaagcaccaaucucgugaagaacaaaugcgugaacuucaacuucaacggccugaccggcaccggcgugcugacagagagcaacaagaaguuccugccauuccagcaguuuggccgggauaucgccgauaccacagacgccguuagagauccccagacacuggaaauccuggacaucaccccaugcagcuucggcggagugucugugaucaccccuggcaccaacaccagcaaucagguggcagugcuguaccaggacgugaacuguaccgaagugcccguggccauucacgccgaucagcugacaccuacauggcggguguacuccaccggcagcaauguguuucagaccagagccggcugucugaucggagccgagcacgugaacaauagcuacgagugcgacauccccaucggcgcuggcaucugugccagcuaccagacacagacaaacagccccagacgggcuagaagcguggccagccagagcaucauugccuacacaaugucucugggcgccgagaacagcguggccuacuccaacaacucuaucgcuauccccaccaacuucaccaucagcgugaccaccgagauccugccuguguccaugaccaagaccagcguggacugcaccauguacaucugcggcgauuccaccgagugcuccaaccugcugcugcaguacggcagcuucugcacccagcugaauagagcccugacagggaucgccguggaacaggacaagaacacccaagagguguucgcccaagugaagcaaaucuacaagaccccuccuaucaaggacuucggcggcuucaauuucagccagauucugcccgauccuagcaagcccagcaagcggagcuucaucgaggaccugcuguucaacaaagugacacuggccgacgccggcuucaucaagcaguauggcgauugucugggcgacauugccgccagggaucugauuugcgcccagaaguuuaacggacugacagugcugccuccucugcugaccgaugagaugaucgcccaguacacaucugcccugcuggccggcacaaucacaagcggcuggacauuuggagcuggcgccgcucugcagauccccuuugcuaugcagauggccuaccgguucaacggcaucggagugacccagaaugugcuguacgagaaccagaagcugaucgccaaccaguucaacagcgccaucggcaagauccaggacagccugagcagcacagcaagcgcccugggaaagcugcaggacguggucaaccagaaugcccaggcacugaacacccuggucaagcagcuguccuccaacugcggcgccaucagcucugugcugaacgauauccugagcagacuggacaaggucgaggccgaggugcagaucgacagacugaucacauguagacugcagagccuccagacauacgugacccagcagcugaucagagccgccgagauuagagccucugccaaucuggccgccaccaagaugucugagugugugcugggccagagcaagagaguggacuuuugcggcaagggcuaccaccugaugagcuucccucagucugccccucacggcgugguguuucugcacgugacauaugugcccgcucaagagaagaauuucaccaccgcuccagccaucugccacgacggcaaagcccacuuuccuagagaaggcguguucguguccaacggcacccauugguucgugacacagcggaacuucuacgagccccagaucaucaccaccgacaacaccuucgugucuggcaacugcgacguugugaucggcauugugaacaauaccguguacgacccucugcagcccgagcuggacagcggaggaucuggcuauauccccgaggcuccuagagauggccaggccuauguucggaaggauggcgaaugggugcugcugagcaccuuccuuuga

SEQ ID NO: 12186 - RNA, 3534 nt, Artificial Sequence
  SARS-CoV-2/Wuhan/WIV05/2019__EPI_ISL_402128 spike protein CDS gc mod (1-1147)(A972C_R995C) Foldon construct
auguucguguuucuggugcugcugccccugguguccagccagugugugaaccugaccaccagaacacagcugccuccagccuacaccaacagcuucaccagaggcguguacuaccccgacaagguguucagauccagcgugcugcacucuacccaggaccuguuccugccuuucuucagcaacgugaccugguuccacgccauccacguguccggcaccaauggcaccaagagauucgacaaccccgugcugcccuucaacgacgggguguacuuugccagcaccgagaaguccaacaucaucagaggcuggaucuucggcaccacacuggacagcaagacccagagccugcugaucgugaacaacgccaccaacguggucaucaaagugugcgaguuccaguucugcaacgaccccuuccugggcgucuacuaccacaagaacaacaagagcuggauggaaagcgaguuccggguguacagcagcgccaacaacugcaccuucgaguacgugucccagccuuuccugauggaccuggaaggcaagcagggcaacuucaagaaccugcgcgaguucguguucaagaacaucgacggcuacuucaaaaucuacagcaagcacaccccuaucaaccucgugcgggaucugccucagggcuucucugcucuggaaccccugguggaucugcccaucggcaucaacaucacccgguuucagacacugcuggcccugcacagaagcuaccugacaccuggcgauagcagcagcggauggacagcuggugccgccgcuuacuaugugggcuaccugcagccuagaaccuuccugcugaaguacaacgagaacggcaccaucaccgacgccguggauugugcucuggauccucugagcgagacaaagugcacccugaaguccuucaccguggaaaagggcaucuaccagaccagcaacuuccgggugcagcccaccgaauccaucgugcgguuccccaauaucaccaaucugugccccuucggcgagguguucaaugccaccagauucgccucuguguacgccuggaaccggaagcggaucagcaauugcguggccgacuacuccgugcuguacaacuccgccagcuucagcaccuucaagugcuacggcguguccccuaccaagcugaacgaccugugcuucacaaacguguacgccgacagcuucgugauccggggagaugaagugcggcagauugccccuggacagacaggcaagaucgccgacuacaacuacaagcugcccgacgacuucaccggcugugugauugccuggaacagcaacaaccuggacuccaaagucggcggcaacuacaauuaccuguaccggcuguuccggaaguccaaucugaagcccuucgagcgggacaucagcaccgaaaucuaucaggccggcagcaccccuugcaacggcguggaaggcuucaacugcuacuucccacugcaguccuacggcuuucagcccacaaauggcgugggcuaucagcccuacagagugguggugcugagcuucgaacugcugcaugcuccugccacagugugcggcccuaagaaaagcaccaaucucgugaagaacaaaugcgugaacuucaacuucaacggccugaccggcaccggcgugcugacagagagcaacaagaaguuccugccauuccagcaguuuggccgggauaucgccgauaccacagacgccguuagagauccccagacacuggaaauccuggacaucaccccaugcagcuucggcggagugucugugaucaccccuggcaccaacaccagcaaucagguggcagugcuguaccaggacgugaacuguaccgaagugcccguggccauucacgccgaucagcugacaccuacauggcggguguacuccaccggcagcaauguguuucagaccagagccggcugucugaucggagccgagcacgugaacaauagcuacgagugcgacauccccaucggcgcuggcaucugugccagcuaccagacacagacaaacagccccagacgggcuagaagcguggccagccagagcaucauugccuacacaaugucucugggcgccgagaacagcguggccuacuccaacaacucuaucgcuauccccaccaacuucaccaucagcgugaccaccgagauccugccuguguccaugaccaagaccagcguggacugcaccauguacaucugcggcgauuccaccgagugcuccaaccugcugcugcaguacggcagcuucugcacccagcugaauagagcccugacagggaucgccguggaacaggacaagaacacccaagagguguucgcccaagugaagcaaaucuacaagaccccuccuaucaaggacuucggcggcuucaauuucagccagauucugcccgauccuagcaagcccagcaagcggagcuucaucgaggaccugcuguucaacaaagugacacuggccgacgccggcuucaucaagcaguauggcgauugucugggcgacauugccgccagggaucugauuugcgcccagaaguuuaacggacugacagugcugccuccucugcugaccgaugagaugaucgcccaguacacaucugcccugcuggccggcacaaucacaagcggcuggacauuuggagcuggcgccgcucugcagauccccuuugcuaugcagauggccuaccgguucaacggcaucggagugacccagaaugugcuguacgagaaccagaagcugaucgccaaccaguucaacagcgccaucggcaagauccaggacagccugagcagcacagcaagcgcccugggaaagcugcaggacguggucaaccagaaugcccaggcacugaacacccuggucaagcagcuguccuccaacuucggcugcaucagcucugugcugaacgauauccugagcagacuggacaaggucgaggccgaggugcagaucgacugucugaucacaggcagacugcagagccuccagacauacgugacccagcagcugaucagagccgccgagauuagagccucugccaaucuggccgccaccaagaugucugagugugugcugggccagagcaagagaguggacuuuugcggcaagggcuaccaccugaugagcuucccucagucugccccucacggcgugguguuucugcacgugacauaugugcccgcucaagagaagaauuucaccaccgcuccagccaucugccacgacggcaaagcccacuuuccuagagaaggcguguucguguccaacggcacccauugguucgugacacagcggaacuucuacgagccccagaucaucaccaccgacaacaccuucgugucuggcaacugcgacguugugaucggcauugugaacaauaccguguacgacccucugcagcccgagcuggacagcggaggaucuggcuauauccccgaggcuccuagagauggccaggccuauguucggaaggauggcgaaugggugcugcugagcaccuuccuuuga

SEQ ID NO: 12187 - RNA, 3534 nt, Artificial Sequence
  SARS-CoV-2/Wuhan/WIV05/2019__EPI_ISL_402128 spike protein CDS gc mod (1-1147)(A890C_V1040C) Foldon construct
auguucguguuucuggugcugcugccccugguguccagccagugugugaaccugaccaccagaacacagcugccuccagccuacaccaacagcuucaccagaggcguguacuaccccgacaagguguucagauccagcgugcugcacucuacccaggaccuguuccugccuuucuucagcaacgugaccugguuccacgccauccacguguccggcaccaauggcaccaagagauucgacaaccccgugcugcccuucaacgacgggguguacuuugccagcaccgagaaguccaacaucaucagaggcuggaucuucggcaccacacuggacagcaagacccagagccugcugaucgugaacaacgccaccaacguggucaucaaagugugcgaguuccaguucugcaacgaccccuuccugggcgucuacuaccacaagaacaacaagagcuggauggaaagcgaguuccggguguacagcagcgccaacaacugcaccuucgaguacgugucccagccuuuccugauggaccuggaaggcaagcagggcaacuucaagaaccugcgcgaguucguguucaagaacaucgacggcuacuucaaaaucuacagcaagcacaccccuaucaaccucgugcgggaucugccucagggcuucucugcucuggaaccccugguggaucugcccaucggcaucaacaucacccgguuucagacacugcuggcccugcacagaagcuaccugacaccuggcgauagcagcagcggauggacagcuggugccgccgcuuacuaugugggcuaccugcagccuagaaccuuccugcugaaguacaacgagaacggcaccaucaccgacgccguggauugugcucuggauccucugagcgagacaaagugcacccugaaguccuucaccguggaaaagggcaucuaccagaccagcaacuuccgggugcagcccaccgaauccaucgugcgguuccccaauaucaccaaucugugccccuucggcgagguguucaaugccaccagauucgccucuguguacgccuggaaccggaagcggaucagcaauugcguggccgacuacuccgugcuguacaacuccgccagcuucagcaccuucaagugcuacggcguguccccuaccaagcugaacgaccugugcuucacaaacguguacgccgacagcuucgugauccggggagaugaagugcggcagauugccccuggacagacaggcaagaucgccgacuacaacuacaagcugcccgacgacuucaccggcugugugauugccuggaacagcaacaaccuggacuccaaagucggcggcaacuacaauuaccuguaccggcuguuccggaaguccaaucugaagcccuucgagcgggacaucagcaccgaaaucuaucaggccggcagcaccccuugcaacggcguggaaggcuucaacugcuacuucccacugcaguccuacggcuuucagcccacaaauggcgugggcuaucagcccuacagagugguggugcugagcuucgaacugcugcaugcuccugccacagugugcggcccuaagaaaagcaccaaucucgugaagaacaaaugcgugaacuucaacuucaacggccugaccggcaccggcgugcugacagagagcaacaagaaguuccugccauuccagcaguuuggccgggauaucgccgauaccacagacgccguuagagauccccagacacuggaaauccuggacaucaccccaugcagcuucggcggagugucugugaucaccccuggcaccaacaccagcaaucagguggcagugcuguaccaggacgugaacuguaccgaagugcccguggccauucacgccgaucagcugacaccuacauggcggguguacuccaccggcagcaauguguuucagaccagagccggcugucugaucggagccgagcacgugaacaauagcuacgagugcgacauccccaucggcgcuggcaucugugccagcuaccagacacagacaaacagccccagacgggcuagaagcguggccagccagagcaucauugccuacacaaugucucugggcgccgagaacagcguggccuacuccaacaacucuaucgcuauccccaccaacuucaccaucagcgugaccaccgagauccugccuguguccaugaccaagaccagcguggacugcaccauguacaucugcggcgauuccaccgagugcuccaaccugcugcugcaguacggcagcuucugcacccagcugaauagagcccugacagggaucgccguggaacaggacaagaacacccaagagguguucgcccaagugaagcaaaucuacaagaccccuccuaucaaggacuucggcggcuucaauuucagccagauucugcccgauccuagcaagcccagcaagcggagcuucaucgaggaccugcuguucaacaaagugacacuggccgacgccggcuucaucaagcaguauggcgauugucugggcgacauugccgccagggaucugauuugcgcccagaaguuuaacggacugacagugcugccuccucugcugaccgaugagaugaucgcccaguacacaucugcccugcuggccggcacaaucacaagcggcuggacauuuggaugcggcgccgcucugcagauccccuuugcuaugcagauggccuaccgguucaacggcaucggagugacccagaaugugcuguacgagaaccagaagcugaucgccaaccaguucaacagcgccaucggcaagauccaggacagccugagcagcacagcaagcgcccugggaaagcugcaggacguggucaaccagaaugcccaggcacugaacacccuggucaagcagcuguccuccaacuucggcgccaucagcucugugcugaacgauauccugagcagacuggacaaggucgaggccgaggugcagaucgacagacugaucacaggcagacugcagagccuccagacauacgugacccagcagcugaucagagccgccgagauuagagccucugccaaucuggccgccaccaagaugucugagugugugcugggccagagcaagagaugugacuuuugcggcaagggcuaccaccugaugagcuucccucagucugccccucacggcgugguguuucugcacgugacauaugugcccgcucaagagaagaauuucaccaccgcuccagccaucugccacgacggcaaagcccacuuuccuagagaaggcguguucguguccaacggcacccauugguucgugacacagcggaacuucuacgagccccagaucaucaccaccgacaacaccuucgugucuggcaacugcgacguugugaucggcauugugaacaauaccguguacgacccucugcagcccgagcuggacagcggaggaucuggcuauauccccgaggcuccuagagauggccaggccuauguucggaaggauggcgaaugggugcugcugagcaccuuccuuuga

SEQ ID NO: 12188 - RNA, 3534 nt, Artificial Sequence
  SARS-CoV-2/Wuhan/WIV05/2019__EPI_ISL_402128 spike protein CDS gc mod (1-1147)(T874C_S1055C) Foldon construct
auguucguguuucuggugcugcugccccugguguccagccagugugugaaccugaccaccagaacacagcugccuccagccuacaccaacagcuucaccagaggcguguacuaccccgacaagguguucagauccagcgugcugcacucuacccaggaccuguuccugccuuucuucagcaacgugaccugguuccacgccauccacguguccggcaccaauggcaccaagagauucgacaaccccgugcugcccuucaacgacgggguguacuuugccagcaccgagaaguccaacaucaucagaggcuggaucuucggcaccacacuggacagcaagacccagagccugcugaucgugaacaacgccaccaacguggucaucaaagugugcgaguuccaguucugcaacgaccccuuccugggcgucuacuaccacaagaacaacaagagcuggauggaaagcgaguuccggguguacagcagcgccaacaacugcaccuucgaguacgugucccagccuuuccugauggaccuggaaggcaagcagggcaacuucaagaaccugcgcgaguucguguucaagaacaucgacggcuacuucaaaaucuacagcaagcacaccccuaucaaccucgugcgggaucugccucagggcuucucugcucuggaaccccugguggaucugcccaucggcaucaacaucacccgguuucagacacugcuggcccugcacagaagcuaccugacaccuggcgauagcagcagcggauggacagcuggugccgccgcuuacuaugugggcuaccugcagccuagaaccuuccugcugaaguacaacgagaacggcaccaucaccgacgccguggauugugcucuggauccucugagcgagacaaagugcacccugaaguccuucaccguggaaaagggcaucuaccagaccagcaacuuccgggugcagcccaccgaauccaucgugcgguuccccaauaucaccaaucugugccccuucggcgagguguucaaugccaccagauucgccucuguguacgccuggaaccggaagcggaucagcaauugcguggccgacuacuccgugcuguacaacuccgccagcuucagcaccuucaagugcuacggcguguccccuaccaagcugaacgaccugugcuucacaaacguguacgccgacagcuucgugauccggggagaugaagugcggcagauugccccuggacagacaggcaagaucgccgacuacaacuacaagcugcccgacgacuucaccggcugugugauugccuggaacagcaacaaccuggacuccaaagucggcggcaacuacaauuaccuguaccggcuguuccggaaguccaaucugaagcccuucgagcgggacaucagcaccgaaaucuaucaggccggcagcaccccuugcaacggcguggaaggcuucaacugcuacuucccacugcaguccuacggcuuucagcccacaaauggcgugggcuaucagcccuacagagugguggugcugagcuucgaacugcugcaugcuccugccacagugugcggcccuaagaaaagcaccaaucucgugaagaacaaaugcgugaacuucaacuucaacggccugaccggcaccggcgugcugacagagagcaacaagaaguuccugccauuccagcaguuuggccgggauaucgccgauaccacagacgccguuagagauccccagacacuggaaauccuggacaucaccccaugcagcuucggcggagugucugugaucaccccuggcaccaacaccagcaaucagguggcagugcuguaccaggacgugaacuguaccgaagugcccguggccauucacgccgaucagcugacaccuacauggcggguguacuccaccggcagcaauguguuucagaccagagccggcugucugaucggagccgagcacgugaacaauagcuacgagugcgacauccccaucggcgcuggcaucugugccagcuaccagacacagacaaacagccccagacgggcuagaagcguggccagccagagcaucauugccuacacaaugucucugggcgccgagaacagcguggccuacuccaacaacucuaucgcuauccccaccaacuucaccaucagcgugaccaccgagauccugccuguguccaugaccaagaccagcguggacugcaccauguacaucugcggcgauuccaccgagugcuccaaccugcugcugcaguacggcagcuucugcacccagcugaauagagcccugacagggaucgccguggaacaggacaagaacacccaagagguguucgcccaagugaagcaaaucuacaagaccccuccuaucaaggacuucggcggcuucaauuucagccagauucugcccgauccuagcaagcccagcaagcggagcuucaucgaggaccugcuguucaacaaagugacacuggccgacgccggcuucaucaagcaguauggcgauugucugggcgacauugccgccagggaucugauuugcgcccagaaguuuaacggacugacagugcugccuccucugcugaccgaugagaugaucgcccaguacugcucugcccugcuggccggcacaaucacaagcggcuggacauuuggagcuggcgccgcucugcagauccccuuugcuaugcagauggccuaccgguucaacggcaucggagugacccagaaugugcuguacgagaaccagaagcugaucgccaaccaguucaacagcgccaucggcaagauccaggacagccugagcagcacagcaagcgcccugggaaagcugcaggacguggucaaccagaaugcccaggcacugaacacccuggucaagcagcuguccuccaacuucggcgccaucagcucugugcugaacgauauccugagcagacuggacaaggucgaggccgaggugcagaucgacagacugaucacaggcagacugcagagccuccagacauacgugacccagcagcugaucagagccgccgagauuagagccucugccaaucuggccgccaccaagaugucugagugugugcugggccagagcaagagaguggacuuuugcggcaagggcuaccaccugaugagcuucccucagugcgccccucacggcgugguguuucugcacgugacauaugugcccgcucaagagaagaauuucaccaccgcuccagccaucugccacgacggcaaagcccacuuuccuagagaaggcguguucguguccaacggcacccauugguucgugacacagcggaacuucuacgagccccagaucaucaccaccgacaacaccuucgugucuggcaacugcgacguugugaucggcauugugaacaauaccguguacgacccucugcagcccgagcuggacagcggaggaucuggcuauauccccgaggcuccuagagauggccaggccuauguucggaaggauggcgaaugggugcugcugagcaccuuccuuuga

SEQ ID NO: 12189 - RNA, 3906 nt, Artificial Sequence
  SARS-CoV-2/Wuhan/WIV05/2019__EPI_ISL_402128 spike protein CDS gc mod (1-1147) WhcAg construct
auguucguguuucuggugcugcugccccugguguccagccagugugugaaccugaccaccagaacacagcugccuccagccuacaccaacagcuucaccagaggcguguacuaccccgacaagguguucagauccagcgugcugcacucuacccaggaccuguuccugccuuucuucagcaacgugaccugguuccacgccauccacguguccggcaccaauggcaccaagagauucgacaaccccgugcugcccuucaacgacgggguguacuuugccagcaccgagaaguccaacaucaucagaggcuggaucuucggcaccacacuggacagcaagacccagagccugcugaucgugaacaacgccaccaacguggucaucaaagugugcgaguuccaguucugcaacgaccccuuccugggcgucuacuaccacaagaacaacaagagcuggauggaaagcgaguuccggguguacagcagcgccaacaacugcaccuucgaguacgugucccagccuuuccugauggaccuggaaggcaagcagggcaacuucaagaaccugcgcgaguucguguucaagaacaucgacggcuacuucaaaaucuacagcaagcacaccccuaucaaccucgugcgggaucugccucagggcuucucugcucuggaaccccugguggaucugcccaucggcaucaacaucacccgguuucagacacugcuggcccugcacagaagcuaccugacaccuggcgauagcagcagcggauggacagcuggugccgccgcuuacuaugugggcuaccugcagccuagaaccuuccugcugaaguacaacgagaacggcaccaucaccgacgccguggauugugcucuggauccucugagcgagacaaagugcacccugaaguccuucaccguggaaaagggcaucuaccagaccagcaacuuccgggugcagcccaccgaauccaucgugcgguuccccaauaucaccaaucugugccccuucggcgagguguucaaugccaccagauucgccucuguguacgccuggaaccggaagcggaucagcaauugcguggccgacuacuccgugcuguacaacuccgccagcuucagcaccuucaagugcuacggcguguccccuaccaagcugaacgaccugugcuucacaaacguguacgccgacagcuucgugauccggggagaugaagugcggcagauugccccuggacagacaggcaagaucgccgacuacaacuacaagcugcccgacgacuucaccggcugugugauugccuggaacagcaacaaccuggacuccaaagucggcggcaacuacaauuaccuguaccggcuguuccggaaguccaaucugaagcccuucgagcgggacaucagcaccgaaaucuaucaggccggcagcaccccuugcaacggcguggaaggcuucaacugcuacuucccacugcaguccuacggcuuucagcccacaaauggcgugggcuaucagcccuacagagugguggugcugagcuucgaacugcugcaugcuccugccacagugugcggcccuaagaaaagcaccaaucucgugaagaacaaaugcgugaacuucaacuucaacggccugaccggcaccggcgugcugacagagagcaacaagaaguuccugccauuccagcaguuuggccgggauaucgccgauaccacagacgccguuagagauccccagacacuggaaauccuggacaucaccccaugcagcuucggcggagugucugugaucaccccuggcaccaacaccagcaaucagguggcagugcuguaccaggacgugaacuguaccgaagugcccguggccauucacgccgaucagcugacaccuacauggcggguguacuccaccggcagcaauguguuucagaccagagccggcugucugaucggagccgagcacgugaacaauagcuacgagugcgacauccccaucggcgcuggcaucugugccagcuaccagacacagacaaacagccccagacgggcuagaagcguggccagccagagcaucauugccuacacaaugucucugggcgccgagaacagcguggccuacuccaacaacucuaucgcuauccccaccaacuucaccaucagcgugaccaccgagauccugccuguguccaugaccaagaccagcguggacugcaccauguacaucugcggcgauuccaccgagugcuccaaccugcugcugcaguacggcagcuucugcacccagcugaauagagcccugacagggaucgccguggaacaggacaagaacacccaagagguguucgcccaagugaagcaaaucuacaagaccccuccuaucaaggacuucggcggcuucaauuucagccagauucugcccgauccuagcaagcccagcaagcggagcuucaucgaggaccugcuguucaacaaagugacacuggccgacgccggcuucaucaagcaguauggcgauugucugggcgacauugccgccagggaucugauuugcgcccagaaguuuaacggacugacagugcugccuccucugcugaccgaugagaugaucgcccaguacacaucugcccugcuggccggcacaaucacaagcggcuggacauuuggagcuggcgccgcucugcagauccccuuugcuaugcagauggccuaccgguucaacggcaucggagugacccagaaugugcuguacgagaaccagaagcugaucgccaaccaguucaacagcgccaucggcaagauccaggacagccugagcagcacagcaagcgcccugggaaagcugcaggacguggucaaccagaaugcccaggcacugaacacccuggucaagcagcuguccuccaacuucggcgccaucagcucugugcugaacgauauccugagcagacuggacaaggucgaggccgaggugcagaucgacagacugaucacaggcagacugcagagccuccagacauacgugacccagcagcugaucagagccgccgagauuagagccucugccaaucuggccgccaccaagaugucugagugugugcugggccagagcaagagaguggacuuuugcggcaagggcuaccaccugaugagcuucccucagucugccccucacggcgugguguuucugcacgugacauaugugcccgcucaagagaagaauuucaccaccgcuccagccaucugccacgacggcaaagcccacuuuccuagagaaggcguguucguguccaacggcacccauugguucgugacacagcggaacuucuacgagccccagaucaucaccaccgacaacaccuucgugucuggcaacugcgacguugugaucggcauugugaacaauaccguguacgacccucugcagcccgagcuggacagcggaggcggaggaucugacaucgaccccuacaaagaguucggcagcagcuaccagcugcugaacuuccugccucuggacuucuuccccgaccugaacgcccugguggauacagccacagcucuguacgaggaagaacugaccggcagagagcacugcagcccucaccacacagccauuagacaggcccucgugugcugggacgagcugacaaaacugaucgccuggaugagcagcaacaucaccagcgagcaagugcggaccaucaucgugaaccacgugaacgauaccuggggccugaaagugcggcagagccugugguuucaccugagcugucugaccuucggccagcacaccgugcaagaguuucugguguccuucggcguguggaucagaaccccugcuccauacagaccuccaaacgcucccauccugagcacccugccugagcacacagugaucuguuga

SEQ ID NO: 12190 - RNA, 3906 nt, Artificial Sequence
  SARS-CoV-2/Wuhan/WIV05/2019__EPI_ISL_402128 spike protein CDS gc mod (1-1147)(K986P_V987P) WhcAg construct
auguucguguuucuggugcugcugccccugguguccagccagugugugaaccugaccaccagaacacagcugccuccagccuacaccaacagcuucaccagaggcguguacuaccccgacaagguguucagauccagcgugcugcacucuacccaggaccuguuccugccuuucuucagcaacgugaccugguuccacgccauccacguguccggcaccaauggcaccaagagauucgacaaccccgugcugcccuucaacgacgggguguacuuugccagcaccgagaaguccaacaucaucagaggcuggaucuucggcaccacacuggacagcaagacccagagccugcugaucgugaacaacgccaccaacguggucaucaaagugugcgaguuccaguucugcaacgaccccuuccugggcgucuacuaccacaagaacaacaagagcuggauggaaagcgaguuccggguguacagcagcgccaacaacugcaccuucgaguacgugucccagccuuuccugauggaccuggaaggcaagcagggcaacuucaagaaccugcgcgaguucguguucaagaacaucgacggcuacuucaaaaucuacagcaagcacaccccuaucaaccucgugcgggaucugccucagggcuucucugcucuggaaccccugguggaucugcccaucggcaucaacaucacccgguuucagacacugcuggcccugcacagaagcuaccugacaccuggcgauagcagcagcggauggacagcuggugccgccgcuuacuaugugggcuaccugcagccuagaaccuuccugcugaaguacaacgagaacggcaccaucaccgacgccguggauugugcucuggauccucugagcgagacaaagugcacccugaaguccuucaccguggaaaagggcaucuaccagaccagcaacuuccgggugcagcccaccgaauccaucgugcgguuccccaauaucaccaaucugugccccuucggcgagguguucaaugccaccagauucgccucuguguacgccuggaaccggaagcggaucagcaauugcguggccgacuacuccgugcuguacaacuccgccagcuucagcaccuucaagugcuacggcguguccccuaccaagcugaacgaccugugcuucacaaacguguacgccgacagcuucgugauccggggagaugaagugcggcagauugccccuggacagacaggcaagaucgccgacuacaacuacaagcugcccgacgacuucaccggcugugugauugccuggaacagcaacaaccuggacuccaaagucggcggcaacuacaauuaccuguaccggcuguuccggaaguccaaucugaagcccuucgagcgggacaucagcaccgaaaucuaucaggccggcagcaccccuugcaacggcguggaaggcuucaacugcuacuucccacugcaguccuacggcuuucagcccacaaauggcgugggcuaucagcccuacagagugguggugcugagcuucgaacugcugcaugcuccugccacagugugcggcccuaagaaaagcaccaaucucgugaagaacaaaugcgugaacuucaacuucaacggccugaccggcaccggcgugcugacagagagcaacaagaaguuccugccauuccagcaguuuggccgggauaucgccgauaccacagacgccguuagagauccccagacacuggaaauccuggacaucaccccaugcagcuucggcggagugucugugaucaccccuggcaccaacaccagcaaucagguggcagugcuguaccaggacgugaacuguaccgaagugcccguggccauucacgccgaucagcugacaccuacauggcggguguacuccaccggcagcaauguguuucagaccagagccggcugucugaucggagccgagcacgugaacaauagcuacgagugcgacauccccaucggcgcuggcaucugugccagcuaccagacacagacaaacagccccagacgggcuagaagcguggccagccagagcaucauugccuacacaaugucucugggcgccgagaacagcguggccuacuccaacaacucuaucgcuauccccaccaacuucaccaucagcgugaccaccgagauccugccuguguccaugaccaagaccagcguggacugcaccauguacaucugcggcgauuccaccgagugcuccaaccugcugcugcaguacggcagcuucugcacccagcugaauagagcccugacagggaucgccguggaacaggacaagaacacccaagagguguucgcccaagugaagcaaaucuacaagaccccuccuaucaaggacuucggcggcuucaauuucagccagauucugcccgauccuagcaagcccagcaagcggagcuucaucgaggaccugcuguucaacaaagugacacuggccgacgccggcuucaucaagcaguauggcgauugucugggcgacauugccgccagggaucugauuugcgcccagaaguuuaacggacugacagugcugccuccucugcugaccgaugagaugaucgcccaguacacaucugcccugcuggccggcacaaucacaagcggcuggacauuuggagcuggcgccgcucugcagauccccuuugcuaugcagauggccuaccgguucaacggcaucggagugacccagaaugugcuguacgagaaccagaagcugaucgccaaccaguucaacagcgccaucggcaagauccaggacagccugagcagcacagcaagcgcccugggaaagcugcaggacguggucaaccagaaugcccaggcacugaacacccuggucaagcagcuguccuccaacuucggcgccaucagcucugugcugaacgauauccugagcagacuggacccuccugaggccgaggugcagaucgacagacugaucacaggcagacugcagagccuccagacauacgugacccagcagcugaucagagccgccgagauuagagccucugccaaucuggccgccaccaagaugucugagugugugcugggccagagcaagagaguggacuuuugcggcaagggcuaccaccugaugagcuucccucagucugccccucacggcgugguguuucugcacgugacauaugugcccgcucaagagaagaauuucaccaccgcuccagccaucugccacgacggcaaagcccacuuuccuagagaaggcguguucguguccaacggcacccauugguucgugacacagcggaacuucuacgagccccagaucaucaccaccgacaacaccuucgugucuggcaacugcgacguugugaucggcauugugaacaauaccguguacgacccucugcagcccgagcuggacagcggaggcggaggaucugacaucgaccccuacaaagaguucggcagcagcuaccagcugcugaacuuccugccucuggacuucuuccccgaccugaacgcccugguggauacagccacagcucuguacgaggaagaacugaccggcagagagcacugcagcccucaccacacagccauuagacaggcccucgugugcugggacgagcugacaaaacugaucgccuggaugagcagcaacaucaccagcgagcaagugcggaccaucaucgugaaccacgugaacgauaccuggggccugaaagugcggcagagccugugguuucaccugagcugucugaccuucggccagcacaccgugcaagaguuucugguguccuucggcguguggaucagaaccccugcuccauacagaccuccaaacgcucccauccugagcacccugccugagcacacagugaucuguuga

SEQ ID NO: 12191 - RNA, 3906 nt, Artificial Sequence
  SARS-CoV-2/Wuhan/WIV05/2019__EPI_ISL_402128 spike protein CDS gc mod (1-1147)(K986P_V987P_T887WN_A1020W) WhcAg construct
auguucguguuucuggugcugcugccccugguguccagccagugugugaaccugaccaccagaacacagcugccuccagccuacaccaacagcuucaccagaggcguguacuaccccgacaagguguucagauccagcgugcugcacucuacccaggaccuguuccugccuuucuucagcaacgugaccugguuccacgccauccacguguccggcaccaauggcaccaagagauucgacaaccccgugcugcccuucaacgacgggguguacuuugccagcaccgagaaguccaacaucaucagaggcuggaucuucggcaccacacuggacagcaagacccagagccugcugaucgugaacaacgccaccaacguggucaucaaagugugcgaguuccaguucugcaacgaccccuuccugggcgucuacuaccacaagaacaacaagagcuggauggaaagcgaguuccggguguacagcagcgccaacaacugcaccuucgaguacgugucccagccuuuccugauggaccuggaaggcaagcagggcaacuucaagaaccugcgcgaguucguguucaagaacaucgacggcuacuucaaaaucuacagcaagcacaccccuaucaaccucgugcgggaucugccucagggcuucucugcucuggaaccccugguggaucugcccaucggcaucaacaucacccgguuucagacacugcuggcccugcacagaagcuaccugacaccuggcgauagcagcagcggauggacagcuggugccgccgcuuacuaugugggcuaccugcagccuagaaccuuccugcugaaguacaacgagaacggcaccaucaccgacgccguggauugugcucuggauccucugagcgagacaaagugcacccugaaguccuucaccguggaaaagggcaucuaccagaccagcaacuuccgggugcagcccaccgaauccaucgugcgguuccccaauaucaccaaucugugccccuucggcgagguguucaaugccaccagauucgccucuguguacgccuggaaccggaagcggaucagcaauugcguggccgacuacuccgugcuguacaacuccgccagcuucagcaccuucaagugcuacggcguguccccuaccaagcugaacgaccugugcuucacaaacguguacgccgacagcuucgugauccggggagaugaagugcggcagauugccccuggacagacaggcaagaucgccgacuacaacuacaagcugcccgacgacuucaccggcugugugauugccuggaacagcaacaaccuggacuccaaagucggcggcaacuacaauuaccuguaccggcuguuccggaaguccaaucugaagcccuucgagcgggacaucagcaccgaaaucuaucaggccggcagcaccccuugcaacggcguggaaggcuucaacugcuacuucccacugcaguccuacggcuuucagcccacaaauggcgugggcuaucagcccuacagagugguggugcugagcuucgaacugcugcaugcuccugccacagugugcggcccuaagaaaagcaccaaucucgugaagaacaaaugcgugaacuucaacuucaacggccugaccggcaccggcgugcugacagagagcaacaagaaguuccugccauuccagcaguuuggccgggauaucgccgauaccacagacgccguuagagauccccagacacuggaaauccuggacaucaccccaugcagcuucggcggagugucugugaucaccccuggcaccaacaccagcaaucagguggcagugcuguaccaggacgugaacuguaccgaagugcccguggccauucacgccgaucagcugacaccuacauggcggguguacuccaccggcagcaauguguuucagaccagagccggcugucugaucggagccgagcacgugaacaauagcuacgagugcgacauccccaucggcgcuggcaucugugccagcuaccagacacagacaaacagccccagacgggcuagaagcguggccagccagagcaucauugccuacacaaugucucugggcgccgagaacagcguggccuacuccaacaacucuaucgcuauccccaccaacuucaccaucagcgugaccaccgagauccugccuguguccaugaccaagaccagcguggacugcaccauguacaucugcggcgauuccaccgagugcuccaaccugcugcugcaguacggcagcuucugcacccagcugaauagagcccugacagggaucgccguggaacaggacaagaacacccaagagguguucgcccaagugaagcaaaucuacaagaccccuccuaucaaggacuucggcggcuucaauuucagccagauucugcccgauccuagcaagcccagcaagcggagcuucaucgaggaccugcuguucaacaaagugacacuggccgacgccggcuucaucaagcaguauggcgauugucugggcgacauugccgccagggaucugauuugcgcccagaaguuuaacggacugacagugcugccuccucugcugaccgaugagaugaucgcccaguacacaucugcccugcuggccggcacaaucacaagcggcuggugguuuggagcuggcgccgcucugcagauccccuuugcuaugcagauggccuaccgguucaacggcaucggagugacccagaaugugcuguacgagaaccagaagcugaucgccaaccaguucaacagcgccaucggcaagauccaggacagccugagcagcacagcaagcgcccugggaaagcugcaggacguggucaaccagaaugcccaggcacugaacacccuggucaagcagcuguccuccaacuucggcgccaucagcucugugcugaacgauauccugagcagacuggacccuccugaggccgaggugcagaucgacagacugaucacaggcagacugcagagccuccagacauacgugacccagcagcugaucagagccgccgagauuagauggucugccaaucuggccgccaccaagaugucugagugugugcugggccagagcaagagaguggacuuuugcggcaagggcuaccaccugaugagcuucccucagucugccccucacggcgugguguuucugcacgugacauaugugcccgcucaagagaagaauuucaccaccgcuccagccaucugccacgacggcaaagcccacuuuccuagagaaggcguguucguguccaacggcacccauugguucgugacacagcggaacuucuacgagccccagaucaucaccaccgacaacaccuucgugucuggcaacugcgacguugugaucggcauugugaacaauaccguguacgacccucugcagcccgagcuggacagcggaggcggaggaucugacaucgaccccuacaaagaguucggcagcagcuaccagcugcugaacuuccugccucuggacuucuuccccgaccugaacgcccugguggauacagccacagcucuguacgaggaagaacugaccggcagagagcacugcagcccucaccacacagccauuagacaggcccucgugugcugggacgagcugacaaaacugaucgccuggaugagcagcaacaucaccagcgagcaagugcggaccaucaucgugaaccacgugaacgauaccuggggccugaaagugcggcagagccugugguuucaccugagcugucugaccuucggccagcacaccgugcaagaguuucugguguccuucggcguguggaucagaaccccugcuccauacagaccuccaaacgcucccauccugagcacccugccugagcacacagugaucuguuga

SEQ ID NO: 12192 - RNA, 3906 nt, Artificial Sequence
  SARS-CoV-2/Wuhan/WIV05/2019__EPI_ISL_402128 spike protein CDS gc mod (1-1147)(K986P_V987P_P1069F) WhcAg construct
auguucguguuucuggugcugcugccccugguguccagccagugugugaaccugaccaccagaacacagcugccuccagccuacaccaacagcuucaccagaggcguguacuaccccgacaagguguucagauccagcgugcugcacucuacccaggaccuguuccugccuuucuucagcaacgugaccugguuccacgccauccacguguccggcaccaauggcaccaagagauucgacaaccccgugcugcccuucaacgacgggguguacuuugccagcaccgagaaguccaacaucaucagaggcuggaucuucggcaccacacuggacagcaagacccagagccugcugaucgugaacaacgccaccaacguggucaucaaagugugcgaguuccaguucugcaacgaccccuuccugggcgucuacuaccacaagaacaacaagagcuggauggaaagcgaguuccggguguacagcagcgccaacaacugcaccuucgaguacgugucccagccuuuccugauggaccuggaaggcaagcagggcaacuucaagaaccugcgcgaguucguguucaagaacaucgacggcuacuucaaaaucuacagcaagcacaccccuaucaaccucgugcgggaucugccucagggcuucucugcucuggaaccccugguggaucugcccaucggcaucaacaucacccgguuucagacacugcuggcccugcacagaagcuaccugacaccuggcgauagcagcagcggauggacagcuggugccgccgcuuacuaugugggcuaccugcagccuagaaccuuccugcugaaguacaacgagaacggcaccaucaccgacgccguggauugugcucuggauccucugagcgagacaaagugcacccugaaguccuucaccguggaaaagggcaucuaccagaccagcaacuuccgggugcagcccaccgaauccaucgugcgguuccccaauaucaccaaucugugccccuucggcgagguguucaaugccaccagauucgccucuguguacgccuggaaccggaagcggaucagcaauugcguggccgacuacuccgugcuguacaacuccgccagcuucagcaccuucaagugcuacggcguguccccuaccaagcugaacgaccugugcuucacaaacguguacgccgacagcuucgugauccggggagaugaagugcggcagauugccccuggacagacaggcaagaucgccgacuacaacuacaagcugcccgacgacuucaccggcugugugauugccuggaacagcaacaaccuggacuccaaagucggcggcaacuacaauuaccuguaccggcuguuccggaaguccaaucugaagcccuucgagcgggacaucagcaccgaaaucuaucaggccggcagcaccccuugcaacggcguggaaggcuucaacugcuacuucccacugcaguccuacggcuuucagcccacaaauggcgugggcuaucagcccuacagagugguggugcugagcuucgaacugcugcaugcuccugccacagugugcggcccuaagaaaagcaccaaucucgugaagaacaaaugcgugaacuucaacuucaacggccugaccggcaccggcgugcugacagagagcaacaagaaguuccugccauuccagcaguuuggccgggauaucgccgauaccacagacgccguuagagauccccagacacuggaaauccuggacaucaccccaugcagcuucggcggagugucugugaucaccccuggcaccaacaccagcaaucagguggcagugcuguaccaggacgugaacuguaccgaagugcccguggccauucacgccgaucagcugacaccuacauggcggguguacuccaccggcagcaauguguuucagaccagagccggcugucugaucggagccgagcacgugaacaauagcuacgagugcgacauccccaucggcgcuggcaucugugccagcuaccagacacagacaaacagccccagacgggcuagaagcguggccagccagagcaucauugccuacacaaugucucugggcgccgagaacagcguggccuacuccaacaacucuaucgcuauccccaccaacuucaccaucagcgugaccaccgagauccugccuguguccaugaccaagaccagcguggacugcaccauguacaucugcggcgauuccaccgagugcuccaaccugcugcugcaguacggcagcuucugcacccagcugaauagagcccugacagggaucgccguggaacaggacaagaacacccaagagguguucgcccaagugaagcaaaucuacaagaccccuccuaucaaggacuucggcggcuucaauuucagccagauucugcccgauccuagcaagcccagcaagcggagcuucaucgaggaccugcuguucaacaaagugacacuggccgacgccggcuucaucaagcaguauggcgauugucugggcgacauugccgccagggaucugauuugcgcccagaaguuuaacggacugacagugcugccuccucugcugaccgaugagaugaucgcccaguacacaucugcccugcuggccggcacaaucacaagcggcuggacauuuggagcuggcgccgcucugcagauccccuuugcuaugcagauggccuaccgguucaacggcaucggagugacccagaaugugcuguacgagaaccagaagcugaucgccaaccaguucaacagcgccaucggcaagauccaggacagccugagcagcacagcaagcgcccugggaaagcugcaggacguggucaaccagaaugcccaggcacugaacacccuggucaagcagcuguccuccaacuucggcgccaucagcucugugcugaacgauauccugagcagacuggacccuccugaggccgaggugcagaucgacagacugaucacaggcagacugcagagccuccagacauacgugacccagcagcugaucagagccgccgagauuagagccucugccaaucuggccgccaccaagaugucugagugugugcugggccagagcaagagaguggacuuuugcggcaagggcuaccaccugaugagcuucccucagucugccccucacggcgugguguuucugcacgugacauauguguucgcucaagagaagaauuucaccaccgcuccagccaucugccacgacggcaaagcccacuuuccuagagaaggcguguucguguccaacggcacccauugguucgugacacagcggaacuucuacgagccccagaucaucaccaccgacaacaccuucgugucuggcaacugcgacguugugaucggcauugugaacaauaccguguacgacccucugcagcccgagcuggacagcggaggcggaggaucugacaucgaccccuacaaagaguucggcagcagcuaccagcugcugaacuuccugccucuggacuucuuccccgaccugaacgcccugguggauacagccacagcucuguacgaggaagaacugaccggcagagagcacugcagcccucaccacacagccauuagacaggcccucgugugcugggacgagcugacaaaacugaucgccuggaugagcagcaacaucaccagcgagcaagugcggaccaucaucgugaaccacgugaacgauaccuggggccugaaagugcggcagagccugugguuucaccugagcugucugaccuucggccagcacaccgugcaagaguuucugguguccuucggcguguggaucagaaccccugcuccauacagaccuccaaacgcucccauccugagcacccugccugagcacacagugaucuguuga

SEQ ID NO: 12193 - RNA, 3906 nt, Artificial Sequence
  SARS-CoV-2/Wuhan/WIV05/2019__EPI_ISL_402128 spike protein CDS gc mod (1-1147)(K986P_V987P_ H1048Q_H1064N_ H1083N_H1101N) WhcAg construct
auguucguguuucuggugcugcugccccugguguccagccagugugugaaccugaccaccagaacacagcugccuccagccuacaccaacagcuucaccagaggcguguacuaccccgacaagguguucagauccagcgugcugcacucuacccaggaccuguuccugccuuucuucagcaacgugaccugguuccacgccauccacguguccggcaccaauggcaccaagagauucgacaaccccgugcugcccuucaacgacgggguguacuuugccagcaccgagaaguccaacaucaucagaggcuggaucuucggcaccacacuggacagcaagacccagagccugcugaucgugaacaacgccaccaacguggucaucaaagugugcgaguuccaguucugcaacgaccccuuccugggcgucuacuaccacaagaacaacaagagcuggauggaaagcgaguuccggguguacagcagcgccaacaacugcaccuucgaguacgugucccagccuuuccugauggaccuggaaggcaagcagggcaacuucaagaaccugcgcgaguucguguucaagaacaucgacggcuacuucaaaaucuacagcaagcacaccccuaucaaccucgugcgggaucugccucagggcuucucugcucuggaaccccugguggaucugcccaucggcaucaacaucacccgguuucagacacugcuggcccugcacagaagcuaccugacaccuggcgauagcagcagcggauggacagcuggugccgccgcuuacuaugugggcuaccugcagccuagaaccuuccugcugaaguacaacgagaacggcaccaucaccgacgccguggauugugcucuggauccucugagcgagacaaagugcacccugaaguccuucaccguggaaaagggcaucuaccagaccagcaacuuccgggugcagcccaccgaauccaucgugcgguuccccaauaucaccaaucugugccccuucggcgagguguucaaugccaccagauucgccucuguguacgccuggaaccggaagcggaucagcaauugcguggccgacuacuccgugcuguacaacuccgccagcuucagcaccuucaagugcuacggcguguccccuaccaagcugaacgaccugugcuucacaaacguguacgccgacagcuucgugauccggggagaugaagugcggcagauugccccuggacagacaggcaagaucgccgacuacaacuacaagcugcccgacgacuucaccggcugugugauugccuggaacagcaacaaccuggacuccaaagucggcggcaacuacaauuaccuguaccggcuguuccggaaguccaaucugaagcccuucgagcgggacaucagcaccgaaaucuaucaggccggcagcaccccuugcaacggcguggaaggcuucaacugcuacuucccacugcaguccuacggcuuucagcccacaaauggcgugggcuaucagcccuacagagugguggugcugagcuucgaacugcugcaugcuccugccacagugugcggcccuaagaaaagcaccaaucucgugaagaacaaaugcgugaacuucaacuucaacggccugaccggcaccggcgugcugacagagagcaacaagaaguuccugccauuccagcaguuuggccgggauaucgccgauaccacagacgccguuagagauccccagacacuggaaauccuggacaucaccccaugcagcuucggcggagugucugugaucaccccuggcaccaacaccagcaaucagguggcagugcuguaccaggacgugaacuguaccgaagugcccguggccauucacgccgaucagcugacaccuacauggcggguguacuccaccggcagcaauguguuucagaccagagccggcugucugaucggagccgagcacgugaacaauagcuacgagugcgacauccccaucggcgcuggcaucugugccagcuaccagacacagacaaacagccccagacgggcuagaagcguggccagccagagcaucauugccuacacaaugucucugggcgccgagaacagcguggccuacuccaacaacucuaucgcuauccccaccaacuucaccaucagcgugaccaccgagauccugccuguguccaugaccaagaccagcguggacugcaccauguacaucugcggcgauuccaccgagugcuccaaccugcugcugcaguacggcagcuucugcacccagcugaauagagcccugacagggaucgccguggaacaggacaagaacacccaagagguguucgcccaagugaagcaaaucuacaagaccccuccuaucaaggacuucggcggcuucaauuucagccagauucugcccgauccuagcaagcccagcaagcggagcuucaucgaggaccugcuguucaacaaagugacacuggccgacgccggcuucaucaagcaguauggcgauugucugggcgacauugccgccagggaucugauuugcgcccagaaguuuaacggacugacagugcugccuccucugcugaccgaugagaugaucgcccaguacacaucugcccugcuggccggcacaaucacaagcggcuggacauuuggagcuggcgccgcucugcagauccccuuugcuaugcagauggccuaccgguucaacggcaucggagugacccagaaugugcuguacgagaaccagaagcugaucgccaaccaguucaacagcgccaucggcaagauccaggacagccugagcagcacagcaagcgcccugggaaagcugcaggacguggucaaccagaaugcccaggcacugaacacccuggucaagcagcuguccuccaacuucggcgccaucagcucugugcugaacgauauccugagcagacuggacccuccugaggccgaggugcagaucgacagacugaucacaggcagacugcagagccuccagacauacgugacccagcagcugaucagagccgccgagauuagagccucugccaaucuggccgccaccaagaugucugagugugugcugggccagagcaagagaguggacuuuugcggcaagggcuaccagcugaugagcuucccucagucugccccucacggcgugguguuucugaacgugacauaugugcccgcucaagagaagaauuucaccaccgcuccagccaucugcaacgacggcaaagcccacuuuccuagagaaggcguguucguguccaacggcaccaacugguucgugacacagcggaacuucuacgagccccagaucaucaccaccgacaacaccuucgugucuggcaacugcgacguugugaucggcauugugaacaauaccguguacgacccucugcagcccgagcuggacagcggaggcggaggaucugacaucgaccccuacaaagaguucggcagcagcuaccagcugcugaacuuccugccucuggacuucuuccccgaccugaacgcccugguggauacagccacagcucuguacgaggaagaacugaccggcagagagcacugcagcccucaccacacagccauuagacaggcccucgugugcugggacgagcugacaaaacugaucgccuggaugagcagcaacaucaccagcgagcaagugcggaccaucaucgugaaccacgugaacgauaccuggggccugaaagugcggcagagccugugguuucaccugagcugucugaccuucggccagcacaccgugcaagaguuucugguguccuucggcguguggaucagaaccccugcuccauacagaccuccaaacgcucccauccugagcacccugccugagcacacagugaucuguuga

SEQ ID NO: 12194 - RNA, 3906 nt, Artificial Sequence
  SARS-CoV-2/Wuhan/WIV05/2019__EPI_ISL_402128 spike protein CDS gc mod (1-1147)(I712C_T1077C) WhcAg construct
auguucguguuucuggugcugcugccccugguguccagccagugugugaaccugaccaccagaacacagcugccuccagccuacaccaacagcuucaccagaggcguguacuaccccgacaagguguucagauccagcgugcugcacucuacccaggaccuguuccugccuuucuucagcaacgugaccugguuccacgccauccacguguccggcaccaauggcaccaagagauucgacaaccccgugcugcccuucaacgacgggguguacuuugccagcaccgagaaguccaacaucaucagaggcuggaucuucggcaccacacuggacagcaagacccagagccugcugaucgugaacaacgccaccaacguggucaucaaagugugcgaguuccaguucugcaacgaccccuuccugggcgucuacuaccacaagaacaacaagagcuggauggaaagcgaguuccggguguacagcagcgccaacaacugcaccuucgaguacgugucccagccuuuccugauggaccuggaaggcaagcagggcaacuucaagaaccugcgcgaguucguguucaagaacaucgacggcuacuucaaaaucuacagcaagcacaccccuaucaaccucgugcgggaucugccucagggcuucucugcucuggaaccccugguggaucugcccaucggcaucaacaucacccgguuucagacacugcuggcccugcacagaagcuaccugacaccuggcgauagcagcagcggauggacagcuggugccgccgcuuacuaugugggcuaccugcagccuagaaccuuccugcugaaguacaacgagaacggcaccaucaccgacgccguggauugugcucuggauccucugagcgagacaaagugcacccugaaguccuucaccguggaaaagggcaucuaccagaccagcaacuuccgggugcagcccaccgaauccaucgugcgguuccccaauaucaccaaucugugccccuucggcgagguguucaaugccaccagauucgccucuguguacgccuggaaccggaagcggaucagcaauugcguggccgacuacuccgugcuguacaacuccgccagcuucagcaccuucaagugcuacggcguguccccuaccaagcugaacgaccugugcuucacaaacguguacgccgacagcuucgugauccggggagaugaagugcggcagauugccccuggacagacaggcaagaucgccgacuacaacuacaagcugcccgacgacuucaccggcugugugauugccuggaacagcaacaaccuggacuccaaagucggcggcaacuacaauuaccuguaccggcuguuccggaaguccaaucugaagcccuucgagcgggacaucagcaccgaaaucuaucaggccggcagcaccccuugcaacggcguggaaggcuucaacugcuacuucccacugcaguccuacggcuuucagcccacaaauggcgugggcuaucagcccuacagagugguggugcugagcuucgaacugcugcaugcuccugccacagugugcggcccuaagaaaagcaccaaucucgugaagaacaaaugcgugaacuucaacuucaacggccugaccggcaccggcgugcugacagagagcaacaagaaguuccugccauuccagcaguuuggccgggauaucgccgauaccacagacgccguuagagauccccagacacuggaaauccuggacaucaccccaugcagcuucggcggagugucugugaucaccccuggcaccaacaccagcaaucagguggcagugcuguaccaggacgugaacuguaccgaagugcccguggccauucacgccgaucagcugacaccuacauggcggguguacuccaccggcagcaauguguuucagaccagagccggcugucugaucggagccgagcacgugaacaauagcuacgagugcgacauccccaucggcgcuggcaucugugccagcuaccagacacagacaaacagccccagacgggcuagaagcguggccagccagagcaucauugccuacacaaugucucugggcgccgagaacagcguggccuacuccaacaacucuugcgcuauccccaccaacuucaccaucagcgugaccaccgagauccugccuguguccaugaccaagaccagcguggacugcaccauguacaucugcggcgauuccaccgagugcuccaaccugcugcugcaguacggcagcuucugcacccagcugaauagagcccugacagggaucgccguggaacaggacaagaacacccaagagguguucgcccaagugaagcaaaucuacaagaccccuccuaucaaggacuucggcggcuucaauuucagccagauucugcccgauccuagcaagcccagcaagcggagcuucaucgaggaccugcuguucaacaaagugacacuggccgacgccggcuucaucaagcaguauggcgauugucugggcgacauugccgccagggaucugauuugcgcccagaaguuuaacggacugacagugcugccuccucugcugaccgaugagaugaucgcccaguacacaucugcccugcuggccggcacaaucacaagcggcuggacauuuggagcuggcgccgcucugcagauccccuuugcuaugcagauggccuaccgguucaacggcaucggagugacccagaaugugcuguacgagaaccagaagcugaucgccaaccaguucaacagcgccaucggcaagauccaggacagccugagcagcacagcaagcgcccugggaaagcugcaggacguggucaaccagaaugcccaggcacugaacacccuggucaagcagcuguccuccaacuucggcgccaucagcucugugcugaacgauauccugagcagacuggacaaggucgaggccgaggugcagaucgacagacugaucacaggcagacugcagagccuccagacauacgugacccagcagcugaucagagccgccgagauuagagccucugccaaucuggccgccaccaagaugucugagugugugcugggccagagcaagagaguggacuuuugcggcaagggcuaccaccugaugagcuucccucagucugccccucacggcgugguguuucugcacgugacauaugugcccgcucaagagaagaauuucaccugugcuccagccaucugccacgacggcaaagcccacuuuccuagagaaggcguguucguguccaacggcacccauugguucgugacacagcggaacuucuacgagccccagaucaucaccaccgacaacaccuucgugucuggcaacugcgacguugugaucggcauugugaacaauaccguguacgacccucugcagcccgagcuggacagcggaggcggaggaucugacaucgaccccuacaaagaguucggcagcagcuaccagcugcugaacuuccugccucuggacuucuuccccgaccugaacgcccugguggauacagccacagcucuguacgaggaagaacugaccggcagagagcacugcagcccucaccacacagccauuagacaggcccucgugugcugggacgagcugacaaaacugaucgccuggaugagcagcaacaucaccagcgagcaagugcggaccaucaucgugaaccacgugaacgauaccuggggccugaaagugcggcagagccugugguuucaccugagcugucugaccuucggccagcacaccgugcaagaguuucugguguccuucggcguguggaucagaaccccugcuccauacagaccuccaaacgcucccauccugagcacccugccugagcacacagugaucuguuga

SEQ ID NO: 12195 - RNA, 3906 nt, Artificial Sequence
  SARS-CoV-2/Wuhan/WIV05/2019__EPI_ISL_402128 spike protein CDS gc mod (1-1147)(I714C_Y1110C) WhcAg construct
auguucguguuucuggugcugcugccccugguguccagccagugugugaaccugaccaccagaacacagcugccuccagccuacaccaacagcuucaccagaggcguguacuaccccgacaagguguucagauccagcgugcugcacucuacccaggaccuguuccugccuuucuucagcaacgugaccugguuccacgccauccacguguccggcaccaauggcaccaagagauucgacaaccccgugcugcccuucaacgacgggguguacuuugccagcaccgagaaguccaacaucaucagaggcuggaucuucggcaccacacuggacagcaagacccagagccugcugaucgugaacaacgccaccaacguggucaucaaagugugcgaguuccaguucugcaacgaccccuuccugggcgucuacuaccacaagaacaacaagagcuggauggaaagcgaguuccggguguacagcagcgccaacaacugcaccuucgaguacgugucccagccuuuccugauggaccuggaaggcaagcagggcaacuucaagaaccugcgcgaguucguguucaagaacaucgacggcuacuucaaaaucuacagcaagcacaccccuaucaaccucgugcgggaucugccucagggcuucucugcucuggaaccccugguggaucugcccaucggcaucaacaucacccgguuucagacacugcuggcccugcacagaagcuaccugacaccuggcgauagcagcagcggauggacagcuggugccgccgcuuacuaugugggcuaccugcagccuagaaccuuccugcugaaguacaacgagaacggcaccaucaccgacgccguggauugugcucuggauccucugagcgagacaaagugcacccugaaguccuucaccguggaaaagggcaucuaccagaccagcaacuuccgggugcagcccaccgaauccaucgugcgguuccccaauaucaccaaucugugccccuucggcgagguguucaaugccaccagauucgccucuguguacgccuggaaccggaagcggaucagcaauugcguggccgacuacuccgugcuguacaacuccgccagcuucagcaccuucaagugcuacggcguguccccuaccaagcugaacgaccugugcuucacaaacguguacgccgacagcuucgugauccggggagaugaagugcggcagauugccccuggacagacaggcaagaucgccgacuacaacuacaagcugcccgacgacuucaccggcugugugauugccuggaacagcaacaaccuggacuccaaagucggcggcaacuacaauuaccuguaccggcuguuccggaaguccaaucugaagcccuucgagcgggacaucagcaccgaaaucuaucaggccggcagcaccccuugcaacggcguggaaggcuucaacugcuacuucccacugcaguccuacggcuuucagcccacaaauggcgugggcuaucagcccuacagagugguggugcugagcuucgaacugcugcaugcuccugccacagugugcggcccuaagaaaagcaccaaucucgugaagaacaaaugcgugaacuucaacuucaacggccugaccggcaccggcgugcugacagagagcaacaagaaguuccugccauuccagcaguuuggccgggauaucgccgauaccacagacgccguuagagauccccagacacuggaaauccuggacaucaccccaugcagcuucggcggagugucugugaucaccccuggcaccaacaccagcaaucagguggcagugcuguaccaggacgugaacuguaccgaagugcccguggccauucacgccgaucagcugacaccuacauggcggguguacuccaccggcagcaauguguuucagaccagagccggcugucugaucggagccgagcacgugaacaauagcuacgagugcgacauccccaucggcgcuggcaucugugccagcuaccagacacagacaaacagccccagacgggcuagaagcguggccagccagagcaucauugccuacacaaugucucugggcgccgagaacagcguggccuacuccaacaacucuaucgcuugccccaccaacuucaccaucagcgugaccaccgagauccugccuguguccaugaccaagaccagcguggacugcaccauguacaucugcggcgauuccaccgagugcuccaaccugcugcugcaguacggcagcuucugcacccagcugaauagagcccugacagggaucgccguggaacaggacaagaacacccaagagguguucgcccaagugaagcaaaucuacaagaccccuccuaucaaggacuucggcggcuucaauuucagccagauucugcccgauccuagcaagcccagcaagcggagcuucaucgaggaccugcuguucaacaaagugacacuggccgacgccggcuucaucaagcaguauggcgauugucugggcgacauugccgccagggaucugauuugcgcccagaaguuuaacggacugacagugcugccuccucugcugaccgaugagaugaucgcccaguacacaucugcccugcuggccggcacaaucacaagcggcuggacauuuggagcuggcgccgcucugcagauccccuuugcuaugcagauggccuaccgguucaacggcaucggagugacccagaaugugcuguacgagaaccagaagcugaucgccaaccaguucaacagcgccaucggcaagauccaggacagccugagcagcacagcaagcgcccugggaaagcugcaggacguggucaaccagaaugcccaggcacugaacacccuggucaagcagcuguccuccaacuucggcgccaucagcucugugcugaacgauauccugagcagacuggacaaggucgaggccgaggugcagaucgacagacugaucacaggcagacugcagagccuccagacauacgugacccagcagcugaucagagccgccgagauuagagccucugccaaucuggccgccaccaagaugucugagugugugcugggccagagcaagagaguggacuuuugcggcaagggcuaccaccugaugagcuucccucagucugccccucacggcgugguguuucugcacgugacauaugugcccgcucaagagaagaauuucaccaccgcuccagccaucugccacgacggcaaagcccacuuuccuagagaaggcguguucguguccaacggcacccauugguucgugacacagcggaacuucugugagccccagaucaucaccaccgacaacaccuucgugucuggcaacugcgacguugugaucggcauugugaacaauaccguguacgacccucugcagcccgagcuggacagcggaggcggaggaucugacaucgaccccuacaaagaguucggcagcagcuaccagcugcugaacuuccugccucuggacuucuuccccgaccugaacgcccugguggauacagccacagcucuguacgaggaagaacugaccggcagagagcacugcagcccucaccacacagccauuagacaggcccucgugugcugggacgagcugacaaaacugaucgccuggaugagcagcaacaucaccagcgagcaagugcggaccaucaucgugaaccacgugaacgauaccuggggccugaaagugcggcagagccugugguuucaccugagcugucugaccuucggccagcacaccgugcaagaguuucugguguccuucggcguguggaucagaaccccugcuccauacagaccuccaaacgcucccauccugagcacccugccugagcacacagugaucuguuga

SEQ ID NO: 12196 - RNA, 3906 nt, Artificial Sequence
  SARS-CoV-2/Wuhan/WIV05/2019__EPI_ISL_402128 spike protein CDS gc mod (1-1147)(P715C_P1069C) WhcAg construct
auguucguguuucuggugcugcugccccugguguccagccagugugugaaccugaccaccagaacacagcugccuccagccuacaccaacagcuucaccagaggcguguacuaccccgacaagguguucagauccagcgugcugcacucuacccaggaccuguuccugccuuucuucagcaacgugaccugguuccacgccauccacguguccggcaccaauggcaccaagagauucgacaaccccgugcugcccuucaacgacgggguguacuuugccagcaccgagaaguccaacaucaucagaggcuggaucuucggcaccacacuggacagcaagacccagagccugcugaucgugaacaacgccaccaacguggucaucaaagugugcgaguuccaguucugcaacgaccccuuccugggcgucuacuaccacaagaacaacaagagcuggauggaaagcgaguuccggguguacagcagcgccaacaacugcaccuucgaguacgugucccagccuuuccugauggaccuggaaggcaagcagggcaacuucaagaaccugcgcgaguucguguucaagaacaucgacggcuacuucaaaaucuacagcaagcacaccccuaucaaccucgugcgggaucugccucagggcuucucugcucuggaaccccugguggaucugcccaucggcaucaacaucacccgguuucagacacugcuggcccugcacagaagcuaccugacaccuggcgauagcagcagcggauggacagcuggugccgccgcuuacuaugugggcuaccugcagccuagaaccuuccugcugaaguacaacgagaacggcaccaucaccgacgccguggauugugcucuggauccucugagcgagacaaagugcacccugaaguccuucaccguggaaaagggcaucuaccagaccagcaacuuccgggugcagcccaccgaauccaucgugcgguuccccaauaucaccaaucugugccccuucggcgagguguucaaugccaccagauucgccucuguguacgccuggaaccggaagcggaucagcaauugcguggccgacuacuccgugcuguacaacuccgccagcuucagcaccuucaagugcuacggcguguccccuaccaagcugaacgaccugugcuucacaaacguguacgccgacagcuucgugauccggggagaugaagugcggcagauugccccuggacagacaggcaagaucgccgacuacaacuacaagcugcccgacgacuucaccggcugugugauugccuggaacagcaacaaccuggacuccaaagucggcggcaacuacaauuaccuguaccggcuguuccggaaguccaaucugaagcccuucgagcgggacaucagcaccgaaaucuaucaggccggcagcaccccuugcaacggcguggaaggcuucaacugcuacuucccacugcaguccuacggcuuucagcccacaaauggcgugggcuaucagcccuacagagugguggugcugagcuucgaacugcugcaugcuccugccacagugugcggcccuaagaaaagcaccaaucucgugaagaacaaaugcgugaacuucaacuucaacggccugaccggcaccggcgugcugacagagagcaacaagaaguuccugccauuccagcaguuuggccgggauaucgccgauaccacagacgccguuagagauccccagacacuggaaauccuggacaucaccccaugcagcuucggcggagugucugugaucaccccuggcaccaacaccagcaaucagguggcagugcuguaccaggacgugaacuguaccgaagugcccguggccauucacgccgaucagcugacaccuacauggcggguguacuccaccggcagcaauguguuucagaccagagccggcugucugaucggagccgagcacgugaacaauagcuacgagugcgacauccccaucggcgcuggcaucugugccagcuaccagacacagacaaacagccccagacgggcuagaagcguggccagccagagcaucauugccuacacaaugucucugggcgccgagaacagcguggccuacuccaacaacucuaucgcuaucugcaccaacuucaccaucagcgugaccaccgagauccugccuguguccaugaccaagaccagcguggacugcaccauguacaucugcggcgauuccaccgagugcuccaaccugcugcugcaguacggcagcuucugcacccagcugaauagagcccugacagggaucgccguggaacaggacaagaacacccaagagguguucgcccaagugaagcaaaucuacaagaccccuccuaucaaggacuucggcggcuucaauuucagccagauucugcccgauccuagcaagcccagcaagcggagcuucaucgaggaccugcuguucaacaaagugacacuggccgacgccggcuucaucaagcaguauggcgauugucugggcgacauugccgccagggaucugauuugcgcccagaaguuuaacggacugacagugcugccuccucugcugaccgaugagaugaucgcccaguacacaucugcccugcuggccggcacaaucacaagcggcuggacauuuggagcuggcgccgcucugcagauccccuuugcuaugcagauggccuaccgguucaacggcaucggagugacccagaaugugcuguacgagaaccagaagcugaucgccaaccaguucaacagcgccaucggcaagauccaggacagccugagcagcacagcaagcgcccugggaaagcugcaggacguggucaaccagaaugcccaggcacugaacacccuggucaagcagcuguccuccaacuucggcgccaucagcucugugcugaacgauauccugagcagacuggacaaggucgaggccgaggugcagaucgacagacugaucacaggcagacugcagagccuccagacauacgugacccagcagcugaucagagccgccgagauuagagccucugccaaucuggccgccaccaagaugucugagugugugcugggccagagcaagagaguggacuuuugcggcaagggcuaccaccugaugagcuucccucagucugccccucacggcgugguguuucugcacgugacauaugugugugcucaagagaagaauuucaccaccgcuccagccaucugccacgacggcaaagcccacuuuccuagagaaggcguguucguguccaacggcacccauugguucgugacacagcggaacuucuacgagccccagaucaucaccaccgacaacaccuucgugucuggcaacugcgacguugugaucggcauugugaacaauaccguguacgacccucugcagcccgagcuggacagcggaggcggaggaucugacaucgaccccuacaaagaguucggcagcagcuaccagcugcugaacuuccugccucuggacuucuuccccgaccugaacgcccugguggauacagccacagcucuguacgaggaagaacugaccggcagagagcacugcagcccucaccacacagccauuagacaggcccucgugugcugggacgagcugacaaaacugaucgccuggaugagcagcaacaucaccagcgagcaagugcggaccaucaucgugaaccacgugaacgauaccuggggccugaaagugcggcagagccugugguuucaccugagcugucugaccuucggccagcacaccgugcaagaguuucugguguccuucggcguguggaucagaaccccugcuccauacagaccuccaaacgcucccauccugagcacccugccugagcacacagugaucuguuga

SEQ ID NO: 12197 - RNA, 3906 nt, Artificial Sequence
  SARS-CoV-2/Wuhan/WIV05/2019__EPI_ISL_402128 spike protein CDS gc mod (1-1147)(G889C_L1034C) WhcAg construct
auguucguguuucuggugcugcugccccugguguccagccagugugugaaccugaccaccagaacacagcugccuccagccuacaccaacagcuucaccagaggcguguacuaccccgacaagguguucagauccagcgugcugcacucuacccaggaccuguuccugccuuucuucagcaacgugaccugguuccacgccauccacguguccggcaccaauggcaccaagagauucgacaaccccgugcugcccuucaacgacgggguguacuuugccagcaccgagaaguccaacaucaucagaggcuggaucuucggcaccacacuggacagcaagacccagagccugcugaucgugaacaacgccaccaacguggucaucaaagugugcgaguuccaguucugcaacgaccccuuccugggcgucuacuaccacaagaacaacaagagcuggauggaaagcgaguuccggguguacagcagcgccaacaacugcaccuucgaguacgugucccagccuuuccugauggaccuggaaggcaagcagggcaacuucaagaaccugcgcgaguucguguucaagaacaucgacggcuacuucaaaaucuacagcaagcacaccccuaucaaccucgugcgggaucugccucagggcuucucugcucuggaaccccugguggaucugcccaucggcaucaacaucacccgguuucagacacugcuggcccugcacagaagcuaccugacaccuggcgauagcagcagcggauggacagcuggugccgccgcuuacuaugugggcuaccugcagccuagaaccuuccugcugaaguacaacgagaacggcaccaucaccgacgccguggauugugcucuggauccucugagcgagacaaagugcacccugaaguccuucaccguggaaaagggcaucuaccagaccagcaacuuccgggugcagcccaccgaauccaucgugcgguuccccaauaucaccaaucugugccccuucggcgagguguucaaugccaccagauucgccucuguguacgccuggaaccggaagcggaucagcaauugcguggccgacuacuccgugcuguacaacuccgccagcuucagcaccuucaagugcuacggcguguccccuaccaagcugaacgaccugugcuucacaaacguguacgccgacagcuucgugauccggggagaugaagugcggcagauugccccuggacagacaggcaagaucgccgacuacaacuacaagcugcccgacgacuucaccggcugugugauugccuggaacagcaacaaccuggacuccaaagucggcggcaacuacaauuaccuguaccggcuguuccggaaguccaaucugaagcccuucgagcgggacaucagcaccgaaaucuaucaggccggcagcaccccuugcaacggcguggaaggcuucaacugcuacuucccacugcaguccuacggcuuucagcccacaaauggcgugggcuaucagcccuacagagugguggugcugagcuucgaacugcugcaugcuccugccacagugugcggcccuaagaaaagcaccaaucucgugaagaacaaaugcgugaacuucaacuucaacggccugaccggcaccggcgugcugacagagagcaacaagaaguuccugccauuccagcaguuuggccgggauaucgccgauaccacagacgccguuagagauccccagacacuggaaauccuggacaucaccccaugcagcuucggcggagugucugugaucaccccuggcaccaacaccagcaaucagguggcagugcuguaccaggacgugaacuguaccgaagugcccguggccauucacgccgaucagcugacaccuacauggcggguguacuccaccggcagcaauguguuucagaccagagccggcugucugaucggagccgagcacgugaacaauagcuacgagugcgacauccccaucggcgcuggcaucugugccagcuaccagacacagacaaacagccccagacgggcuagaagcguggccagccagagcaucauugccuacacaaugucucugggcgccgagaacagcguggccuacuccaacaacucuaucgcuauccccaccaacuucaccaucagcgugaccaccgagauccugccuguguccaugaccaagaccagcguggacugcaccauguacaucugcggcgauuccaccgagugcuccaaccugcugcugcaguacggcagcuucugcacccagcugaauagagcccugacagggaucgccguggaacaggacaagaacacccaagagguguucgcccaagugaagcaaaucuacaagaccccuccuaucaaggacuucggcggcuucaauuucagccagauucugcccgauccuagcaagcccagcaagcggagcuucaucgaggaccugcuguucaacaaagugacacuggccgacgccggcuucaucaagcaguauggcgauugucugggcgacauugccgccagggaucugauuugcgcccagaaguuuaacggacugacagugcugccuccucugcugaccgaugagaugaucgcccaguacacaucugcccugcuggccggcacaaucacaagcggcuggacauuuugcgcuggcgccgcucugcagauccccuuugcuaugcagauggccuaccgguucaacggcaucggagugacccagaaugugcuguacgagaaccagaagcugaucgccaaccaguucaacagcgccaucggcaagauccaggacagccugagcagcacagcaagcgcccugggaaagcugcaggacguggucaaccagaaugcccaggcacugaacacccuggucaagcagcuguccuccaacuucggcgccaucagcucugugcugaacgauauccugagcagacuggacaaggucgaggccgaggugcagaucgacagacugaucacaggcagacugcagagccuccagacauacgugacccagcagcugaucagagccgccgagauuagagccucugccaaucuggccgccaccaagaugucugaguguguguguggccagagcaagagaguggacuuuugcggcaagggcuaccaccugaugagcuucccucagucugccccucacggcgugguguuucugcacgugacauaugugcccgcucaagagaagaauuucaccaccgcuccagccaucugccacgacggcaaagcccacuuuccuagagaaggcguguucguguccaacggcacccauugguucgugacacagcggaacuucuacgagccccagaucaucaccaccgacaacaccuucgugucuggcaacugcgacguugugaucggcauugugaacaauaccguguacgacccucugcagcccgagcuggacagcggaggcggaggaucugacaucgaccccuacaaagaguucggcagcagcuaccagcugcugaacuuccugccucuggacuucuuccccgaccugaacgcccugguggauacagccacagcucuguacgaggaagaacugaccggcagagagcacugcagcccucaccacacagccauuagacaggcccucgugugcugggacgagcugacaaaacugaucgccuggaugagcagcaacaucaccagcgagcaagugcggaccaucaucgugaaccacgugaacgauaccuggggccugaaagugcggcagagccugugguuucaccugagcugucugaccuucggccagcacaccgugcaagaguuucugguguccuucggcguguggaucagaaccccugcuccauacagaccuccaaacgcucccauccugagcacccugccugagcacacagugaucuguuga

SEQ ID NO: 12198 - RNA, 3906 nt, Artificial Sequence
  SARS-CoV-2/Wuhan/WIV05/2019__EPI_ISL_402128 spike protein CDS gc mod (1-1147)(I909C_Y1047C) WhcAg construct
auguucguguuucuggugcugcugccccugguguccagccagugugugaaccugaccaccagaacacagcugccuccagccuacaccaacagcuucaccagaggcguguacuaccccgacaagguguucagauccagcgugcugcacucuacccaggaccuguuccugccuuucuucagcaacgugaccugguuccacgccauccacguguccggcaccaauggcaccaagagauucgacaaccccgugcugcccuucaacgacgggguguacuuugccagcaccgagaaguccaacaucaucagaggcuggaucuucggcaccacacuggacagcaagacccagagccugcugaucgugaacaacgccaccaacguggucaucaaagugugcgaguuccaguucugcaacgaccccuuccugggcgucuacuaccacaagaacaacaagagcuggauggaaagcgaguuccggguguacagcagcgccaacaacugcaccuucgaguacgugucccagccuuuccugauggaccuggaaggcaagcagggcaacuucaagaaccugcgcgaguucguguucaagaacaucgacggcuacuucaaaaucuacagcaagcacaccccuaucaaccucgugcgggaucugccucagggcuucucugcucuggaaccccugguggaucugcccaucggcaucaacaucacccgguuucagacacugcuggcccugcacagaagcuaccugacaccuggcgauagcagcagcggauggacagcuggugccgccgcuuacuaugugggcuaccugcagccuagaaccuuccugcugaaguacaacgagaacggcaccaucaccgacgccguggauugugcucuggauccucugagcgagacaaagugcacccugaaguccuucaccguggaaaagggcaucuaccagaccagcaacuuccgggugcagcccaccgaauccaucgugcgguuccccaauaucaccaaucugugccccuucggcgagguguucaaugccaccagauucgccucuguguacgccuggaaccggaagcggaucagcaauugcguggccgacuacuccgugcuguacaacuccgccagcuucagcaccuucaagugcuacggcguguccccuaccaagcugaacgaccugugcuucacaaacguguacgccgacagcuucgugauccggggagaugaagugcggcagauugccccuggacagacaggcaagaucgccgacuacaacuacaagcugcccgacgacuucaccggcugugugauugccuggaacagcaacaaccuggacuccaaagucggcggcaacuacaauuaccuguaccggcuguuccggaaguccaaucugaagcccuucgagcgggacaucagcaccgaaaucuaucaggccggcagcaccccuugcaacggcguggaaggcuucaacugcuacuucccacugcaguccuacggcuuucagcccacaaauggcgugggcuaucagcccuacagagugguggugcugagcuucgaacugcugcaugcuccugccacagugugcggcccuaagaaaagcaccaaucucgugaagaacaaaugcgugaacuucaacuucaacggccugaccggcaccggcgugcugacagagagcaacaagaaguuccugccauuccagcaguuuggccgggauaucgccgauaccacagacgccguuagagauccccagacacuggaaauccuggacaucaccccaugcagcuucggcggagugucugugaucaccccuggcaccaacaccagcaaucagguggcagugcuguaccaggacgugaacuguaccgaagugcccguggccauucacgccgaucagcugacaccuacauggcggguguacuccaccggcagcaauguguuucagaccagagccggcugucugaucggagccgagcacgugaacaauagcuacgagugcgacauccccaucggcgcuggcaucugugccagcuaccagacacagacaaacagccccagacgggcuagaagcguggccagccagagcaucauugccuacacaaugucucugggcgccgagaacagcguggccuacuccaacaacucuaucgcuauccccaccaacuucaccaucagcgugaccaccgagauccugccuguguccaugaccaagaccagcguggacugcaccauguacaucugcggcgauuccaccgagugcuccaaccugcugcugcaguacggcagcuucugcacccagcugaauagagcccugacagggaucgccguggaacaggacaagaacacccaagagguguucgcccaagugaagcaaaucuacaagaccccuccuaucaaggacuucggcggcuucaauuucagccagauucugcccgauccuagcaagcccagcaagcggagcuucaucgaggaccugcuguucaacaaagugacacuggccgacgccggcuucaucaagcaguauggcgauugucugggcgacauugccgccagggaucugauuugcgcccagaaguuuaacggacugacagugcugccuccucugcugaccgaugagaugaucgcccaguacacaucugcccugcuggccggcacaaucacaagcggcuggacauuuggagcuggcgccgcucugcagauccccuuugcuaugcagauggccuaccgguucaacggcugcggagugacccagaaugugcuguacgagaaccagaagcugaucgccaaccaguucaacagcgccaucggcaagauccaggacagccugagcagcacagcaagcgcccugggaaagcugcaggacguggucaaccagaaugcccaggcacugaacacccuggucaagcagcuguccuccaacuucggcgccaucagcucugugcugaacgauauccugagcagacuggacaaggucgaggccgaggugcagaucgacagacugaucacaggcagacugcagagccuccagacauacgugacccagcagcugaucagagccgccgagauuagagccucugccaaucuggccgccaccaagaugucugagugugugcugggccagagcaagagaguggacuuuugcggcaagggcugucaccugaugagcuucccucagucugccccucacggcgugguguuucugcacgugacauaugugcccgcucaagagaagaauuucaccaccgcuccagccaucugccacgacggcaaagcccacuuuccuagagaaggcguguucguguccaacggcacccauugguucgugacacagcggaacuucuacgagccccagaucaucaccaccgacaacaccuucgugucuggcaacugcgacguugugaucggcauugugaacaauaccguguacgacccucugcagcccgagcuggacagcggaggcggaggaucugacaucgaccccuacaaagaguucggcagcagcuaccagcugcugaacuuccugccucuggacuucuuccccgaccugaacgcccugguggauacagccacagcucuguacgaggaagaacugaccggcagagagcacugcagcccucaccacacagccauuagacaggcccucgugugcugggacgagcugacaaaacugaucgccuggaugagcagcaacaucaccagcgagcaagugcggaccaucaucgugaaccacgugaacgauaccuggggccugaaagugcggcagagccugugguuucaccugagcugucugaccuucggccagcacaccgugcaagaguuucugguguccuucggcguguggaucagaaccccugcuccauacagaccuccaaacgcucccauccugagcacccugccugagcacacagugaucuguuga

SEQ ID NO: 12199 - RNA, 3906 nt, Artificial Sequence
  SARS-CoV-2/Wuhan/WIV05/2019__EPI_ISL_402128 spike protein CDS gc mod (1-1147)(Q965C_S1003C) WhcAg construct
auguucguguuucuggugcugcugccccugguguccagccagugugugaaccugaccaccagaacacagcugccuccagccuacaccaacagcuucaccagaggcguguacuaccccgacaagguguucagauccagcgugcugcacucuacccaggaccuguuccugccuuucuucagcaacgugaccugguuccacgccauccacguguccggcaccaauggcaccaagagauucgacaaccccgugcugcccuucaacgacgggguguacuuugccagcaccgagaaguccaacaucaucagaggcuggaucuucggcaccacacuggacagcaagacccagagccugcugaucgugaacaacgccaccaacguggucaucaaagugugcgaguuccaguucugcaacgaccccuuccugggcgucuacuaccacaagaacaacaagagcuggauggaaagcgaguuccggguguacagcagcgccaacaacugcaccuucgaguacgugucccagccuuuccugauggaccuggaaggcaagcagggcaacuucaagaaccugcgcgaguucguguucaagaacaucgacggcuacuucaaaaucuacagcaagcacaccccuaucaaccucgugcgggaucugccucagggcuucucugcucuggaaccccugguggaucugcccaucggcaucaacaucacccgguuucagacacugcuggcccugcacagaagcuaccugacaccuggcgauagcagcagcggauggacagcuggugccgccgcuuacuaugugggcuaccugcagccuagaaccuuccugcugaaguacaacgagaacggcaccaucaccgacgccguggauugugcucuggauccucugagcgagacaaagugcacccugaaguccuucaccguggaaaagggcaucuaccagaccagcaacuuccgggugcagcccaccgaauccaucgugcgguuccccaauaucaccaaucugugccccuucggcgagguguucaaugccaccagauucgccucuguguacgccuggaaccggaagcggaucagcaauugcguggccgacuacuccgugcuguacaacuccgccagcuucagcaccuucaagugcuacggcguguccccuaccaagcugaacgaccugugcuucacaaacguguacgccgacagcuucgugauccggggagaugaagugcggcagauugccccuggacagacaggcaagaucgccgacuacaacuacaagcugcccgacgacuucaccggcugugugauugccuggaacagcaacaaccuggacuccaaagucggcggcaacuacaauuaccuguaccggcuguuccggaaguccaaucugaagcccuucgagcgggacaucagcaccgaaaucuaucaggccggcagcaccccuugcaacggcguggaaggcuucaacugcuacuucccacugcaguccuacggcuuucagcccacaaauggcgugggcuaucagcccuacagagugguggugcugagcuucgaacugcugcaugcuccugccacagugugcggcccuaagaaaagcaccaaucucgugaagaacaaaugcgugaacuucaacuucaacggccugaccggcaccggcgugcugacagagagcaacaagaaguuccugccauuccagcaguuuggccgggauaucgccgauaccacagacgccguuagagauccccagacacuggaaauccuggacaucaccccaugcagcuucggcggagugucugugaucaccccuggcaccaacaccagcaaucagguggcagugcuguaccaggacgugaacuguaccgaagugcccguggccauucacgccgaucagcugacaccuacauggcggguguacuccaccggcagcaauguguuucagaccagagccggcugucugaucggagccgagcacgugaacaauagcuacgagugcgacauccccaucggcgcuggcaucugugccagcuaccagacacagacaaacagccccagacgggcuagaagcguggccagccagagcaucauugccuacacaaugucucugggcgccgagaacagcguggccuacuccaacaacucuaucgcuauccccaccaacuucaccaucagcgugaccaccgagauccugccuguguccaugaccaagaccagcguggacugcaccauguacaucugcggcgauuccaccgagugcuccaaccugcugcugcaguacggcagcuucugcacccagcugaauagagcccugacagggaucgccguggaacaggacaagaacacccaagagguguucgcccaagugaagcaaaucuacaagaccccuccuaucaaggacuucggcggcuucaauuucagccagauucugcccgauccuagcaagcccagcaagcggagcuucaucgaggaccugcuguucaacaaagugacacuggccgacgccggcuucaucaagcaguauggcgauugucugggcgacauugccgccagggaucugauuugcgcccagaaguuuaacggacugacagugcugccuccucugcugaccgaugagaugaucgcccaguacacaucugcccugcuggccggcacaaucacaagcggcuggacauuuggagcuggcgccgcucugcagauccccuuugcuaugcagauggccuaccgguucaacggcaucggagugacccagaaugugcuguacgagaaccagaagcugaucgccaaccaguucaacagcgccaucggcaagauccaggacagccugagcagcacagcaagcgcccugggaaagcugcaggacguggucaaccagaaugcccaggcacugaacacccuggucaagugccuguccuccaacuucggcgccaucagcucugugcugaacgauauccugagcagacuggacaaggucgaggccgaggugcagaucgacagacugaucacaggcagacugcagugucuccagacauacgugacccagcagcugaucagagccgccgagauuagagccucugccaaucuggccgccaccaagaugucugagugugugcugggccagagcaagagaguggacuuuugcggcaagggcuaccaccugaugagcuucccucagucugccccucacggcgugguguuucugcacgugacauaugugcccgcucaagagaagaauuucaccaccgcuccagccaucugccacgacggcaaagcccacuuuccuagagaaggcguguucguguccaacggcacccauugguucgugacacagcggaacuucuacgagccccagaucaucaccaccgacaacaccuucgugucuggcaacugcgacguugugaucggcauugugaacaauaccguguacgacccucugcagcccgagcuggacagcggaggcggaggaucugacaucgaccccuacaaagaguucggcagcagcuaccagcugcugaacuuccugccucuggacuucuuccccgaccugaacgcccugguggauacagccacagcucuguacgaggaagaacugaccggcagagagcacugcagcccucaccacacagccauuagacaggcccucgugugcugggacgagcugacaaaacugaucgccuggaugagcagcaacaucaccagcgagcaagugcggaccaucaucgugaaccacgugaacgauaccuggggccugaaagugcggcagagccugugguuucaccugagcugucugaccuucggccagcacaccgugcaagaguuucugguguccuucggcguguggaucagaaccccugcuccauacagaccuccaaacgcucccauccugagcacccugccugagcacacagugaucuguuga

SEQ ID NO: 12200 - RNA, 3906 nt, Artificial Sequence
  SARS-CoV-2/Wuhan/WIV05/2019__EPI_ISL_402128 spike protein CDS gc mod (1-1147)(F970C_G999C) WhcAg construct
auguucguguuucuggugcugcugccccugguguccagccagugugugaaccugaccaccagaacacagcugccuccagccuacaccaacagcuucaccagaggcguguacuaccccgacaagguguucagauccagcgugcugcacucuacccaggaccuguuccugccuuucuucagcaacgugaccugguuccacgccauccacguguccggcaccaauggcaccaagagauucgacaaccccgugcugcccuucaacgacgggguguacuuugccagcaccgagaaguccaacaucaucagaggcuggaucuucggcaccacacuggacagcaagacccagagccugcugaucgugaacaacgccaccaacguggucaucaaagugugcgaguuccaguucugcaacgaccccuuccugggcgucuacuaccacaagaacaacaagagcuggauggaaagcgaguuccggguguacagcagcgccaacaacugcaccuucgaguacgugucccagccuuuccugauggaccuggaaggcaagcagggcaacuucaagaaccugcgcgaguucguguucaagaacaucgacggcuacuucaaaaucuacagcaagcacaccccuaucaaccucgugcgggaucugccucagggcuucucugcucuggaaccccugguggaucugcccaucggcaucaacaucacccgguuucagacacugcuggcccugcacagaagcuaccugacaccuggcgauagcagcagcggauggacagcuggugccgccgcuuacuaugugggcuaccugcagccuagaaccuuccugcugaaguacaacgagaacggcaccaucaccgacgccguggauugugcucuggauccucugagcgagacaaagugcacccugaaguccuucaccguggaaaagggcaucuaccagaccagcaacuuccgggugcagcccaccgaauccaucgugcgguuccccaauaucaccaaucugugccccuucggcgagguguucaaugccaccagauucgccucuguguacgccuggaaccggaagcggaucagcaauugcguggccgacuacuccgugcuguacaacuccgccagcuucagcaccuucaagugcuacggcguguccccuaccaagcugaacgaccugugcuucacaaacguguacgccgacagcuucgugauccggggagaugaagugcggcagauugccccuggacagacaggcaagaucgccgacuacaacuacaagcugcccgacgacuucaccggcugugugauugccuggaacagcaacaaccuggacuccaaagucggcggcaacuacaauuaccuguaccggcuguuccggaaguccaaucugaagcccuucgagcgggacaucagcaccgaaaucuaucaggccggcagcaccccuugcaacggcguggaaggcuucaacugcuacuucccacugcaguccuacggcuuucagcccacaaauggcgugggcuaucagcccuacagagugguggugcugagcuucgaacugcugcaugcuccugccacagugugcggcccuaagaaaagcaccaaucucgugaagaacaaaugcgugaacuucaacuucaacggccugaccggcaccggcgugcugacagagagcaacaagaaguuccugccauuccagcaguuuggccgggauaucgccgauaccacagacgccguuagagauccccagacacuggaaauccuggacaucaccccaugcagcuucggcggagugucugugaucaccccuggcaccaacaccagcaaucagguggcagugcuguaccaggacgugaacuguaccgaagugcccguggccauucacgccgaucagcugacaccuacauggcggguguacuccaccggcagcaauguguuucagaccagagccggcugucugaucggagccgagcacgugaacaauagcuacgagugcgacauccccaucggcgcuggcaucugugccagcuaccagacacagacaaacagccccagacgggcuagaagcguggccagccagagcaucauugccuacacaaugucucugggcgccgagaacagcguggccuacuccaacaacucuaucgcuauccccaccaacuucaccaucagcgugaccaccgagauccugccuguguccaugaccaagaccagcguggacugcaccauguacaucugcggcgauuccaccgagugcuccaaccugcugcugcaguacggcagcuucugcacccagcugaauagagcccugacagggaucgccguggaacaggacaagaacacccaagagguguucgcccaagugaagcaaaucuacaagaccccuccuaucaaggacuucggcggcuucaauuucagccagauucugcccgauccuagcaagcccagcaagcggagcuucaucgaggaccugcuguucaacaaagugacacuggccgacgccggcuucaucaagcaguauggcgauugucugggcgacauugccgccagggaucugauuugcgcccagaaguuuaacggacugacagugcugccuccucugcugaccgaugagaugaucgcccaguacacaucugcccugcuggccggcacaaucacaagcggcuggacauuuggagcuggcgccgcucugcagauccccuuugcuaugcagauggccuaccgguucaacggcaucggagugacccagaaugugcuguacgagaaccagaagcugaucgccaaccaguucaacagcgccaucggcaagauccaggacagccugagcagcacagcaagcgcccugggaaagcugcaggacguggucaaccagaaugcccaggcacugaacacccuggucaagcagcuguccuccaacugcggcgccaucagcucugugcugaacgauauccugagcagacuggacaaggucgaggccgaggugcagaucgacagacugaucacauguagacugcagagccuccagacauacgugacccagcagcugaucagagccgccgagauuagagccucugccaaucuggccgccaccaagaugucugagugugugcugggccagagcaagagaguggacuuuugcggcaagggcuaccaccugaugagcuucccucagucugccccucacggcgugguguuucugcacgugacauaugugcccgcucaagagaagaauuucaccaccgcuccagccaucugccacgacggcaaagcccacuuuccuagagaaggcguguucguguccaacggcacccauugguucgugacacagcggaacuucuacgagccccagaucaucaccaccgacaacaccuucgugucuggcaacugcgacguugugaucggcauugugaacaauaccguguacgacccucugcagcccgagcuggacagcggaggcggaggaucugacaucgaccccuacaaagaguucggcagcagcuaccagcugcugaacuuccugccucuggacuucuuccccgaccugaacgcccugguggauacagccacagcucuguacgaggaagaacugaccggcagagagcacugcagcccucaccacacagccauuagacaggcccucgugugcugggacgagcugacaaaacugaucgccuggaugagcagcaacaucaccagcgagcaagugcggaccaucaucgugaaccacgugaacgauaccuggggccugaaagugcggcagagccugugguuucaccugagcugucugaccuucggccagcacaccgugcaagaguuucugguguccuucggcguguggaucagaaccccugcuccauacagaccuccaaacgcucccauccugagcacccugccugagcacacagugaucuguuga

SEQ ID NO: 12201 - RNA, 3906 nt, Artificial Sequence
  SARS-CoV-2/Wuhan/WIV05/2019__EPI_ISL_402128 spike protein CDS gc mod (1-1147)(A972C_R995C) WhcAg construct
auguucguguuucuggugcugcugccccugguguccagccagugugugaaccugaccaccagaacacagcugccuccagccuacaccaacagcuucaccagaggcguguacuaccccgacaagguguucagauccagcgugcugcacucuacccaggaccuguuccugccuuucuucagcaacgugaccugguuccacgccauccacguguccggcaccaauggcaccaagagauucgacaaccccgugcugcccuucaacgacgggguguacuuugccagcaccgagaaguccaacaucaucagaggcuggaucuucggcaccacacuggacagcaagacccagagccugcugaucgugaacaacgccaccaacguggucaucaaagugugcgaguuccaguucugcaacgaccccuuccugggcgucuacuaccacaagaacaacaagagcuggauggaaagcgaguuccggguguacagcagcgccaacaacugcaccuucgaguacgugucccagccuuuccugauggaccuggaaggcaagcagggcaacuucaagaaccugcgcgaguucguguucaagaacaucgacggcuacuucaaaaucuacagcaagcacaccccuaucaaccucgugcgggaucugccucagggcuucucugcucuggaaccccugguggaucugcccaucggcaucaacaucacccgguuucagacacugcuggcccugcacagaagcuaccugacaccuggcgauagcagcagcggauggacagcuggugccgccgcuuacuaugugggcuaccugcagccuagaaccuuccugcugaaguacaacgagaacggcaccaucaccgacgccguggauugugcucuggauccucugagcgagacaaagugcacccugaaguccuucaccguggaaaagggcaucuaccagaccagcaacuuccgggugcagcccaccgaauccaucgugcgguuccccaauaucaccaaucugugccccuucggcgagguguucaaugccaccagauucgccucuguguacgccuggaaccggaagcggaucagcaauugcguggccgacuacuccgugcuguacaacuccgccagcuucagcaccuucaagugcuacggcguguccccuaccaagcugaacgaccugugcuucacaaacguguacgccgacagcuucgugauccggggagaugaagugcggcagauugccccuggacagacaggcaagaucgccgacuacaacuacaagcugcccgacgacuucaccggcugugugauugccuggaacagcaacaaccuggacuccaaagucggcggcaacuacaauuaccuguaccggcuguuccggaaguccaaucugaagcccuucgagcgggacaucagcaccgaaaucuaucaggccggcagcaccccuugcaacggcguggaaggcuucaacugcuacuucccacugcaguccuacggcuuucagcccacaaauggcgugggcuaucagcccuacagagugguggugcugagcuucgaacugcugcaugcuccugccacagugugcggcccuaagaaaagcaccaaucucgugaagaacaaaugcgugaacuucaacuucaacggccugaccggcaccggcgugcugacagagagcaacaagaaguuccugccauuccagcaguuuggccgggauaucgccgauaccacagacgccguuagagauccccagacacuggaaauccuggacaucaccccaugcagcuucggcggagugucugugaucaccccuggcaccaacaccagcaaucagguggcagugcuguaccaggacgugaacuguaccgaagugcccguggccauucacgccgaucagcugacaccuacauggcggguguacuccaccggcagcaauguguuucagaccagagccggcugucugaucggagccgagcacgugaacaauagcuacgagugcgacauccccaucggcgcuggcaucugugccagcuaccagacacagacaaacagccccagacgggcuagaagcguggccagccagagcaucauugccuacacaaugucucugggcgccgagaacagcguggccuacuccaacaacucuaucgcuauccccaccaacuucaccaucagcgugaccaccgagauccugccuguguccaugaccaagaccagcguggacugcaccauguacaucugcggcgauuccaccgagugcuccaaccugcugcugcaguacggcagcuucugcacccagcugaauagagcccugacagggaucgccguggaacaggacaagaacacccaagagguguucgcccaagugaagcaaaucuacaagaccccuccuaucaaggacuucggcggcuucaauuucagccagauucugcccgauccuagcaagcccagcaagcggagcuucaucgaggaccugcuguucaacaaagugacacuggccgacgccggcuucaucaagcaguauggcgauugucugggcgacauugccgccagggaucugauuugcgcccagaaguuuaacggacugacagugcugccuccucugcugaccgaugagaugaucgcccaguacacaucugcccugcuggccggcacaaucacaagcggcuggacauuuggagcuggcgccgcucugcagauccccuuugcuaugcagauggccuaccgguucaacggcaucggagugacccagaaugugcuguacgagaaccagaagcugaucgccaaccaguucaacagcgccaucggcaagauccaggacagccugagcagcacagcaagcgcccugggaaagcugcaggacguggucaaccagaaugcccaggcacugaacacccuggucaagcagcuguccuccaacuucggcugcaucagcucugugcugaacgauauccugagcagacuggacaaggucgaggccgaggugcagaucgacugucugaucacaggcagacugcagagccuccagacauacgugacccagcagcugaucagagccgccgagauuagagccucugccaaucuggccgccaccaagaugucugagugugugcugggccagagcaagagaguggacuuuugcggcaagggcuaccaccugaugagcuucccucagucugccccucacggcgugguguuucugcacgugacauaugugcccgcucaagagaagaauuucaccaccgcuccagccaucugccacgacggcaaagcccacuuuccuagagaaggcguguucguguccaacggcacccauugguucgugacacagcggaacuucuacgagccccagaucaucaccaccgacaacaccuucgugucuggcaacugcgacguugugaucggcauugugaacaauaccguguacgacccucugcagcccgagcuggacagcggaggcggaggaucugacaucgaccccuacaaagaguucggcagcagcuaccagcugcugaacuuccugccucuggacuucuuccccgaccugaacgcccugguggauacagccacagcucuguacgaggaagaacugaccggcagagagcacugcagcccucaccacacagccauuagacaggcccucgugugcugggacgagcugacaaaacugaucgccuggaugagcagcaacaucaccagcgagcaagugcggaccaucaucgugaaccacgugaacgauaccuggggccugaaagugcggcagagccugugguuucaccugagcugucugaccuucggccagcacaccgugcaagaguuucugguguccuucggcguguggaucagaaccccugcuccauacagaccuccaaacgcucccauccugagcacccugccugagcacacagugaucuguuga

SEQ ID NO: 12202 - RNA, 3906 nt, Artificial Sequence
  SARS-CoV-2/Wuhan/WIV05/2019__EPI_ISL_402128 spike protein CDS gc mod (1-1147)(A890C_V1040C) WhcAg construct
auguucguguuucuggugcugcugccccugguguccagccagugugugaaccugaccaccagaacacagcugccuccagccuacaccaacagcuucaccagaggcguguacuaccccgacaagguguucagauccagcgugcugcacucuacccaggaccuguuccugccuuucuucagcaacgugaccugguuccacgccauccacguguccggcaccaauggcaccaagagauucgacaaccccgugcugcccuucaacgacgggguguacuuugccagcaccgagaaguccaacaucaucagaggcuggaucuucggcaccacacuggacagcaagacccagagccugcugaucgugaacaacgccaccaacguggucaucaaagugugcgaguuccaguucugcaacgaccccuuccugggcgucuacuaccacaagaacaacaagagcuggauggaaagcgaguuccggguguacagcagcgccaacaacugcaccuucgaguacgugucccagccuuuccugauggaccuggaaggcaagcagggcaacuucaagaaccugcgcgaguucguguucaagaacaucgacggcuacuucaaaaucuacagcaagcacaccccuaucaaccucgugcgggaucugccucagggcuucucugcucuggaaccccugguggaucugcccaucggcaucaacaucacccgguuucagacacugcuggcccugcacagaagcuaccugacaccuggcgauagcagcagcggauggacagcuggugccgccgcuuacuaugugggcuaccugcagccuagaaccuuccugcugaaguacaacgagaacggcaccaucaccgacgccguggauugugcucuggauccucugagcgagacaaagugcacccugaaguccuucaccguggaaaagggcaucuaccagaccagcaacuuccgggugcagcccaccgaauccaucgugcgguuccccaauaucaccaaucugugccccuucggcgagguguucaaugccaccagauucgccucuguguacgccuggaaccggaagcggaucagcaauugcguggccgacuacuccgugcuguacaacuccgccagcuucagcaccuucaagugcuacggcguguccccuaccaagcugaacgaccugugcuucacaaacguguacgccgacagcuucgugauccggggagaugaagugcggcagauugccccuggacagacaggcaagaucgccgacuacaacuacaagcugcccgacgacuucaccggcugugugauugccuggaacagcaacaaccuggacuccaaagucggcggcaacuacaauuaccuguaccggcuguuccggaaguccaaucugaagcccuucgagcgggacaucagcaccgaaaucuaucaggccggcagcaccccuugcaacggcguggaaggcuucaacugcuacuucccacugcaguccuacggcuuucagcccacaaauggcgugggcuaucagcccuacagagugguggugcugagcuucgaacugcugcaugcuccugccacagugugcggcccuaagaaaagcaccaaucucgugaagaacaaaugcgugaacuucaacuucaacggccugaccggcaccggcgugcugacagagagcaacaagaaguuccugccauuccagcaguuuggccgggauaucgccgauaccacagacgccguuagagauccccagacacuggaaauccuggacaucaccccaugcagcuucggcggagugucugugaucaccccuggcaccaacaccagcaaucagguggcagugcuguaccaggacgugaacuguaccgaagugcccguggccauucacgccgaucagcugacaccuacauggcggguguacuccaccggcagcaauguguuucagaccagagccggcugucugaucggagccgagcacgugaacaauagcuacgagugcgacauccccaucggcgcuggcaucugugccagcuaccagacacagacaaacagccccagacgggcuagaagcguggccagccagagcaucauugccuacacaaugucucugggcgccgagaacagcguggccuacuccaacaacucuaucgcuauccccaccaacuucaccaucagcgugaccaccgagauccugccuguguccaugaccaagaccagcguggacugcaccauguacaucugcggcgauuccaccgagugcuccaaccugcugcugcaguacggcagcuucugcacccagcugaauagagcccugacagggaucgccguggaacaggacaagaacacccaagagguguucgcccaagugaagcaaaucuacaagaccccuccuaucaaggacuucggcggcuucaauuucagccagauucugcccgauccuagcaagcccagcaagcggagcuucaucgaggaccugcuguucaacaaagugacacuggccgacgccggcuucaucaagcaguauggcgauugucugggcgacauugccgccagggaucugauuugcgcccagaaguuuaacggacugacagugcugccuccucugcugaccgaugagaugaucgcccaguacacaucugcccugcuggccggcacaaucacaagcggcuggacauuuggaugcggcgccgcucugcagauccccuuugcuaugcagauggccuaccgguucaacggcaucggagugacccagaaugugcuguacgagaaccagaagcugaucgccaaccaguucaacagcgccaucggcaagauccaggacagccugagcagcacagcaagcgcccugggaaagcugcaggacguggucaaccagaaugcccaggcacugaacacccuggucaagcagcuguccuccaacuucggcgccaucagcucugugcugaacgauauccugagcagacuggacaaggucgaggccgaggugcagaucgacagacugaucacaggcagacugcagagccuccagacauacgugacccagcagcugaucagagccgccgagauuagagccucugccaaucuggccgccaccaagaugucugagugugugcugggccagagcaagagaugugacuuuugcggcaagggcuaccaccugaugagcuucccucagucugccccucacggcgugguguuucugcacgugacauaugugcccgcucaagagaagaauuucaccaccgcuccagccaucugccacgacggcaaagcccacuuuccuagagaaggcguguucguguccaacggcacccauugguucgugacacagcggaacuucuacgagccccagaucaucaccaccgacaacaccuucgugucuggcaacugcgacguugugaucggcauugugaacaauaccguguacgacccucugcagcccgagcuggacagcggaggcggaggaucugacaucgaccccuacaaagaguucggcagcagcuaccagcugcugaacuuccugccucuggacuucuuccccgaccugaacgcccugguggauacagccacagcucuguacgaggaagaacugaccggcagagagcacugcagcccucaccacacagccauuagacaggcccucgugugcugggacgagcugacaaaacugaucgccuggaugagcagcaacaucaccagcgagcaagugcggaccaucaucgugaaccacgugaacgauaccuggggccugaaagugcggcagagccugugguuucaccugagcugucugaccuucggccagcacaccgugcaagaguuucugguguccuucggcguguggaucagaaccccugcuccauacagaccuccaaacgcucccauccugagcacccugccugagcacacagugaucuguuga

SEQ ID NO: 12203 - RNA, 3906 nt, Artificial Sequence
  SARS-CoV-2/Wuhan/WIV05/2019__EPI_ISL_402128 spike protein CDS gc mod (1-1147)(T874C_S1055C) WhcAg construct
auguucguguuucuggugcugcugccccugguguccagccagugugugaaccugaccaccagaacacagcugccuccagccuacaccaacagcuucaccagaggcguguacuaccccgacaagguguucagauccagcgugcugcacucuacccaggaccuguuccugccuuucuucagcaacgugaccugguuccacgccauccacguguccggcaccaauggcaccaagagauucgacaaccccgugcugcccuucaacgacgggguguacuuugccagcaccgagaaguccaacaucaucagaggcuggaucuucggcaccacacuggacagcaagacccagagccugcugaucgugaacaacgccaccaacguggucaucaaagugugcgaguuccaguucugcaacgaccccuuccugggcgucuacuaccacaagaacaacaagagcuggauggaaagcgaguuccggguguacagcagcgccaacaacugcaccuucgaguacgugucccagccuuuccugauggaccuggaaggcaagcagggcaacuucaagaaccugcgcgaguucguguucaagaacaucgacggcuacuucaaaaucuacagcaagcacaccccuaucaaccucgugcgggaucugccucagggcuucucugcucuggaaccccugguggaucugcccaucggcaucaacaucacccgguuucagacacugcuggcccugcacagaagcuaccugacaccuggcgauagcagcagcggauggacagcuggugccgccgcuuacuaugugggcuaccugcagccuagaaccuuccugcugaaguacaacgagaacggcaccaucaccgacgccguggauugugcucuggauccucugagcgagacaaagugcacccugaaguccuucaccguggaaaagggcaucuaccagaccagcaacuuccgggugcagcccaccgaauccaucgugcgguuccccaauaucaccaaucugugccccuucggcgagguguucaaugccaccagauucgccucuguguacgccuggaaccggaagcggaucagcaauugcguggccgacuacuccgugcuguacaacuccgccagcuucagcaccuucaagugcuacggcguguccccuaccaagcugaacgaccugugcuucacaaacguguacgccgacagcuucgugauccggggagaugaagugcggcagauugccccuggacagacaggcaagaucgccgacuacaacuacaagcugcccgacgacuucaccggcugugugauugccuggaacagcaacaaccuggacuccaaagucggcggcaacuacaauuaccuguaccggcuguuccggaaguccaaucugaagcccuucgagcgggacaucagcaccgaaaucuaucaggccggcagcaccccuugcaacggcguggaaggcuucaacugcuacuucccacugcaguccuacggcuuucagcccacaaauggcgugggcuaucagcccuacagagugguggugcugagcuucgaacugcugcaugcuccugccacagugugcggcccuaagaaaagcaccaaucucgugaagaacaaaugcgugaacuucaacuucaacggccugaccggcaccggcgugcugacagagagcaacaagaaguuccugccauuccagcaguuuggccgggauaucgccgauaccacagacgccguuagagauccccagacacuggaaauccuggacaucaccccaugcagcuucggcggagugucugugaucaccccuggcaccaacaccagcaaucagguggcagugcuguaccaggacgugaacuguaccgaagugcccguggccauucacgccgaucagcugacaccuacauggcggguguacuccaccggcagcaauguguuucagaccagagccggcugucugaucggagccgagcacgugaacaauagcuacgagugcgacauccccaucggcgcuggcaucugugccagcuaccagacacagacaaacagccccagacgggcuagaagcguggccagccagagcaucauugccuacacaaugucucugggcgccgagaacagcguggccuacuccaacaacucuaucgcuauccccaccaacuucaccaucagcgugaccaccgagauccugccuguguccaugaccaagaccagcguggacugcaccauguacaucugcggcgauuccaccgagugcuccaaccugcugcugcaguacggcagcuucugcacccagcugaauagagcccugacagggaucgccguggaacaggacaagaacacccaagagguguucgcccaagugaagcaaaucuacaagaccccuccuaucaaggacuucggcggcuucaauuucagccagauucugcccgauccuagcaagcccagcaagcggagcuucaucgaggaccugcuguucaacaaagugacacuggccgacgccggcuucaucaagcaguauggcgauugucugggcgacauugccgccagggaucugauuugcgcccagaaguuuaacggacugacagugcugccuccucugcugaccgaugagaugaucgcccaguacugcucugcccugcuggccggcacaaucacaagcggcuggacauuuggagcuggcgccgcucugcagauccccuuugcuaugcagauggccuaccgguucaacggcaucggagugacccagaaugugcuguacgagaaccagaagcugaucgccaaccaguucaacagcgccaucggcaagauccaggacagccugagcagcacagcaagcgcccugggaaagcugcaggacguggucaaccagaaugcccaggcacugaacacccuggucaagcagcuguccuccaacuucggcgccaucagcucugugcugaacgauauccugagcagacuggacaaggucgaggccgaggugcagaucgacagacugaucacaggcagacugcagagccuccagacauacgugacccagcagcugaucagagccgccgagauuagagccucugccaaucuggccgccaccaagaugucugagugugugcugggccagagcaagagaguggacuuuugcggcaagggcuaccaccugaugagcuucccucagugcgccccucacggcgugguguuucugcacgugacauaugugcccgcucaagagaagaauuucaccaccgcuccagccaucugccacgacggcaaagcccacuuuccuagagaaggcguguucguguccaacggcacccauugguucgugacacagcggaacuucuacgagccccagaucaucaccaccgacaacaccuucgugucuggcaacugcgacguugugaucggcauugugaacaauaccguguacgacccucugcagcccgagcuggacagcggaggcggaggaucugacaucgaccccuacaaagaguucggcagcagcuaccagcugcugaacuuccugccucuggacuucuuccccgaccugaacgcccugguggauacagccacagcucuguacgaggaagaacugaccggcagagagcacugcagcccucaccacacagccauuagacaggcccucgugugcugggacgagcugacaaaacugaucgccuggaugagcagcaacaucaccagcgagcaagugcggaccaucaucgugaaccacgugaacgauaccuggggccugaaagugcggcagagccugugguuucaccugagcugucugaccuucggccagcacaccgugcaagaguuucugguguccuucggcguguggaucagaaccccugcuccauacagaccuccaaacgcucccauccugagcacccugccugagcacacagugaucuguuga

SEQ ID NO: 12204 - RNA, 4094 nt, Artificial Sequence
  SARS-CoV-2/Wuhan/WIV05/2019__EPI_ISL_402128 spike protein mRNA wt (1-1273)
aggagagucccgcagucggcguccagcggcucugcuuguucgugugugugucguugcaggccuuauucaagcuuaccauguuuguuuuucuuguuuuauugccacuagucucuagucaguguguuaaucuuacaaccagaacucaauuacccccugcauacacuaauucuuucacacgugguguuuauuacccugacaaaguuuucagauccucaguuuuacauucaacucaggacuuguucuuaccuuucuuuuccaauguuacuugguuccaugcuauacaugucucugggaccaaugguacuaagagguuugauaacccuguccuaccauuuaaugaugguguuuauuuugcuuccacugagaagucuaacauaauaagaggcuggauuuuugguacuacuuuagauucgaagacccagucccuacuuauuguuaauaacgcuacuaauguuguuauuaaagucugugaauuucaauuuuguaaugauccauuuuuggguguuuauuaccacaaaaacaacaaaaguuggauggaaagugaguucagaguuuauucuagugcgaauaauugcacuuuugaauaugucucucagccuuuucuuauggaccuugaaggaaaacaggguaauuucaaaaaucuuagggaauuuguguuuaagaauauugaugguuauuuuaaaauauauucuaagcacacgccuauuaauuuagugcgugaucucccucaggguuuuucggcuuuagaaccauugguagauuugccaauagguauuaacaucacuagguuucaaacuuuacuugcuuuacauagaaguuauuugacuccuggugauucuucuucagguuggacagcuggugcugcagcuuauuauguggguuaucuucaaccuaggacuuuucuauuaaaauauaaugaaaauggaaccauuacagaugcuguagacugugcacuugacccucucucagaaacaaaguguacguugaaauccuucacuguagaaaaaggaaucuaucaaacuucuaacuuuagaguccaaccaacagaaucuauuguuagauuuccuaauauuacaaacuugugcccuuuuggugaaguuuuuaacgccaccagauuugcaucuguuuaugcuuggaacaggaagagaaucagcaacuguguugcugauuauucuguccuauauaauuccgcaucauuuuccacuuuuaaguguuauggagugucuccuacuaaauuaaaugaucucugcuuuacuaaugucuaugcagauucauuuguaauuagaggugaugaagucagacaaaucgcuccagggcaaacuggaaagauugcugauuauaauuauaaauuaccagaugauuuuacaggcugcguuauagcuuggaauucuaacaaucuugauucuaagguuggugguaauuauaauuaccuguauagauuguuuaggaagucuaaucucaaaccuuuugagagagauauuucaacugaaaucuaucaggccgguagcacaccuuguaaugguguugaagguuuuaauuguuacuuuccuuuacaaucauaugguuuccaacccacuaaugguguugguuaccaaccauacagaguaguaguacuuucuuuugaacuucuacaugcaccagcaacuguuuguggaccuaaaaagucuacuaauuugguuaaaaacaaaugugucaauuucaacuucaaugguuuaacaggcacagguguucuuacugagucuaacaaaaaguuucugccuuuccaacaauuuggcagagacauugcugacacuacugaugcuguccgugauccacagacacuugagauucuugacauuacaccauguucuuuugguggugucaguguuauaacaccaggaacaaauacuucuaaccagguugcuguucuuuaucaggauguuaacugcacagaagucccuguugcuauucaugcagaucaacuuacuccuacuuggcguguuuauucuacagguucuaauguuuuucaaacacgugcaggcuguuuaauaggggcugaacaugucaacaacucauaugagugugacauacccauuggugcagguauaugcgcuaguuaucagacucagacuaauucuccucggcgggcacguaguguagcuagucaauccaucauugccuacacuaugucacuuggugcagaaaauucaguugcuuacucuaauaacucuauugccauacccacaaauuuuacuauuaguguuaccacagaaauucuaccagugucuaugaccaagacaucaguagauuguacaauguacauuuguggugauucaacugaaugcagcaaucuuuuguugcaauauggcaguuuuuguacacaauuaaaccgugcuuuaacuggaauagcuguugaacaagacaaaaacacccaagaaguuuuugcacaagucaaacaaauuuacaaaacaccaccaauuaaagauuuuggugguuuuaauuuuucacaaauauuaccagauccaucaaaaccaagcaagaggucauuuauugaagaucuacuuuucaacaaagugacacuugcagaugcuggcuucaucaaacaauauggugauugccuuggugauauugcugcuagagaccucauuugugcacaaaaguuuaacggccuuacuguuuugccaccuuugcucacagaugaaaugauugcucaauacacuucugcacuguuagcggguacaaucacuucugguuggaccuuuggugcaggugcugcauuacaaauaccauuugcuaugcaaauggcuuauagguuuaaugguauuggaguuacacagaauguucucuaugagaaccaaaaauugauugccaaccaauuuaauagugcuauuggcaaaauucaagacucacuuucuuccacagcaagugcacuuggaaaacuucaagauguggucaaccaaaaugcacaagcuuuaaacacgcuuguuaaacaacuuagcuccaauuuuggugcaauuucaaguguuuuaaaugauauccuuucacgucuugacaaaguugaggcugaagugcaaauugauagguugaucacaggcagacuucaaaguuugcagacauaugugacucaacaauuaauuagagcugcagaaaucagagcuucugcuaaucuugcugcuacuaaaaugucagaguguguacuuggacaaucaaaaagaguugauuuuuguggaaagggcuaucaucuuauguccuucccucagucagcaccucaugguguagucuucuugcaugugacuuaugucccugcacaagaaaagaacuucacaacugcuccugccauuugucaugauggaaaagcacacuuuccucgugaaggugucuuuguuucaaauggcacacacugguuuguaacacaaaggaauuuuuaugaaccacaaaucauuacuacagacaacacauuugugucugguaacugugauguuguaauaggaauugucaacaacacaguuuaugauccuuugcaaccugaauuagacucauucaaggaggaguuagauaaauauuuuaagaaucauacaucaccagauguugauuuaggugacaucucuggcauuaaugcuucaguuguaaacauucaaaaagaaauugaccgccucaaugagguugccaagaauuuaaaugaaucucucaucgaucuccaagaacuuggaaaguaugagcaguauauaaaauggccaugguacauuuggcuagguuuuauagcuggcuugauugccauaguaauggugacaauuaugcuuugcuguaugaccaguugcuguaguugucucaagggcuguuguucuuguggauccugcugcaaauuugaugaagacgacucugagccagugcucaaaggagucaaauuacauuacacauaaggacuagucccuguucccagagcccacuuuuuuuucuuuuuuugaaauaaaauagccugucuuucagaucucaaaggcucuuuucagagccaccaaaaaaaaaaaaaaaaaaaaaaaaaaaaaaaaaaaaaaaaaaaaaaaaaaaaaaaaaaaaaaaaaaaaaaaaaaaaaaaaaaaaaaaaaaaaaaaaaaaaa

SEQ ID NO: 12205 - RNA, 4082 nt, Artificial Sequence
  SARS-CoV-2/bat/Yunnan/RaTG13/2013__EPI_ISL_402131 spike protein mRNA wt (1-1269)
aggagagucccgcagucggcguccagcggcucugcuuguucgugugugugucguugcaggccuuauucaagcuuaccauguuuguuuuucuuguuuuauugccacuaguuucuagucaguguguuaaucuaacaacuagaacucaguuaccuccugcauacaccaacucauccacccguggugucuauuacccugacaaaguuuucagaucuucaguuuuacauuuaacucaggauuuguuuuuaccuuucuucuccaaugugaccugguuccaugcuauacauguuucagggaccaaugguauuaaaagguuugauaacccaguucugccauucaacgauggcgucuauuuugcuuccacugagaagucuaauauaauaagaggauggauuuuugguacuaccuuagauucgaagacccagucucuacuuauuguuaauaacgcuacuaauguuguuauuaaagucugugaauuucaauuuuguaaugauccauuuuuggguguuuauuaccacaaaaacaacaaaaguuggauggaaagugaguucagaguuuacucuagugcgaauaauugcacuuuugaguaugucucucagccuuuucuuauggaccuugaaggaaaacaggguaauuucaaaaaucuuagggaauucguguuuaagaauauugaugguuauuucaaaauauauucuaaacauacgccuauuaauuuagugcgugaucuucccccugguuuuucagcuuuagaaccauugguagaucugccaauagguauuaacaucacuagguuucaaacuuuacuugcuuuacauagaagcuauuugacuccuggugauucuucuucagguuggacagcuggugcugcagcuuauuauguggguuaucuucaaccaaggacuuuucuacuaaaauauaaugagaauggaaccauuacagaugcuguagacugugcacuugacccucuuucagaaacaaaguguacguuaaaauccuucacuguugaaaaaggaauuuaucaaaccucuaacuuuagaguccaaccaacagauucuauuguuagauucccaaauauuacaaacuuauguccuuuuggugaaguuuuuaacgccaccacauucgcaucaguuuaugcuuggaacagaaagagaauuagcaacuguguugcugauuacucuguccuauauaauuccacuucauuuucuaccuuuaaauguuauggagugucuccuacuaaauuaaaugaucucugcuuuacuaauguuuaugcagacucauuugugauuacaggugaugaagucagacaaauugcgccaggacaaacuggaaagauugcugacuacaauuauaaacuaccagaugauuuuacugguuguguuauagcuuggaauucuaagcauauugaugcaaaagagggcgguaauuuuaacuaucuuuaccgucucuuuagaaaagcuaaucuuaaacccuuugagagggauaucucaacugaaauuuaccaagcaggcagcaaaccuuguaauggucaaacuggucuaaauugcuacuacccacuuuauagauauggauuuuacccuacugaugguguuggucaccaaccuuauaggguaguaguacuuucuuuugaacuucuaaaugcaccagcaacuguuuguggaccuaagaagucuacuaacuugguuaaaaauaaaugugucaauuucaacuuuaaugguuuaacuggcacagguguccucacagagucuaauaaaaaguuucuaccuuuccaacaauuugguagagacauugcagacacuacugaugccguccgugauccacagacacuugagauucuugacauuacaccauguucuuuugguggugucaguguuauaacaccuggaacaaaugccucuaaccagguugcuguucuuuaucaggauguuaacugcacagaagucccuguugcuauccaugcagaccaacuuacucccacuuggcguguuuacuccacagguucuaauguuuuucaaacacgugcagguuguuuaauaggggcugaacaugucaauaacucguaugagugugacauaccuauuggugcaggaauaugcgccaguuaucagacucaaacuaauucacguaguguggccagucaaucuauuauugccuacacuaugucacuuggugcagaaaauucaguugcuuauucuaauaacucuauugccauaccuacaaauuuuacuauuagugugaccacugaaauucuaccugugucuaugacaaagacaucgguagacuguacaauguauauuuguggugauucaacugagugcagcaaccuuuuguugcaauaugguaguuuuugcacacaauuaaaucgugcuuuaacuggaauagcuguugaacaggacaaaaauacucaagaaguuuuugcucaaguuaaacaaauuuauaagacaccaccaauuaaagauuuuggugguuucaauuuuucacaaauauuaccagauccaucaaaaccaagcaagaggucauuuauugaggauuuacuuuucaauaaagugacacuugcugaugcuggcuucaucaaacaauauggugauugccuuggugauauugcugcuagggaucuuauuugugcucaaaaguucaauggccuuacuguucugccaccuuugcucacagaugaaaugaucgcucaauacacuucugcacuauuagcagguacaaucacuucugguuggacuuuuggugcaggugcugcuuuacaaauaccauuugccaugcaaauggcuuauagguuuaaugguauuggaguuacacagaauguucucuaugagaaccaaaaauugauugccaaccaguuuaauagugcuauuggcaaaauucaagacucacuuucuucuacagcaagugcacuuggaaaacuucaagauguugucaaccaaaaugcacaagcuuuaaacacgcuuguuaaacaacuuagcuccaauuuuggagcuauuucuagcguguuaaaugauauccuuucacgucucgacaaaguugaggcugaagugcagauugacagguugaucacaggcagacuucaaagcuugcagacauaugugacucaacaauuaauuagagcugcagaaaucagagcuucugccaaucuugcugcuacuaaaaugucagaguguguacucggacaaucaaaaagaguugauuuuuguggaaaaggcuaucaucuuaugucuuucccucagucagcaccucaugguguagucuucuugcaugugacauaugucccugcacaagaaaagaacuucacaacugcuccugccauuugucaugauggaaaagcacacuuuccacgugaagguguuuucguuucaaauggcacacacugguuuguuacacaaaggaauuuuuaugaaccacaaauuauuacaacagacaacacauuugucucugguagcugugauguuguaauaggaauugucaacaacacaguuuaugauccuuugcaaccagaacuugauucauucaaggaggaguuggauaaauacuuuaaaaaucauacaucaccugauguagauuuaggugacauuucuggcauuaaugcuucaguugucaauauucaaaaggaaauugaccgccucaaugagguugccaaaaaucuaaaugaaucucucaucgaucuccaagaacuuggaaaguaugaacaguauauaaaauggccaugguacauuuggcuagguuuuauagcuggcuugauugccauaauaauggucacgauuaugcuuugcuguaugaccaguugcugcaguugucucaagggcuguuguucuugcggaucuugcugcaaauuugaugaagacgacucugagccagugcucaaaggagucaaauuacauuacacauaaggacuagucccuguucccagagcccacuuuuuuuucuuuuuuugaaauaaaauagccugucuuucagaucucaaaggcucuuuucagagccaccaaaaaaaaaaaaaaaaaaaaaaaaaaaaaaaaaaaaaaaaaaaaaaaaaaaaaaaaaaaaaaaaaaaaaaaaaaaaaaaaaaaaaaaaaaaaaaaaaaaaa

SEQ ID NO: 12206 - RNA, 4094 nt, Artificial Sequence
  SARS-CoV-2/Wuhan/HBCDC-HB-01/2019__EPI_ISL_402132 spike protein mRNA wt (1-1273)
aggagagucccgcagucggcguccagcggcucugcuuguucgugugugugucguugcaggccuuauucaagcuuaccauguuuguuuuucuuguuuuauugccacuagucucuagucaguguguuaaucuuacaaccagaacucaauuacccccugcauacacuaauucuaucacacgugguguuuauuacccugacaaaguuuucagauccucaguuuuacauucaacucaggacuuguucuuaccuuucuuuuccaauguuacuugguuccaugcuauacaugucucugggaccaaugguacuaagagguuugauaacccuguccuaccauuuaaugaugguguuuauuuugcuuccacugagaagucuaacauaauaagaggcuggauuuuugguacuacuuuagauucgaagacccagucccuacuuauuguuaauaacgcuacuaauguuguuauuaaagucugugaauuucaauuuuguaaugauccauuuuuggguguuuauuaccacaaaaacaacaaaaguuggauggaaagugaguucagaguuuauucuagugcgaauaauugcacuuuugaauaugucucucagccuuuucuuauggaccuugaaggaaaacaggguaauuucaaaaaucuuagggaauuuguguuuaagaauauugaugguuauuuuaaaauauauucuaagcacacgccuauuaauuuagugcgugaucucccucaggguuuuucggcuuuagaaccauugguagauuugccaauagguauuaacaucacuagguuucaaacuuuacuugcuuuacauagaaguuauuugacuccuggugauucuucuucagguuggacagcuggugcugcagcuuauuauguggguuaucuucaaccuaggacuuuucuauuaaaauauaaugaaaauggaaccauuacagaugcuguagacugugcacuugacccucucucagaaacaaaguguacguugaaauccuucacuguagaaaaaggaaucuaucaaacuucuaacuuuagaguccaaccaacagaaucuauuguuagauuuccuaauauuacaaacuugugcccuuuuggugaaguuuuuaacgccaccagauuugcaucuguuuaugcuuggaacaggaagagaaucagcaacuguguugcugauuauucuguccuauauaauuccgcaucauuuuccacuuuuaaguguuauggagugucuccuacuaaauuaaaugaucucugcuuuacuaaugucuaugcagauucauuuguaauuagaggugaugaagucagacaaaucgcuccagggcaaacuggaaagauugcugauuauaauuauaaauuaccagaugauuuuacaggcugcguuauagcuuggaauucuaacaaucuugauucuaagguuggugguaauuauaauuaccuguauagauuguuuaggaagucuaaucucaaaccuuuugagagagauauuucaacugaaaucuaucaggccgguagcacaccuuguaaugguguugaagguuuuaauuguuacuuuccuuuacaaucauaugguuuccaacccacuaaugguguugguuaccaaccauacagaguaguaguacuuucuuuugaacuucuacaugcaccagcaacuguuuguggaccuaaaaagucuacuaauuugguuaaaaacaaaugugucaauuucaacuucaaugguuuaacaggcacagguguucuuacugagucuaacaaaaaguuucugccuuuccaacaauuuggcagagacauugcugacacuacugaugcuguccgugauccacagacacuugagauucuugacauuacaccauguucuuuugguggugucaguguuauaacaccaggaacaaauacuucuaaccagguugcuguucuuuaucaggauguuaacugcacagaagucccuguugcuauucaugcagaucaacuuacuccuacuuggcguguuuauucuacagguucuaauguuuuucaaacacgugcaggcuguuuaauaggggcugaacaugucaacaacucauaugagugugacauacccauuggugcagguauaugcgcuaguuaucagacucagacuaauucuccucggcgggcacguaguguagcuagucaauccaucauugccuacacuaugucacuuggugcagaaaauucaguugcuuacucuaauaacucuauugccauacccacaaauuuuacuauuaguguuaccacagaaauucuaccagugucuaugaccaagacaucaguagauuguacaauguacauuuguggugauucaacugaaugcagcaaucuuuuguugcaauauggcaguuuuuguacacaauuaaaccgugcuuuaacuggaauagcuguugaacaagacaaaaacacccaagaaguuuuugcacaagucaaacaaauuuacaaaacaccaccaauuaaagauuuuggugguuuuaauuuuucacaaauauuaccagauccaucaaaaccaagcaagaggucauuuauugaagaucuacuuuucaacaaagugacacuugcagaugcuggcuucaucaaacaauauggugauugccuuggugauauugcugcuagagaccucauuugugcacaaaaguuuaacggccuuacuguuuugccaccuuugcucacagaugaaaugauugcucaauacacuucugcacuguuagcggguacaaucacuucugguuggaccuuuggugcaggugcugcauuacaaauaccauuugcuaugcaaauggcuuauagguuuaaugguauuggaguuacacagaauguucucuaugagaaccaaaaauugauugccaaccaauuuaauagugcuauuggcaaaauucaagacucacuuucuuccacagcaagugcacuuggaaaacuucaagauguggucaaccaaaaugcacaagcuuuaaacacgcuuguuaaacaacuuagcuccaauuuuggugcaauuucaaguguuuuaaaugauauccuuucacgucuugacaaaguugaggcugaagugcaaauugauagguugaucacaggcagacuucaaaguuugcagacauaugugacucaacaauuaauuagagcugcagaaaucagagcuucugcuaaucuugcugcuacuaaaaugucagaguguguacuuggacaaucaaaaagaguugauuuuuguggaaagggcuaucaucuuauguccuucccucagucagcaccucaugguguagucuucuugcaugugacuuaugucccugcacaagaaaagaacuucacaacugcuccugccauuugucaugauggaaaagcacacuuuccucgugaaggugucuuuguuucaaauggcacacacugguuuguaacacaaaggaauuuuuaugaaccacaaaucauuacuacagacaacacauuugugucugguaacugugauguuguaauaggaauugucaacaacacaguuuaugauccuuugcaaccugaauuagacucauucaaggaggaguuagauaaauauuuuaagaaucauacaucaccagauguugauuuaggugacaucucuggcauuaaugcuucaguuguaaacauucaaaaagaaauugaccgccucaaugagguugccaagaauuuaaaugaaucucucaucgaucuccaagaacuuggaaaguaugagcaguauauaaaauggccaugguacauuuggcuagguuuuauagcuggcuugauugccauaguaauggugacaauuaugcuuugcuguaugaccaguugcuguaguugucucaagggcuguuguucuuguggauccugcugcaaauuugaugaagacgacucugagccagugcucaaaggagucaaauuacauuacacauaaggacuagucccuguucccagagcccacuuuuuuuucuuuuuuugaaauaaaauagccugucuuucagaucucaaaggcucuuuucagagccaccaaaaaaaaaaaaaaaaaaaaaaaaaaaaaaaaaaaaaaaaaaaaaaaaaaaaaaaaaaaaaaaaaaaaaaaaaaaaaaaaaaaaaaaaaaaaaaaaaaaaa

SEQ ID NO: 12207 - RNA, 4094 nt, Artificial Sequence
  SARS-CoV-2/Guangdong/20SF028/2020__EPI_ISL_403936 spike protein mRNA wt (1-1273)
aggagagucccgcagucggcguccagcggcucugcuuguucgugugugugucguugcaggccuuauucaagcuuaccauguuuguuuuucuuguuuuauugccacuagucucuagucaguguguuaaucuuacaaccagaacucaauuacccccugcauacacuaauucuuucacacgugguguuuauuacccugacaaaguuuucagauccucaguuuuauauucaacucaggacuuguucuuaccuuucuuuuccaauguuacuugguuccaugcuauacaugucucugggaccaaugguacuaagagguuugauaacccuguccuaccauuuaaugaugguguuuauuuugcuuccacugagaagucuaacauaauaagaggcuggauuuuugguacuacuuuagauucgaagacccagucccuacuuauuguuaauaacgcuacuaauguuguuauuaaagucugugaauuucaauuuuguaaugauccauuuuuggguguuuauuaccacaaaaacaacaaaaguuggauggaaagugaguucagaguuuauucuagugcgaauaauugcacuuuugaauaugucucucagccuuuucuuauggaccuugaaggaaaacaggguaauuucaaaaaucuuagggaauuuguguuuaagaauauugaugguuauuuuaaaauauauucuaagcacacgccuauuaauuuagugcgugaucucccucaggguuuuucggcuuuagaaccauugguagauuugccaauagguauuaacaucacuagguuucaaacuuuacuugcuuuacauagaaguuauuugacuccuggugauucuucuucagguuggacagcuggugcugcagcuuauuauguggguuaucuucaaccuaggacuuuucuauuaaaauauaaugaaaauggaaccauuacagaugcuguagacugugcacuugacccucucucagaaacaaaguguacguugaaauccuucacuguagaaaaaggaaucuaucaaacuucuaacuuuagaguccaaccaacagaaucuauuguuagauuuccuaauauuacaaacuugugcccuuuuggugaaguuuuuaacgccaccagauuugcaucuguuuaugcuuggaacaggaagagaaucagcaacuguguugcugauuauucuguccuauauaauuccgcaucauuuuccacuuuuaaguguuauggagugucuccuacuaaauuaaaugaucucugcuuuacuaaugucuaugcagauucauuuguaauuagaggugaugaagucagacaaaucgcuccagggcaaacuggaaagauugcugauuauaauuauaaauuaccagaugauuuuacaggcugcguuauagcuuggaauucuaacaaucuugauucuaagguuggugguaauuauaauuaccuguauagauuguuuaggaagucuaaucucaaaccuuuugagagagauauuucaacugaaaucuaucaggccgguagcacaccuuguaaugguguugaagguuuuaauuguuacuuuccuuuacaaucauaugguuuccaacccacuaaugguguugguuaccaaccauacagaguaguaguacuuucuuuugaacuucuacaugcaccagcaacuguuuguggaccuaaaaagucuacuaauuugguuaaaaacaaaugugucaauuucaacuucaaugguuuaacaggcacagguguucuuacugagucuaacaaaaaguuucugccuuuccaacaauuuggcagagacauugcugacacuacugaugcuguccgugauccacagacacuugagauucuugacauuacaccauguucuuuugguggugucaguguuauaacaccaggaacaaauacuucuaaccagguugcuguucuuuaucaggauguuaacugcacagaagucccuguugcuauucaugcagaucaacuuacuccuacuuggcguguuuauucuacagguucuaauguuuuucaaacacgugcaggcuguuuaauaggggcugaacaugucaacaacucauaugagugugacauacccauuggugcagguauaugcgcuaguuaucagacucagacuaauucuccucggcgggcacguaguguagcuagucaauccaucauugccuacacuaugucacuuggugcagaaaauucaguugcuuacucuaauaacucuauugccauacccacaaauuuuacuauuaguguuaccacagaaauucuaccagugucuaugaccaagacaucaguagauuguacaauguacauuuguggugauucaacugaaugcagcaaucuuuuguugcaauauggcaguuuuuguacacaauuaaaccgugcuuuaacuggaauagcuguugaacaagacaaaaacacccaagaaguuuuugcacaagucaaacaaauuuacaaaacaccaccaauuaaagauuuuggugguuuuaauuuuucacaaauauuaccagauccaucaaaaccaagcaagaggucauuuauugaagaucuacuuuucaacaaagugacacuugcagaugcuggcuucaucaaacaauauggugauugccuuggugauauugcugcuagagaccucauuugugcacaaaaguuuaacggccuuacuguuuugccaccuuugcucacagaugaaaugauugcucaauacacuucugcacuguuagcggguacaaucacuucugguuggaccuuuggugcaggugcugcauuacaaauaccauuugcuaugcaaauggcuuauagguuuaaugguauuggaguuacacagaauguucucuaugagaaccaaaaauugauugccaaccaauuuaauagugcuauuggcaaaauucaagacucacuuucuuccacagcaagugcacuuggaaaacuucaagauguggucaaccaaaaugcacaagcuuuaaacacgcuuguuaaacaacuuagcuccaauuuuggugcaauuucaaguguuuuaaaugauauccuuucacgucuugacaaaguugaggcugaagugcaaauugauagguugaucacaggcagacuucaaaguuugcagacauaugugacucaacaauuaauuagagcugcagaaaucagagcuucugcuaaucuugcugcuacuaaaaugucagaguguguacuuggacaaucaaaaagaguugauuuuuguggaaagggcuaucaucuuauguccuucccucagucagcaccucaugguguagucuucuugcaugugacuuaugucccugcacaagaaaagaacuucacaacugcuccugccauuugucaugauggaaaagcacacuuuccucgugaaggugucuuuguuucaaauggcacacacugguuuguaacacaaaggaauuuuuaugaaccacaaaucauuacuacagacaacacauuugugucugguaacugugauguuguaauaggaauugucaacaacacaguuuaugauccuuugcaaccugaauuagacucauucaaggaggaguuagauaaauauuuuaagaaucauacaucaccagauguugauuuaggugacaucucuggcauuaaugcuucaguuguaaacauucaaaaagaaauugaccgccucaaugagguugccaagaauuuaaaugaaucucucaucgaucuccaagaacuuggaaaguaugagcaguauauaaaauggccaugguacauuuggcuagguuuuauagcuggcuugauugccauaguaauggugacaauuaugcuuugcuguaugaccaguugcuguaguugucucaagggcuguuguucuuguggauccugcugcaaauuugaugaagacgacucugagccagugcucaaaggagucaaauuacauuacacauaaggacuagucccuguucccagagcccacuuuuuuuucuuuuuuugaaauaaaauagccugucuuucagaucucaaaggcucuuuucagagccaccaaaaaaaaaaaaaaaaaaaaaaaaaaaaaaaaaaaaaaaaaaaaaaaaaaaaaaaaaaaaaaaaaaaaaaaaaaaaaaaaaaaaaaaaaaaaaaaaaaaaa

SEQ ID NO: 12208 - RNA, 4094 nt, Artificial Sequence
  SARS-CoV-2/Shenzhen/SZTH-001/2020__EPI_ISL_406592 spike protein mRNA wt (1-1273)
aggagagucccgcagucggcguccagcggcucugcuuguucgugugugugucguugcaggccuuauucaagcuuaccauguuuguuuuucuuguuuuauugccacuagucucuagucaguguguuaaucuuacaaccagaacucaauuacccccugcauacacuaauucuuucacacgugguguuuauuacccugacaaaguuuucagauccucaguuuuacauucaacucaggacuuguucuuaccuuucuuuuccaauguuacuugguuccaugcuauacaugucucugggaccaaugguacuaagagguuugauaacccuguccuaccauuuaaugaugguguuuauuuugcuuccacugagaagucuaacauaauaagaggcuggauuuuugguacuacuuuagauucgaagacccagucccuacuuauuguuaauaacgcuacuaauguuguuauuaaagucugugaauuucaauuuuguaaugauccauuuuuggguguuuauuaccacaaaaacaacaaaaguuggauggaaagugaguucagaguuuauucuagugcgaauaauugcacuuuugaauaugucucucagccuuuucuuauggaccuugaaggaaaacaggguaauuucaaaaaucuuagggaauuuguguuuaagaauauugaugguuauuuuaaaauauauucuaagcacacgccuauuaauuuagugcgugaucucccucaggguuuuucggcuuuagaaccauugguagauuugccaauagguauuaacaucacuagguuucaaacuuuacuugcuuuacauagaaguuauuugacuccuggugauucuucuucagguuggacagcuggugcugcagcuuauuauguggguuaucuucaaccuaggacuuuucuauuaaaauauaaugaaaauggaaccauuacagaugcuguagacugugcacuugacccucucucagaaacaaaguguacguugaaauccuucacuguagaaaaaggaaucuaucaaacuucuaacuuuagaguccaaccaacagaaucuauuguuagauuuccuaauauuacaaacuugugcccuuuuggugaaguuuuuaacgccaccagauuugcaucuguuuaugcuuggaacaggaagagaaucagcaacuguguugcugauuauucuguccuauauaauuccgcaucauuuuccacuuuuaaguguuauggagugucuccuacuaaauuaaaugaucucugcuuuacuaaugucuaugcagauucauuuguaauuagaggugaugaagucagacaaaucgcuccagggcaaacuggaaagauugcugauuauaauuauaaauuaccagaugauuuuacaggcugcguuauagcuuggaauucuaacaaucuugauucuaagguuggugguaauuauaauuaccuguauagauuguuuaggaagucuaaucucaaaccuuuugagagagauauuucaacugaaaucuaucaggccgguagcacaccuuguaaugguguugaagguuuuaauuguuacuuuccuuuacaaucauaugguuuccaacccacuaaugguguugguuaccaaccauacagaguaguaguacuuucuuuugaacuucuacaugcaccagcaacuguuuguggaccuaaaaagucuacuaauuugguuaaaaacaaaugugucaauuucaacuucaaugguuuaacaggcacagguguucuuacugagucuaacaaaaaguuucugccuuuccaacaauuuggcagagacauugcugacacuacugaugcuguccgugauccacagacacuugagauucuugacauuacaccauguucuuuugguggugucaguguuauaacaccaggaacaaauacuucuaaccagguugcuguucuuuaucaggauguuaacugcacagaagucccuguugcuauucaugcagaucaacuuacuccuacuuggcguguuuauucuacagguucuaauguuuuucaaacacgugcaggcuguuuaauaggggcugaacaugucaacaacucauaugagugugacauacccauuggugcagguauaugcgcuaguuaucagacucagacuaauucuccucggcgggcacguaguguagcuagucaauccaucauugccuacacuaugucacuuggugcagaaaauucaguugcuuacucuaauaacucuauugccauacccacaaauuuuacuauuaguguuaccacagaaauucuaccagugucuaugaccaagacaucaguagauuguacaauguacauuuguggugauucaacugaaugcagcaaucuuuuguugcaauauggcaguuuuuguacacaauuaaaccgugcuuuaacuggaauagcuguugaacaagacaaaaacacccaagaaguuuuugcacaagucaaacaaauuuacaaaacaccaccaauuaaagauuuuggugguuuuaauuuuucacaaauauuaccagauccaucaaaaccaagcaagaggucauuuauugaagaucuacuuuucaacaaagugacacuugcagaugcuggcuucaucaaacaauauggugauugccuuggugauauugcugcuagagaccucauuugugcacaaaaguuuaacggccuuacuguuuugccaccuuugcucacagaugaaaugauugcucaauacacuucugcacuguuagcggguacaaucacuucugguuggaccuuuggugcaggugcugcauuacaaauaccauuugcuaugcaaauggcuuauagguuuaaugguauuggaguuacacagaauguucucuaugagaaccaaaaauugauugccaaccaauuuaauagugcuauuggcaaaauucaagacucacuuucuuccacagcaagugcacuuggaaaacuucaagauguggucaaccaaaaugcacaagcuuuaaacacgcuuguuaaacaacuuagcuccaauuuuggugcaauuucaaguguuuuaaaugauauccuuucacgucuugacaaaguugaggcugaagugcaaauugauagguugaucacaggcagacuucaaaguuugcagacauaugugacucaacaauuaauuagagcugcagaaaucagagcuucugcuaaucuugcugcuacuaaaaugucagaguguguacuuggacaaucaaaaagaguugauuuuuguggaaagggcuaucaucuuauguccuucccucagucagcaccucaugguguagucuucuugcaugugacuuaugucccugcacaagaaaagaacuucacaacugcuccugccauuugucaugauggaaaagcacacuuuccucgugaaggugucuuuguuucaaauggcacacacugguuuguaacacaaaggaauuuuuaugaaccacaaaucauuacuacagacaacacauuugugucugguaacugugauguucuaauaggaauugucaacaacacaguuuaugauccuuugcaaccugaauuagacucauucaaggaggaguuagauaaauauuuuaagaaucauacaucaccagauguugauuuaggugacaucucuggcauuaaugcuucaguuguaaacauucaaaaagaaauugaccgccucaaugagguugccaagaauuuaaaugaaucucucaucgaucuccaagaacuuggaaaguaugagcaguauauaaaauggccaugguacauuuggcuagguuuuauagcuggcuugauugccauaguaauggugacaauuaugcuuugcuguaugaccaguugcuguaguugucucaagggcuguuguucuuguggauccugcugcaaauuugaugaagacgacucugggccagugcucaaaggagucaaauuacauuacacauaaggacuagucccuguucccagagcccacuuuuuuuucuuuuuuugaaauaaaauagccugucuuucagaucucaaaggcucuuuucagagccaccaaaaaaaaaaaaaaaaaaaaaaaaaaaaaaaaaaaaaaaaaaaaaaaaaaaaaaaaaaaaaaaaaaaaaaaaaaaaaaaaaaaaaaaaaaaaaaaaaaaaa

SEQ ID NO: 12209 - RNA, 4094 nt, Artificial Sequence
  SARS-CoV-2/Shenzhen/SZTH-004/2020__EPI_ISL_406595 spike protein mRNA wt (1-1273)
aggagagucccgcagucggcguccagcggcucugcuuguucgugugugugucguugcaggccuuauucaagcuuaccauguuuguuuuucuuguuuuauugccacuagucucuagucaguguguuaaucuuacaaccagaacucaauuacccccugcauacacuaauucuuucacacgugguguuuauuacccugacaaaguuuucagauccucaguuuuacauucaacucaggacuuguucuuaccuuucuuuuccaauguuacuugguuccaugcuauacaugucucugggaccaaugguacuaagagguuugauaacccuguccuaccauuuaaugaugguguuuauuuugcuuccacugagaagucuaacauaauaagaggcuggauuuuugguacuacuuuagauucgaagacccagucccuacuuauuguuaauaacgcuacuaauguuguuauuaaagucugugaauuucaauuuuguaaugauccauuuuuggguguuuauuaccacaaaaacaacaaaaguuggauggaaagugaguucagaguuuauucuagugcgaauaauugcacuuuugaauaugucucucagccuuuucuuauggaccuugaaggaaaacaggguaauuucaaaaaucuuagggaauuuguguuuaagaauauugaugguuauuuuaaaauauauucuaagcacacgccuauuaauuuagugcgugaucucccucaggguuuuucggcuuuagaaccauugguagauuugccaauagguauuaacaucacuagguuucaaacuuuacuugcuuuacauagaaguuauuugacuccuggugauucuucuucagguuggacagcuggugcugcagcuuauuauguggguuaucuucaaccuaggacuuuucuauuaaaauauaaugaaaauggaaccauuacagaugcuguagacugugcacuugacccucucucagaaacaaaguguacguugaaauccuucacuguagaaaaaggaaucuaucaaacuucuaacuuuagaguccaaccaacagaaucuauuguuagauuuccuaauauuacaaacuugugcccuuuuggugaaguuuuuaacgccaccagauuugcaucuguuuaugcuugggacaggaagagaaucagcaacuguguugcuuauuauucuguccuauauaauuccgcaucauuuuccacuuuuaaguguuauggagugucuccuacuaaauuaaaugaucucugcuuuacuaaugucuaugcagauucauuuguaauuagaggugaugaagucagacaaaucgcuccagggcaaacuggaaagauugcugauuauaauuauaaauuaccagaugauuuuacaggcugcguuauagcuuggaauucuaacaaucuugauucuaagguuggugguaauuauaauuaccuguauagauuguuuaggaagucuaaucucaaaccuuuugagagagauauuucaacugaaaucuaucaggccgguagcacaccuuguaaugguguugaagguuuuaauuguuacuuuccuuuacaaucauaugguuuccaacccacuaaugguguugguuaccaaccauacagaguaguaguacuuucuuuugaacuucuacaugcaccagcaacuguuuguggaccuaaaaagucuacuaauuugguuaaaaacaaaugugucaauuucaacuucaaugguuuaacaggcacagguguucuuacugagucuaacaaaaaguuucugccuuuccaacaauuuggcagagacauugcugacacuacugaugcuguccgugauccacagacacuugagauucuugacauuacaccauguucuuuugguggugucaguguuauaacaccaggaacaaauacuucuaaccagguugcuguucuuuaucaggauguuaacugcacagaagucccuguugcuauucaugcagaucaacuuacuccuacuuggcguguuuauucuacagguucuaauguuuuucaaacacgugcaggcuguuuaauaggggcugaacaugucaacaacucauaugagugugacauacccauuggugcaggcauaugcgcuaguuaucagacucagacuaauucuccucggcgggcacguaguguagcuagucaauccaucauugccuacacuaugucacuuggugcagaaaauucaguugcuuacucuaauaacucuauugccauacccacaaauuuuacuauuaguguuaccacagaaauucuaccagugucuaugaccaagacaucaguagauuguacaauguacauuuguggugauucaacugaaugcagcaaucuuuuguugcaauauggcaguuuuuguacacaauuaaaccgugcuuuaacuggaauagcuguugaacaagacaaaaacacccaagaaguuuuugcacaagucaaacaaauuuacaaaacaccaccaauuaaagauuuuggugguuuuaauuuuucacaaauauuaccagauccaucaaaaccaagcaagaggucauuuauugaagaucuacuuuucaacaaagugacacuugcagaugcuggcuucaucaaacaauauggugauugccuuggugauauugcugcuagagaccucauuugugcacaaaaguuuaacggccuuacuguuuugccaccuuugcucacagaugaaaugauugcucaauacacuucugcacuguuagcggguacaaucacuucugguuggaccuuuggugcaggugcugcauuacaaauaccauuugcuaugcaaauggcuuauagguuuaaugguauuggaguuacacagaauguucucuaugagaaccaaaaauugauugccaaccaauuuaauagugcuauuggcaaaauucaagacucacuuucuuccacagcaagugcacuuggaaaacuucaagauguggucaaccaaaaugcacaagcuuuaaacacgcuuguuaaacaacuuagcuccaauuuuggugcaauuucaaguguuuuaaaugauauccuuucacgucuugacaaaguugaggcugaagugcaaauugauagguugaucacaggcagacuucaaaguuugcagacauaugugacucaacaauuaauuagagcugcagaaaucagagcuucugcuaaucuugcugcuacuaaaaugucagaguguguacuuggacaaucaaaaagaguugauuuuuguggaaagggcuaucaucuuauguccuucccucagucagcaccucaugguguagucuucuugcaugugacuuaugucccugcacaagaaaagaacuucacaacugcuccugccauuugucaugauggaaaagcacacuuuccucgugaaggugucuuuguuucaaauggcacacacugguuuguaacacaaaggaauuuuuaugaaccacaaaucauuacuacagacaacacauuugugucugguaacugugauguuguaauaggaauugucaacaacacaguuuaugauccuuugcaaccugaauuagacucauucaaggaggaguuagauaaauauuuuaagaaucauacaucaccagauguugauuuaggugacaucucuggcauuaaugcuucaguuguaaacauucaaaaagaaauugaccgccucaaugagguugccaagaauuuaaaugaaucucucaucgaucuccaagaacuuggaaaguaugagcaguauauaaaauggccaugguacauuuggcuagguuuuauagcuggcuugauugccauaguaauggugacaauuaugcuuugcuguaugaccaguugcuguaguugucucaagggcuguuguucuuguggauccugcugcaaauuugaugaagacgacucugagccagugcucaaaggagucaaauuacauuacacauaaggacuagucccuguucccagagcccacuuuuuuuucuuuuuuugaaauaaaauagccugucuuucagaucucaaaggcucuuuucagagccaccaaaaaaaaaaaaaaaaaaaaaaaaaaaaaaaaaaaaaaaaaaaaaaaaaaaaaaaaaaaaaaaaaaaaaaaaaaaaaaaaaaaaaaaaaaaaaaaaaaaaa

SEQ ID NO: 12210 - RNA, 4094 nt, Artificial Sequence
  SARS-CoV-2/France/IDF0372/2020__EPI_ISL_406596 spike protein mRNA wt (1-1273)
aggagagucccgcagucggcguccagcggcucugcuuguucgugugugugucguugcaggccuuauucaagcuuaccauguuuguuuuucuuguuuuauugccacuagucucuagucaguguguuaaucuuacaaccagaacucaauuacccccugcauacacuaauucuuucacacgugguguuuauuacccugacaaaguuuucagauccucaguuuuacauucaacucaggacuuguucuuaccuuucuuuuccaauguuacuugguuccaugcuauacaugucucugggaccaaugguacuaagagguuugauaacccuguccuaccauuuaaugaugguguuuauuuugcuuccacugagaagucuaacauaauaagaggcuggauuuuugguacuacuuuagauucgaagacccagucccuacuuauuguuaauaacgcuacuaauguuguuauuaaagucugugaauuucaauuuuguaaugauccauuuuuggguguuuauuaccacaaaaacaacaaaaguuggauggaaagugaguucagaguuuauucuagugcgaauaauugcacuuuugaauaugucucucagccuuuucuuauggaccuugaaggaaaacaggguaauuucaaaaaucuuagggaauuuguguuuaagaauauugaugguuauuuuaaaauauauucuaagcacacgccuauuaauuuagugcgugaucucccucaggguuuuucggcuuuagaaccauugguagauuugccaauagguauuaacaucacuagguuucaaacuuuacuugcuuuacauagaaguuauuugacuccuggugauucuucuucagguuggacagcuggugcugcagcuuauuauguggguuaucuucaaccuaggacuuuucuauuaaaauauaaugaaaauggaaccauuacagaugcuguagacugugcacuugacccucucucagaaacaaaguguacguugaaauccuucacuguagaaaaaggaaucuaucaaacuucuaacuuuagaguccaaccaacagaaucuauuguuagauuuccuaauauuacaaacuugugcccuuuuggugaaguuuuuaacgccaccagauuugcaucuguuuaugcuuggaacaggaagagaaucagcaacuguguugcugauuauucuuuccuauauaauuccgcaucauuuuccacuuuuaaguguuauggagugucuccuacuaaauuaaaugaucucugcuuuacuaaugucuaugcagauucauuuguaauuagaggugaugaagucagacaaaucgcuccagggcaaacuggaaagauugcugauuauaauuauaaauuaccagaugauuuuacaggcugcguuauagcuuggaauucuaacaaucuugauucuaagguuggugguaauuauaauuaccuguauagauuguuuaggaagucuaaucucaaaccuuuugagagagauauuucaacugaaaucuaucaggccgguagcacaccuuguaaugguguugaagguuuuaauuguuacuuuccuuuacaaucauaugguuuccaacccacuaaugguguugguuaccaaccauacagaguaguaguacuuucuuuugaacuucuacaugcaccagcaacuguuuguggaccuaaaaagucuacuaauuugguuaaaaacaaaugugucaauuucaacuucaaugguuuaacaggcacagguguucuuacugagucuaacaaaaaguuucugccuuuccaacaauuuggcagagacauugcugacacuacugaugcuguccgugauccacagacacuugagauucuugacauuacaccauguucuuuugguggugucaguguuauaacaccaggaacaaauacuucuaaccagguugcuguucuuuaucaggauguuaacugcacagaagucccuguugcuauucaugcagaucaacuuacuccuacuuggcguguuuauucuacagguucuaauguuuuucaaacacgugcaggcuguuuaauaggggcugaacaugucaacaacucauaugagugugacauacccauuggugcagguauaugcgcuaguuaucagacucagacuaauucuccucggcgggcacguaguguagcuagucaauccaucauugccuacacuaugucacuuggugcagaaaauucaguugcuuacucuaauaacucuauugccauacccacaaauuuuacuauuaguguuaccacagaaauucuaccagugucuaugaccaagacaucaguagauuguacaauguacauuuguggugauucaacugaaugcagcaaucuuuuguugcaauauggcaguuuuuguacacaauuaaaccgugcuuuaacuggaauagcuguugaacaagacaaaaacacccaagaaguuuuugcacaagucaaacaaauuuacaaaacaccaccaauuaaagauuuuggugguuuuaauuuuucacaaauauuaccagauccaucaaaaccaagcaagaggucauuuauugaagaucuacuuuucaacaaagugacacuugcagaugcuggcuucaucaaacaauauggugauugccuuggugauauugcugcuagagaccucauuugugcacaaaaguuuaacggccuuacuguuuugccaccuuugcucacagaugaaaugauugcucaauacacuucugcacuguuagcggguacaaucacuucugguuggaccuuuggugcaggugcugcauuacaaauaccauuugcuaugcaaauggcuuauagguuuaaugguauuggaguuacacagaauguucucuaugagaaccaaaaauugauugccaaccaauuuaauagugcuauuggcaaaauucaagacucacuuucuuccacagcaagugcacuuggaaaacuucaagauguggucaaccaaaaugcacaagcuuuaaacacgcuuguuaaacaacuuagcuccaauuuuggugcaauuucaaguguuuuaaaugauauccuuucacgucuugacaaaguugaggcugaagugcaaauugauagguugaucacaggcagacuucaaaguuugcagacauaugugacucaacaauuaauuagagcugcagaaaucagagcuucugcuaaucuugcugcuacuaaaaugucagaguguguacuuggacaaucaaaaagaguugauuuuuguggaaagggcuaucaucuuauguccuucccucagucagcaccucaugguguagucuucuugcaugugacuuaugucccugcacaagaaaagaacuucacaacugcuccugccauuugucaugauggaaaagcacacuuuccucgugaaggugucuuuguuucaaauggcacacacugguuuguaacacaaaggaauuuuuaugaaccacaaaucauuacuacagacaacacauuugugucugguaacugugauguuguaauaggaauugucaacaacacaguuuaugauccuuugcaaccugaauuagacucauucaaggaggaguuagauaaauauuuuaagaaucauacaucaccagauguugauuuaggugacaucucuggcauuaaugcuucaguuguaaacauucaaaaagaaauugaccgccucaaugagguugccaagaauuuaaaugaaucucucaucgaucuccaagaacuuggaaaguaugagcaguauauaaaauggccaugguacauuuggcuagguuuuauagcuggcuugauugccauaguaauggugacaauuaugcuuugcuguaugaccaguugcuguaguugucucaagggcuguuguucuuguggauccugcugcaaauuugaugaagacgacucugagccagugcucaaaggagucaaauuacauuacacauaaggacuagucccuguucccagagcccacuuuuuuuucuuuuuuugaaauaaaauagccugucuuucagaucucaaaggcucuuuucagagccaccaaaaaaaaaaaaaaaaaaaaaaaaaaaaaaaaaaaaaaaaaaaaaaaaaaaaaaaaaaaaaaaaaaaaaaaaaaaaaaaaaaaaaaaaaaaaaaaaaaaaa

SEQ ID NO: 12211 - RNA, 4094 nt, Artificial Sequence
  SARS-CoV-2/Australia/VIC01/2020__EPI_ISL_406844 spike protein mRNA wt (1-1273)
aggagagucccgcagucggcguccagcggcucugcuuguucgugugugugucguugcaggccuuauucaagcuuaccauguuuguuuuucuuguuuuauugccacuagucucuagucaguguguuaaucuuacaaccagaacucaauuacccccugcauacacuaauucuuucacacgugguguuuauuacccugacaaaguuuucagauccucaguuuuacauucaacucaggacuuguucuuaccuuucuuuuccaauguuacuugguuccaugcuauacaugucucugggaccaaugguacuaagagguuugauaacccuguccuaccauuuaaugaugguguuuauuuugcuuccacugagaagucuaacauaauaagaggcuggauuuuugguacuacuuuagauucgaagacccagucccuacuuauuguuaauaacgcuacuaauguuguuauuaaagucugugaauuucaauuuuguaaugauccauuuuuggguguuuauuaccacaaaaacaacaaaaguuggauggaaagugaguucagaguuuauucuagugcgaauaauugcacuuuugaauaugucucucagccuuuucuuauggaccuugaaggaaaacaggguaauuucaaaaaucuuagggaauuuguguuuaagaauauugaugguuauuuuaaaauauauucuaagcacacgccuauuaauuuagugcgugaucucccucaggguuuuucggcuuuagaaccauugguagauuugccaauagguauuaacaucacuagguuucaaacuuuacuugcuuuacauagaagguauuugacuccuggugauucuucuucagguuggacagcuggugcugcagcuuauuauguggguuaucuucaaccuaggacuuuucuauuaaaauauaaugaaaauggaaccauuacagaugcuguagacugugcacuugacccucucucagaaacaaaguguacguugaaauccuucacuguagaaaaaggaaucuaucaaacuucuaacuuuagaguccaaccaacagaaucuauuguuagauuuccuaauauuacaaacuugugcccuuuuggugaaguuuuuaacgccaccagauuugcaucuguuuaugcuuggaacaggaagagaaucagcaacuguguugcugauuauucuguccuauauaauuccgcaucauuuuccacuuuuaaguguuauggagugucuccuacuaaauuaaaugaucucugcuuuacuaaugucuaugcagauucauuuguaauuagaggugaugaagucagacaaaucgcuccagggcaaacuggaaagauugcugauuauaauuauaaauuaccagaugauuuuacaggcugcguuauagcuuggaauucuaacaaucuugauucuaagguuggugguaauuauaauuaccuguauagauuguuuaggaagucuaaucucaaaccuuuugagagagauauuucaacugaaaucuaucaggccgguagcacaccuuguaaugguguugaagguuuuaauuguuacuuuccuuuacaaucauaugguuuccaacccacuaaugguguugguuaccaaccauacagaguaguaguacuuucuuuugaacuucuacaugcaccagcaacuguuuguggaccuaaaaagucuacuaauuugguuaaaaacaaaugugucaauuucaacuucaaugguuuaacaggcacagguguucuuacugagucuaacaaaaaguuucugccuuuccaacaauuuggcagagacauugcugacacuacugaugcuguccgugauccacagacacuugagauucuugacauuacaccauguucuuuugguggugucaguguuauaacaccaggaacaaauacuucuaaccagguugcuguucuuuaucaggauguuaacugcacagaagucccuguugcuauucaugcagaucaacuuacuccuacuuggcguguuuauucuacagguucuaauguuuuucaaacacgugcaggcuguuuaauaggggcugaacaugucaacaacucauaugagugugacauacccauuggugcagguauaugcgcuaguuaucagacucagacuaauucuccucggcgggcacguaguguagcuagucaauccaucauugccuacacuaugucacuuggugcagaaaauucaguugcuuacucuaauaacucuauugccauacccacaaauuuuacuauuaguguuaccacagaaauucuaccagugucuaugaccaagacaucaguagauuguacaauguacauuuguggugauucaacugaaugcagcaaucuuuuguugcaauauggcaguuuuuguacacaauuaaaccgugcuuuaacuggaauagcuguugaacaagacaaaaacacccaagaaguuuuugcacaagucaaacaaauuuacaaaacaccaccaauuaaagauuuuggugguuuuaauuuuucacaaauauuaccagauccaucaaaaccaagcaagaggucauuuauugaagaucuacuuuucaacaaagugacacuugcagaugcuggcuucaucaaacaauauggugauugccuuggugauauugcugcuagagaccucauuugugcacaaaaguuuaacggccuuacuguuuugccaccuuugcucacagaugaaaugauugcucaauacacuucugcacuguuagcggguacaaucacuucugguuggaccuuuggugcaggugcugcauuacaaauaccauuugcuaugcaaauggcuuauagguuuaaugguauuggaguuacacagaauguucucuaugagaaccaaaaauugauugccaaccaauuuaauagugcuauuggcaaaauucaagacucacuuucuuccacagcaagugcacuuggaaaacuucaagauguggucaaccaaaaugcacaagcuuuaaacacgcuuguuaaacaacuuagcuccaauuuuggugcaauuucaaguguuuuaaaugauauccuuucacgucuugacaaaguugaggcugaagugcaaauugauagguugaucacaggcagacuucaaaguuugcagacauaugugacucaacaauuaauuagagcugcagaaaucagagcuucugcuaaucuugcugcuacuaaaaugucagaguguguacuuggacaaucaaaaagaguugauuuuuguggaaagggcuaucaucuuauguccuucccucagucagcaccucaugguguagucuucuugcaugugacuuaugucccugcacaagaaaagaacuucacaacugcuccugccauuugucaugauggaaaagcacacuuuccucgugaaggugucuuuguuucaaauggcacacacugguuuguaacacaaaggaauuuuuaugaaccacaaaucauuacuacagacaacacauuugugucugguaacugugauguuguaauaggaauugucaacaacacaguuuaugauccuuugcaaccugaauuagacucauucaaggaggaguuagauaaauauuuuaagaaucauacaucaccagauguugauuuaggugacaucucuggcauuaaugcuucaguuguaaacauucaaaaagaaauugaccgccucaaugagguugccaagaauuuaaaugaaucucucaucgaucuccaagaacuuggaaaguaugagcaguauauaaaauggccaugguacauuuggcuagguuuuauagcuggcuugauugccauaguaauggugacaauuaugcuuugcuguaugaccaguugcuguaguugucucaagggcuguuguucuuguggauccugcugcaaauuugaugaagacgacucugagccagugcucaaaggagucaaauuacauuacacauaaggacuagucccuguucccagagcccacuuuuuuuucuuuuuuugaaauaaaauagccugucuuucagaucucaaaggcucuuuucagagccaccaaaaaaaaaaaaaaaaaaaaaaaaaaaaaaaaaaaaaaaaaaaaaaaaaaaaaaaaaaaaaaaaaaaaaaaaaaaaaaaaaaaaaaaaaaaaaaaaaaaaa

SEQ ID NO: 12212 - RNA, 4094 nt, Artificial Sequence
  SARS-CoV-2/Germany/BavPat1/2020__EPI_ISL_406862 spike protein mRNA wt (1-1273)
aggagagucccgcagucggcguccagcggcucugcuuguucgugugugugucguugcaggccuuauucaagcuuaccauguuuguuuuucuuguuuuauugccacuagucucuagucaguguguuaaucuuacaaccagaacucaauuacccccugcauacacuaauucuuucacacgugguguuuauuacccugacaaaguuuucagauccucaguuuuacauucaacucaggacuuguucuuaccuuucuuuuccaauguuacuugguuccaugcuauacaugucucugggaccaaugguacuaagagguuugauaacccuguccuaccauuuaaugaugguguuuauuuugcuuccacugagaagucuaacauaauaagaggcuggauuuuugguacuacuuuagauucgaagacccagucccuacuuauuguuaauaacgcuacuaauguuguuauuaaagucugugaauuucaauuuuguaaugauccauuuuuggguguuuauuaccacaaaaacaacaaaaguuggauggaaagugaguucagaguuuauucuagugcgaauaauugcacuuuugaauaugucucucagccuuuucuuauggaccuugaaggaaaacaggguaauuucaaaaaucuuagggaauuuguguuuaagaauauugaugguuauuuuaaaauauauucuaagcacacgccuauuaauuuagugcgugaucucccucaggguuuuucggcuuuagaaccauugguagauuugccaauagguauuaacaucacuagguuucaaacuuuacuugcuuuacauagaaguuauuugacuccuggugauucuucuucagguuggacagcuggugcugcagcuuauuauguggguuaucuucaaccuaggacuuuucuauuaaaauauaaugaaaauggaaccauuacagaugcuguagacugugcacuugacccucucucagaaacaaaguguacguugaaauccuucacuguagaaaaaggaaucuaucaaacuucuaacuuuagaguccaaccaacagaaucuauuguuagauuuccuaauauuacaaacuugugcccuuuuggugaaguuuuuaacgccaccagauuugcaucuguuuaugcuuggaacaggaagagaaucagcaacuguguugcugauuauucuguccuauauaauuccgcaucauuuuccacuuuuaaguguuauggagugucuccuacuaaauuaaaugaucucugcuuuacuaaugucuaugcagauucauuuguaauuagaggugaugaagucagacaaaucgcuccagggcaaacuggaaagauugcugauuauaauuauaaauuaccagaugauuuuacaggcugcguuauagcuuggaauucuaacaaucuugauucuaagguuggugguaauuauaauuaccuguauagauuguuuaggaagucuaaucucaaaccuuuugagagagauauuucaacugaaaucuaucaggccgguagcacaccuuguaaugguguugaagguuuuaauuguuacuuuccuuuacaaucauaugguuuccaacccacuaaugguguugguuaccaaccauacagaguaguaguacuuucuuuugaacuucuacaugcaccagcaacuguuuguggaccuaaaaagucuacuaauuugguuaaaaacaaaugugucaauuucaacuucaaugguuuaacaggcacagguguucuuacugagucuaacaaaaaguuucugccuuuccaacaauuuggcagagacauugcugacacuacugaugcuguccgugauccacagacacuugagauucuugacauuacaccauguucuuuugguggugucaguguuauaacaccaggaacaaauacuucuaaccagguugcuguucuuuaucaggguguuaacugcacagaagucccuguugcuauucaugcagaucaacuuacuccuacuuggcguguuuauucuacagguucuaauguuuuucaaacacgugcaggcuguuuaauaggggcugaacaugucaacaacucauaugagugugacauacccauuggugcagguauaugcgcuaguuaucagacucagacuaauucuccucggcgggcacguaguguagcuagucaauccaucauugccuacacuaugucacuuggugcagaaaauucaguugcuuacucuaauaacucuauugccauacccacaaauuuuacuauuaguguuaccacagaaauucuaccagugucuaugaccaagacaucaguagauuguacaauguacauuuguggugauucaacugaaugcagcaaucuuuuguugcaauauggcaguuuuuguacacaauuaaaccgugcuuuaacuggaauagcuguugaacaagacaaaaacacccaagaaguuuuugcacaagucaaacaaauuuacaaaacaccaccaauuaaagauuuuggugguuuuaauuuuucacaaauauuaccagauccaucaaaaccaagcaagaggucauuuauugaagaucuacuuuucaacaaagugacacuugcagaugcuggcuucaucaaacaauauggugauugccuuggugauauugcugcuagagaccucauuugugcacaaaaguuuaacggccuuacuguuuugccaccuuugcucacagaugaaaugauugcucaauacacuucugcacuguuagcggguacaaucacuucugguuggaccuuuggugcaggugcugcauuacaaauaccauuugcuaugcaaauggcuuauagguuuaaugguauuggaguuacacagaauguucucuaugagaaccaaaaauugauugccaaccaauuuaauagugcuauuggcaaaauucaagacucacuuucuuccacagcaagugcacuuggaaaacuucaagauguggucaaccaaaaugcacaagcuuuaaacacgcuuguuaaacaacuuagcuccaauuuuggugcaauuucaaguguuuuaaaugauauccuuucacgucuugacaaaguugaggcugaagugcaaauugauagguugaucacaggcagacuucaaaguuugcagacauaugugacucaacaauuaauuagagcugcagaaaucagagcuucugcuaaucuugcugcuacuaaaaugucagaguguguacuuggacaaucaaaaagaguugauuuuuguggaaagggcuaucaucuuauguccuucccucagucagcaccucaugguguagucuucuugcaugugacuuaugucccugcacaagaaaagaacuucacaacugcuccugccauuugucaugauggaaaagcacacuuuccucgugaaggugucuuuguuucaaauggcacacacugguuuguaacacaaaggaauuuuuaugaaccacaaaucauuacuacagacaacacauuugugucugguaacugugauguuguaauaggaauugucaacaacacaguuuaugauccuuugcaaccugaauuagacucauucaaggaggaguuagauaaauauuuuaagaaucauacaucaccagauguugauuuaggugacaucucuggcauuaaugcuucaguuguaaacauucaaaaagaaauugaccgccucaaugagguugccaagaauuuaaaugaaucucucaucgaucuccaagaacuuggaaaguaugagcaguauauaaaauggccaugguacauuuggcuagguuuuauagcuggcuugauugccauaguaauggugacaauuaugcuuugcuguaugaccaguugcuguaguugucucaagggcuguuguucuuguggauccugcugcaaauuugaugaagacgacucugagccagugcucaaaggagucaaauuacauuacacauaaggacuagucccuguucccagagcccacuuuuuuuucuuuuuuugaaauaaaauagccugucuuucagaucucaaaggcucuuuucagagccaccaaaaaaaaaaaaaaaaaaaaaaaaaaaaaaaaaaaaaaaaaaaaaaaaaaaaaaaaaaaaaaaaaaaaaaaaaaaaaaaaaaaaaaaaaaaaaaaaaaaaa

SEQ ID NO: 12213 - RNA, 4094 nt, Artificial Sequence
  SARS-CoV-2/Wuhan/HBCDC-HB-02/2020__EPI_ISL_412978 spike protein mRNA wt (1-1273)
aggagagucccgcagucggcguccagcggcucugcuuguucgugugugugucguugcaggccuuauucaagcuuaccauguuuguuuuucuuguuuuauugccacuagucucuagucaguguguuaaucuuacaaccagaacucaauuacccccugcauacacuaauucuuucacacgugguguuuauuacccugacaaaguuuucagauccucaguuuuacauucaacucaggacuuguucuuaccuuucuuuuccaauguuacuugguuccaugcuauacaugucucugggaccaaugguacuaagagguuugauaacccuguccuaccauuuaaugaugguguuuauuuugcuuccacugagaagucuaacauaauaagaggcuggauuuuugguacuacuuuagauucgaagacccagucccuacuuauuguuaauaacgcuacuaauguuguuauuaaagucugugaauuucaauuuuguaaugauccauuuuuggguguuuauuaccacaaaaacaacaaaaguuggauggaaagugaguucagaguuuauucuagugcgaauaauugcacuuuugaauaugucucucagccuuuucuuauggaccuugaaggaaaacaggguaauuucaaaaaucuuagggaauuuguguuuaagaauauugaugguuauuuuaaaauauauucuaagcacacgccuauuaauuuagugcgugaucucccucaggguuuuucggcuuuagaaccauugguagauuugccaauagguauuaacaucacuagguuucaaacuuuacuugcuuuacauagaaguuauuugacuccuggugauucuucuucagguuggacagcuggugcugcagcuuauuauguggguuaucuucaaccuaggacuuuucuauuaaaauauaaugaaaauggaaccauuacagaugcuguagacugugcacuugacccucucucagaaacaaaguguacguugaaauccuucacuguagaaaaaggaaucuaucaaacuucuaacuuuagaguccaaccaacagaaucuauuguuagauuuccuaauauuacaaacuugugcccuuuuggugaaguuuuuaacgccaccagauuugcaucuguuuaugcuuggaacaggaagagaaucagcaacuguguugcugauuauucuguccuauauaauuccgcaucauuuuccacuuuuaaguguuauggagugucuccuacuaaauuaaaugaucucugcuuuacuaaugucuaugcagauucauuuguaauuagaggugaugaagucagacaaaucgcuccagggcaaacuggaaagauugcugauuauaauuauaaauuaccagaugauuuuacaggcugcguuauagcuuggaauucuaacaaucuugauucuaagguuggugguaauuauaauuaccuguauagauuguuuaggaagucuaaucucaaaccuuuugagagagauauuucaacugaaaucuaucaggccgguagcacaccuuguaaugguguugaagguuuuaauuguuacuuuccuuuacaaucauaugguuuccaacccacuaaugguguugguuaccaaccauacagaguaguaguacuuucuuuugaacuucuacaugcaccagcaacuguuuguggaccuaaaaagucuacuaauuugguuaaaaacaaaugugucaauuucaacuucaaugguuuaacaggcacagguguucuuacugagucuaacaaaaaguuucugccuuuccaacaauuuggcagagacauugcugacacuacugaugcuguccgugauccacagacacuugagauucuugacauuacaccauguucuuuugguggugucaguguuauaacaccaggaacaaauacuucuaaccagguugcuguucuuuaucaggauguuaacugcacagaagucccuguugcuauucaugcagaucaacuuacuccuacuuggcguguuuauucuacagguucuaauguuuuucaaacacgugcaggcuguuuaauaggggcugaacaugucaacaacucauaugagugugacauacccauuggugcagguauaugcgcuaguuaucagacucagacuaauucuccucggcgggcacguaguguagcuagucaauccaucauugccuacacuaugucacuuggugcagaaaauucaguugcuuacucuaauaacucuauugccauacccacaaauuuuacuauuaguguuaccacagaaauucuaccagugucuaugaccaagacaucaguagauuguacaauguacauuuguggugauucaacugaaugcagcaauuuuuuguugcaauauggcaguuuuuguacacaauuaaaccgugcuuuaacuggaauagcuguugaacaagacaaaaacacccaagaaguuuuugcacaagucaaacaaauuuacaaaacaccaccaauuaaagauuuuggugguuuuaauuuuucacaaauauuaccagauccaucaaaaccaagcaagaggucauuuauugaagaucuacuuuucaacaaagugacacuugcagaugcuggcuucaucaaacaauauggugauugccuuggugauauugcugcuagagaccucauuugugcacaaaaguuuaacggccuuacuguuuugccaccuuugcucacagaugaaaugauugcucaauacacuucugcacuguuagcggguacaaucacuucugguuggaccuuuggugcaggugcugcauuacaaauaccauuugcuaugcaaauggcuuauagguuuaaugguauuggaguuacacagaauguucucuaugagaaccaaaaauugauugccaaccaauuuaauagugcuauuggcaaaauucaagacucacuuucuuccacagcaagugcacuuggaaaacuucaagauguggucaaccaaaaugcacaagcuuuaaacacgcuuguuaaacaacuuagcuccaauuuuggugcaauuucaaguguuuuaaaugauauccuuucacgucuugacaaaguugaggcugaagugcaaauugauagguugaucacaggcagacuucaaaguuugcagacauaugugacucaacaauuaauuagagcugcagaaaucagagcuucugcuaaucuugcugcuacuaaaaugucagaguguguacuuggacaaucaaaaagaguugauuuuuguggaaagggcuaucaucuuauguccuucccucagucagcaccucaugguguagucuucuugcaugugacuuaugucccugcacaagaaaagaacuucacaacugcuccugccauuugucaugauggaaaagcacacuuuccucgugaaggugucuuuguuucaaauggcacacacugguuuguaacacaaaggaauuuuuaugaaccacaaaucauuacuacagacaacacauuugugucugguaacugugauguuguaauaggaauugucaacaacacaguuuaugauccuuugcaaccugaauuagacucauucaaggaggaguuagauaaauauuuuaagaaucauacaucaccagauguugauuuaggugacaucucuggcauuaaugcuucaguuguaaacauucaaaaagaaauugaccgccucaaugagguugccaagaauuuaaaugaaucucucaucgaucuccaagaacuuggaaaguaugagcaguauauaaaauggccaugguacauuuggcuagguuuuauagcuggcuugauugccauaguaauggugacaauuaugcuuugcuguaugaccaguugcuguaguugucucaagggcuguuguucuuguggauccugcugcaaauuugaugaagacgacucugagccagugcucaaaggagucaaauuacauuacacauaaggacuagucccuguucccagagcccacuuuuuuuucuuuuuuugaaauaaaauagccugucuuucagaucucaaaggcucuuuucagagccaccaaaaaaaaaaaaaaaaaaaaaaaaaaaaaaaaaaaaaaaaaaaaaaaaaaaaaaaaaaaaaaaaaaaaaaaaaaaaaaaaaaaaaaaaaaaaaaaaaaaaa

SEQ ID NO: 12214 - RNA, 4094 nt, Artificial Sequence
  SARS-CoV-2/Australia/QLD02/2020__EPI_ISL_407896 spike protein mRNA wt (1-1273)
aggagagucccgcagucggcguccagcggcucugcuuguucgugugugugucguugcaggccuuauucaagcuuaccauguuuguuuuucuuguuuuauugccacuagucucuagucaguguguuaaucuuacaaccagaacucaauuacccccugcauacacuaauucuuucacacgugguguuuauuacccugacaaaguuuucagauccucaguuuuacauucaacucaggacuuguucuuaccuuucuuuuccaauguuacuugguuccaugcuauacaugucucugggaccaaugguacuaagagguuugauaacccuguccuaccauuuaaugaugguguuuauuuugcuuccacugagaagucuaacauaauaagaggcuggauuuuugguacuacuuuagauucgaagacccagucccuacuuauuguuaauaacgcuacuaauguuguuauuaaagucugugaauuucaauuuuguaaugauccauuuuuggguguuuauuaccacaaaaacaacaaaaguuggauggaaagugaguucagaguuuauucuagugcgaauaauugcacuuuugaauaugucucucagccuuuucuuauggaccuugaaggaaaacaggguaauuucaaaaaucuuagggaauuuguguuuaagaauauugaugguuauuuuaaaauauauucuaagcacacgccuauuaauuuagugcgugaucucccucaggguuuuucggcuuuagaaccauugguagauuugccaauagguauuaacaucacuagguuucaaacuuuacuugcuuuacauagaaguuauuugacuccuggugauucuucuucagguuggacagcuggugcugcagcuuauuauguggguuaucuucaaccuaggacuuuucuauuaaaauauaaugaaaauggaaccauuacagaugcuguagacugugcacuugacccucucucagaaacaaaguguacguugaaauccuucacuguagaaaaaggaaucuaucaaacuucuaacuuuagaguccaaccaacagaaucuauuguuagauuuccuaauauuacaaacuugugcccuuuuggugaaguuuuuaacgccaccagauuugcaucuguuuaugcuuggaacaggaagagaaucagcaacuguguugcugauuauucuguccuauauaauuccgcaucauuuuccacuuuuaaguguuauggagugucuccuacuaaauuaaaugaucucugcuuuacuaaugucuaugcagauucauuuguaauuagaggugaugaagucagacaaaucgcuccagggcaaacuggaaagauugcugauuauaauuauaaauuaccagaugauuuuacaggcugcguuauagcuuggaauucuaacaaucuugauucuaagguuggugguaauuauaauuaccuguauagauuguuuaggaagucuaaucucaaaccuuuugagagagauauuucaacugaaaucuaucaggccgguagcacaccuuguaaugguguugaagguuuuaauuguuacuuuccuuuacaaucauaugguuuccaacccacuaaugguguugguuaccaaccauacagaguaguaguacuuucuuuugaacuucuacaugcaccagcaacuguuuguggaccuaaaaagucuacuaauuugguuaaaaacaaaugugucaauuucaacuucaaugguuuaacaggcacagguguucuuacugagucuaacaaaaaguuucugccuuuccaacaauuuggcagagacauugcugacacuacugaugcuguccgugauccacagacacuugagauucuugacauuacaccauguucuuuugguggugucaguguuauaacaccaggaacaaauacuucuaaccagguugcuguucuuuaucaggauguuaacugcacagaagucccuguugcuauucaugcagaucaacuuacuccuacuuggcguguuuauucuacagguucuaauguuuuucaaacacgugcaggcuguuuaauaggggcugaacaugucaacaacucauaugagugugacauacccauuggugcagguauaugcgcuaguuaucagacucagacuaauucuccucggcgggcacguaguguagcuagucaauccaucauugccuacacuaugucacuuggugcagaaaauucaguugcuuacucuaauaacucuauugccauacccacaaauuuuacuauuaguguuaccacagaaauucuaccagugucuaugaccaagacaucaguagauuguacaauguacauuuguggugauucaacugaaugcagcaaucuuuuguugcaauauggcaguuuuuguacacaauuaaaccgugcuuuaacuggaauagcuguugaacaagacaaaaacacccaagaaguuuuugcacaagucaaacaaauuuacaaaacaccaccaauuaaagauuuuggugguuuuaauuuuucacaaauauuaccagauccaucaaaaccaagcaagaggucauuuauugaagaucuacuuuucaacaaagugacacuugcagaugcuggcuucaucaaacaauauggugauugccuuggugauauugcugcuagagaccucauuugugcacaaaaguuuaacggccuuacuguuuugccaccuuugcucacagaugaaaugauugcucaauacacuucugcacuguuagcggguacaaucacuucugguuggaccuuuggugcaggugcugcauuacaaauaccauuugcuaugcaaauggcuuauagguuuaaugguauuggaguuacacagaauguucucuaugagaaccaaaaauugauugccaaccaauuuaauagugcuauuggcaaaauucaagacucacuuucuuccacagcaagugcacuuggaaaacuucaagauguggucaaccaaaaugcacaagcuuuaaacacgcuuguuaaacaacuuagcuccaauuuuggugcaauuucaaguguuuuaaaugauauccuuucacgucuugacaaaguugaggcugaagugcaaauugauagguugaucacaggcagacuucaaaguuugcagacauaugugacucaacaauuaauuagagcugcagaaaucagagcuucugcuaaucuugcugcuacuaaaaugucagaguguguacuuggacaaucaaaaagaguugauuuuuguggaaagggcuaucaucuuauguccuucccucagucagcaccucaugguguagucuucuugcaugugacuuaugucccugcacaagaaaagaacuucacaacugcuccugccauuugucaugauggaaaagcacacuuuccucgugaaggugucuuuguuucaaauggcacacacugguuuguaacacaaaggaauuuuuaugaaccacaaaucauuacuacagacaacacauuugugucugguaacugugauguuguaauaggaauugucaacaacacaguuuaugauccuuugcaacuugaauuagacucauucaaggaggaguuagauaaauauuuuaagaaucauacaucaccagauguugauuuaggugacaucucuggcauuaaugcuucaguuguaaacauucaaaaagaaauugaccgccucaaugagguugccaagaauuuaaaugaaucucucaucgaucuccaagaacuuggaaaguaugagcaguauauaaaauggccaugguacauuuggcuagguuuuauagcuggcuugauugccauaguaauggugacaauuaugcuuugcuguaugaccaguugcuguaguugucucaagggcuguuguucuuguggauccugcugcaaauuugaugaagacgacucugagccagugcucaaaggagucaaauuacauuacacauaaggacuagucccuguucccagagcccacuuuuuuuucuuuuuuugaaauaaaauagccugucuuucagaucucaaaggcucuuuucagagccaccaaaaaaaaaaaaaaaaaaaaaaaaaaaaaaaaaaaaaaaaaaaaaaaaaaaaaaaaaaaaaaaaaaaaaaaaaaaaaaaaaaaaaaaaaaaaaaaaaaaaa

SEQ ID NO: 12215 - RNA, 4094 nt, Artificial Sequence
  SARS-CoV-2/India/1-31/2020__EPI_ISL_413523 spike protein mRNA wt (1-1273)
aggagagucccgcagucggcguccagcggcucugcuuguucgugugugugucguugcaggccuuauucaagcuuaccauguuuguuuuucuuguuuuauugccacuagucucuagucaguguguuaaucuuacaaccagaacucaauuacccccugcauacacuaauucuuucacacgugguguuuauuacccugacaaaguuuucagauccucaguuuuacauucaacucaggacuuguucuuaccuuucuuuuccaauguuacuugguuccaugcuauacaugucucugggaccaaugguacuaagagguuugauaacccuguccuaccauuuaaugaugguguuuauuuugcuuccacugagaagucuaacauaauaagaggcuggauuuuugguacuacuuuagauucgaagacccagucccuacuuauuguuaauaacgcuacuaauguuguuauuaaagucugugaauuucaauuuuguaaugauccauuuuuggguguuuauuaccacaaaaacaacaaaaguuggauggaaagugaguucagaguuuauucuagugcgaauaauugcacuuuugaauaugucucucagccuuuucuuauggaccuugaaggaaaacaggguaauuucaaaaaucuuagggaauuuguguuuaagaauauugaugguuauuuuaaaauauauucuaagcacacgccuauuaauuuagugcgugaucucccucaggguuuuucggcuuuagaaccauugguagauuugccaauagguauuaacaucacuagguuucaaacuuuacuugcuuuacauagaaguuauuugacuccuggugauucuucuucagguuggacagcuggugcugcagcuuauuauguggguuaucuucaaccuaggacuuuucuauuaaaauauaaugaaaauggaaccauuacagaugcuguagacugugcacuugacccucucucagaaacaaaguguacguugaaauccuucacuguagaaaaaggaaucuaucaaacuucuaacuuuagaguccaaccaacagaaucuauuguuagauuuccuaauauuacaaacuugugcccuuuuggugaaguuuuuaacgccaccagauuugcaucuguuuaugcuuggaacaggaagagaaucagcaacuguguugcugauuauucuguccuauauaauuccgcaucauuuuccacuuuuaaguguuauggagugucuccuacuaaauuaaaugaucucugcuuuacuaaugucuaugcagauucauuuguaauuagaggugaugaagucagacaaaucgcuccagggcaaacuggaaagauugcugauuauaauuauaaauuaccagaugauuuuacaggcugcguuauagcuuggaauucuaacaaucuugauucuaagguuggugguaauuauaauuaccuguauagauuguuuaggaagucuaaucucaaaccuuuugagagagauauuucaacugaaaucuaucaggccgguagcacaccuuguaaugguguugaagguuuuaauuguuacuuuccuuuacaaucauaugguuuccaacccacuaaugguguugguuaccaaccauacagaguaguaguacuuucuuuugaacuucuacaugcaccagcaacuguuuguggaccuaaaaagucuacuaauuugguuaaaaacaaaugugucaauuucaacuucaaugguuuaacaggcacagguguucuuacugagucuaacaaaaaguuucugccuuuccaacaauuuggcagagacauugcugacacuacugaugcuguccgugauccacagacacuugagauucuugacauuacaccauguucuuuugguggugucaguguuauaacaccaggaacaaauacuucuaaccagguugcuguucuuuaucaggauguuaacugcacagaagucccuguugcuauucaugcagaucaacuuacuccuacuuggcguguuuauucuacagguucuaauguuuuucaaacacgugcaggcuguuuaauaggggcugaacaugucaacaacucauaugagugugacauacccauuggugcagguauaugcgcuaguuaucagacucagacuaauucuccucggcgggcacguaguguagcuagucaauccaucauugccuacacuaugucacuuggugcagaaaauucaguugcuuacucuaauaacucuauugccauacccacaaauuuuacuauuaguguuaccacagaaauucuaccagugucuaugaccaagacaucaguagauuguacaauguacauuuguggugauucaacugaaugcagcaaucuuuuguugcaauauggcaguuuuuguacacaauuaaaccgugcuuuaacuggaauagcuguugaacaagacaaaaacacccaagaaguuuuugcacaagucaaacaaauuuacaaaacaccaccaauuaaagauuuuggugguuuuaauuuuucacaaauauuaccagauccaucaaaaccaagcaagaggucauuuauugaagaucuacuuuucaacaaagugacacuugcagaugcuggcuucaucaaacaauauggugauugccuuggugauauugcugcuagagaccucauuugugcacaaaaguuuaacggccuuacuguuuugccaccuuugcucacagaugaaaugauugcucaauacacuucugcacuguuagcggguacaaucacuucugguuggaccuuuggugcaggugcugcauuacaaauaccauuugcuaugcaaauggcuuauagguuuaaugguauuggaguuacacagaauguucucuaugagaaccaaaaauugauugccaaccaauuuaauaguguuauuggcaaaauucaagacucacuuucuuccacagcaagugcacuuggaaaacuucaagauguggucaaccaaaaugcacaagcuuuaaacacgcuuguuaaacaacuuagcuccaauuuuggugcaauuucaaguguuuuaaaugauauccuuucacgucuugacaaaguugaggcugaagugcaaauugauagguugaucacaggcagacuucaaaguuugcagacauaugugacucaacaauuaauuagagcugcagaaaucagagcuucugcuaaucuugcugcuacuaaaaugucagaguguguacuuggacaaucaaaaagaguugauuuuuguggaaagggcuaucaucuuauguccuucccucagucagcaccucaugguguagucuucuugcaugugacuuaugucccugcacaagaaaagaacuucacaacugcuccugccauuugucaugauggaaaagcacacuuuccucgugaaggugucuuuguuucaaauggcacacacugguuuguaacacaaaggaauuuuuaugaaccacaaaucauuacuacagacaacacauuugugucugguaacugugauguuguaauaggaauugucaacaacacaguuuaugauccuuugcaaccugaauuagacucauucaaggaggaguuagauaaauauuuuaagaaucauacaucaccagauguugauuuaggugacaucucuggcauuaaugcuucaguuguaaacauucaaaaagaaauugaccgccucaaugagguugccaagaauuuaaaugaaucucucaucgaucuccaagaacuuggaaaguaugagcaguauauaaaauggccaugguacauuuggcuagguuuuauagcuggcuugauugccauaguaauggugacaauuaugcuuugcuguaugaccaguugcuguaguugucucaagggcuguuguucuuguggauccugcugcaaauuugaugaagacgacucugagccagugcucaaaggagucaaauuacauuacacauaaggacuagucccuguucccagagcccacuuuuuuuucuuuuuuugaaauaaaauagccugucuuucagaucucaaaggcucuuuucagagccaccaaaaaaaaaaaaaaaaaaaaaaaaaaaaaaaaaaaaaaaaaaaaaaaaaaaaaaaaaaaaaaaaaaaaaaaaaaaaaaaaaaaaaaaaaaaaaaaaaaaaa

SEQ ID NO: 12216 - RNA, 4094 nt, Artificial Sequence
  SARS-CoV-2/Guangdong/GD2020087-P0008/2020__EPI_ISL_413863 spike protein mRNA wt (1-1273)
aggagagucccgcagucggcguccagcggcucugcuuguucgugugugugucguugcaggccuuauucaagcuuaccauguuuguuuuucuuguuuuauugccacuagucucuagucaguguguuaaucuuacaaccagaacucaauuacccccugcauacacuaauucuuucacacgugguguuuauuacccugacaaaguuuucagauccucaguuuuacauucaacucaggacuuguucuuaccuuucuuuuccaauguuacuugguuccaugcuauacaugucucugggaccaaugguacuaagagguuugauaacccuguccuaccauuuaaugaugguguuuauuuugcuuccacugagaagucuaacauaauaagaggcuggauuuuugguacuacuuuagauucgaagacccagucccuacuuauuguuaauaacgcuacuaauguuguuauuaaagucugugaauuucaauuuuguaaugauccauuuuuggguguuuauuaccacaaaaacaacaaaaguuggauggaaagugaguucagaguuuauucuagugcgaauaauugcacuuuugaauaugucucucagccuuuucuuauggaccuugaaggaaaacaggguaauuucaaaaaucuuagggaauuuguguuuaagaauauugaugguuauuuuaaaauauauucuaagcacacgccuauuaauuuagugcgugaucucccucaggguuuuucggcuuuagaaccauugguagauuugccaauagguauuaacaucacuagguuucaaacuuuacuugcuuuacauagaaguuauuugacuccuggugauucuucuucagguuggacagcuggugcugcagcuuauuauguggguuaucuucaaccuaggacuuuucuauuaaaauauaaugaaaauggaaccauuacagaugcuguagacugugcacuugacccucucucagaaacaaaguguacguugaaauccuucacuguagaaaaaggaaucuaucaaacuucuaacuuuagaguccaaccaacagaaucuauuguuagauuuccuaauauuacaaacuugugcccuuuuggugaaguuuuuaacgccaccagauuugcaucuguuuaugcuuggaacaggaagagaaucagcaacuguguugcugauuauucuguccuauauaauuccgcaucauuuuccacuuuuaaguguuauggagugucuccuacuaaauuaaaugaucucugcuuuacuaaugucuaugcagauucauuuguaauuagaggugaugaagucagagaaaucgcuccagggcaaacuggaaagauugcugauuauaauuauaaauuaccagaugauuuuacaggcugcguuauagcuuggaauucuaacaaucuugauucuaagguuggugguaauuauaauuaccuguauagauuguuuaggaagucuaaucucaaaccuuuugagagagauauuucaacugaaaucuaucaggccgguagcacaccuuguaaugguguugaagguuuuaauuguuacuuuccuuuacaaucauaugguuuccaacccacuaaugguguugguuaccaaccauacagaguaguaguacuuucuuuugaacuucuacaugcaccagcaacuguuuguggaccuaaaaagucuacuaauuugguuaaaaacaaaugugucaauuucaacuucaaugguuuaacaggcacagguguucuuacugagucuaacaaaaaguuucugccuuuccaacaauuuggcagagacauugcugacacuacugaugcuguccgugauccacagacacuugagauucuugacauuacaccauguucuuuugguggugucaguguuauaacaccaggaacaaauacuucuaaccagguugcuguucuuuaucaggauguuaacugcacagaagucccuguugcuauucaugcagaucaacuuacuccuacuuggcguguuuauucuacagguucuaauguuuuucaaacacgugcaggcuguuuaauaggggcugaacaugucaacaacucauaugagugugacauacccauuggugcagguauaugcgcuaguuaucagacucagacuaauucuccucggcgggcacguaguguagcuagucaauccaucauugccuacacuaugucacuuggugcagaaaauucaguugcuuacucuaauaacucuauugccauacccacaaauuuuacuauuaguguuaccacagaaauucuaccagugucuaugaccaagacaucaguagauuguacaauguacauuuguggugauucaacugaaugcagcaaucuuuuguugcaauauggcaguuuuuguacacaauuaaaccgugcuuuaacuggaauagcuguugaacaagacaaaaacacccaagaaguuuuugcacaagucaaacaaauuuacaaaacaccaccaauuaaagauuuuggugguuuuaauuuuucacaaauauuaccagauccaucaaaaccaagcaagaggucauuuauugaagaucuacuuuucaacaaagugacacuugcagaugcuggcuucaucaaacaauauggugauugccuuggugauauugcugcuagagaccucauuugugcacaaaaguuuaacggccuuacuguuuugccaccuuugcucacagaugaaaugauugcucaauacacuucugcacuguuagcggguacaaucacuucugguuggaccuuuggugcaggugcugcauuacaaauaccauuugcuaugcaaauggcuuauagguuuaaugguauuggaguuacacagaauguucucuaugagaaccaaaaauugauugccaaccaauuuaauagugcuauuggcaaaauucaagacucacuuucuuccacagcaagugcacuuggaaaacuucaagauguggucaaccaaaaugcacaagcuuuaaacacgcuuguuaaacaacuuagcuccaauuuuggugcaauuucaaguguuuuaaaugauauccuuucacgucuugacaaaguugaggcugaagugcaaauugauagguugaucacaggcagacuucaaaguuugcagacauaugugacucaacaauuaauuagagcugcagaaaucagagcuucugcuaaucuugcugcuacuaaaaugucagaguguguacuuggacaaucaaaaagaguugauuuuuguggaaagggcuaucaucuuauguccuucccucagucagcaccucaugguguagucuucuugcaugugacuuaugucccugcacaagaaaagaacuucacaacugcuccugccauuugucaugauggaaaagcacacuuuccucgugaaggugucuuuguuucaaauggcacacacugguuuguaacacaaaggaauuuuuaugaaccacaaaucauuacuacagacaacacauuugugucugguaacugugauguuguaauaggaauugucaacaacacaguuuaugauccuuugcaaccugaauuagacucauucaaggaggaguuagauaaauauuuuaagaaucauacaucaccagauguugauuuaggugacaucucuggcauuaaugcuucaguuguaaacauucaaaaagaaauugaccgccucaaugagguugccaagaauuuaaaugaaucucucaucgaucuccaagaacuuggaaaguaugagcaguauauaaaauggccaugguacauuuggcuagguuuuauagcuggcuugauugccauaguaauggugacaauuaugcuuugcuguaugaccaguugcuguaguugucucaagggcuguuguucuuguggauccugcugcaaauuugaugaagacgacucugagccagugcucaaaggagucaaauuacauuacacauaaggacuagucccuguucccagagcccacuuuuuuuucuuuuuuugaaauaaaauagccugucuuucagaucucaaaggcucuuuucagagccaccaaaaaaaaaaaaaaaaaaaaaaaaaaaaaaaaaaaaaaaaaaaaaaaaaaaaaaaaaaaaaaaaaaaaaaaaaaaaaaaaaaaaaaaaaaaaaaaaaaaaa

SEQ ID NO: 12217 - RNA, 4094 nt, Artificial Sequence
  SARS-CoV-2/Sweden/01/2020__EPI_ISL_411951 spike protein mRNA wt (1-1273)
aggagagucccgcagucggcguccagcggcucugcuuguucgugugugugucguugcaggccuuauucaagcuuaccauguuuguuuuucuuguuuuauugccacuagucucuagucaguguguuaaucuuacaaccagaacucaauuacccccugcauacacuaauucuuucacacgugguguuuauuacccugacaaaguuuucagauccucaguuuuacauucaacucaggacuuguucuuaccuuucuuuuccaauguuacuugguuccaugcuauacaugucucugggaccaaugguacuaagagguuugauaacccuguccuaccauuuaaugaugguguuuauuuugcuuccacugagaagucuaacauaauaagaggcuggauuuuugguacuacuuuagauucgaagacccagucccuacuuauuguuaauaacgcuacuaauguuguuauuaaagucugugaauuucaauuuuguaaugauccauuuuuggguguuuauuaccacaaaaacaacaaaaguuggauggaaagugaguucagaguuuauucuagugcgaauaauugcacuuuugaauaugucucucagccuuuucuuauggaccuugaaggaaaacaggguaauuucaaaaaucuuagggaauuuguguuuaagaauauugaugguuauuuuaaaauauauucuaagcacacgccuauuaauuuagugcgugaucucccucaggguuuuucggcuuuagaaccauugguagauuugccaauagguauuaacaucacuagguuucaaacuuuacuugcuuuacauagaaguuauuugacuccuggugauucuucuucagguuggacagcuggugcugcagcuuauuauguggguuaucuucaaccuaggacuuuucuauuaaaauauaaugaaaauggaaccauuacagaugcuguagacugugcacuugacccucucucagaaacaaaguguacguugaaauccuucacuguagaaaaaggaaucuaucaaacuucuaacuuuagaguccaaccaacagaaucuauuguuagauuuccuaauauuacaaacuugugcccuuuuggugaaguuuuuaacgccaccagauuugcaucuguuuaugcuuggaacaggaagagaaucagcaacuguguugcugauuauucuguccuauauaauuccgcaucauuuuccacuuuuaaguguuauggagugucuccuacuaaauuaaaugaucucugcuuuacuaaugucuaugcagauucauuuguaauuagaggugaugaagucagacaaaucgcuccagggcaaacuggaaagauugcugauuauaauuauaaauuaccagaugauuuuacaggcugcguuauagcuuggaauucuaacaaucuugauucuaagguuggugguaauuauaauuaccuguauagauuguuuaggaagucuaaucucaaaccuuuugagagagauauuucaacugaaaucuaucaggccgguagcacaccuuguaaugguguugaagguuuuaauuguuacuuuccuuuacaaucauaugguuuccaacccacuaaugguguugguuaccaaccauacagaguaguaguacuuucuuuugaacuucuacaugcaccagcaacuguuuguggaccuaaaaagucuacuaauuugguuaaaaacaaaugugucaauuucaacuucaaugguuuaacaggcacagguguucuuacugagucuaacaaaaaguuucugccuuuccaacaauuuggcagagacauugcugacacuacugaugcuguccgugauccacagacacuugagauucuugacauuacaccauguucuuuugguggugucaguguuauaacaccaggaacaaauacuucuaaccagguugcuguucuuuaucaggauguuaacugcacagaagucccuguugcuauucaugcagaucaacuuacuccuacuuggcguguuuauucuacagguucuaauguuuuucaaacacgugcaggcuguuuaauaggggcugaacaugucaacaacucauaugagugugacauacccauuggugcagguauaugcgcuaguuaucagacucagacuaauucuccucggcgggcacguaguguagcuagucaauccaucauugccuacacuaugucacuuggugcagaaaauucaguugcuuacucuaauaacucuauugccauacccacaaauuuuacuauuaguguuaccacagaaauucuaccagugucuaugaccaagacaucaguagauuguacaauguacauuuguggugauucaacugaaugcagcaaucuuuuguugcaauauggcaguuuuuguacacaauuaaaccgugcuuuaacuggaauagcuguugaacaagacaaaaacacccaagaaguuuuugcacaagucaaacaaauuuacaaaacaccaccaauuaaagauuguggugguuuuaauuuuucacaaauauuaccagauccaucaaaaccaagcaagaggucauuuauugaagaucuacuuuucaacaaagugacacuugcagaugcuggcuucaucaaacaauauggugauugccuuggugauauugcugcuagagaccucauuugugcacaaaaguuuaacggccuuacuguuuugccaccuuugcucacagaugaaaugauugcucaauacacuucugcacuguuagcggguacaaucacuucugguuggaccuuuggugcaggugcugcauuacaaauaccauuugcuaugcaaauggcuuauagguuuaaugguauuggaguuacacagaauguucucuaugagaaccaaaaauugauugccaaccaauuuaauagugcuauuggcaaaauucaagacucacuuucuuccacagcaagugcacuuggaaaacuucaagauguggucaaccaaaaugcacaagcuuuaaacacgcuuguuaaacaacuuagcuccaauuuuggugcaauuucaaguguuuuaaaugauauccuuucacgucuugacaaaguugaggcugaagugcaaauugauagguugaucacaggcagacuucaaaguuugcagacauaugugacucaacaauuaauuagagcugcagaaaucagagcuucugcuaaucuugcugcuacuaaaaugucagaguguguacuuggacaaucaaaaagaguugauuuuuguggaaagggcuaucaucuuauguccuucccucagucagcaccucaugguguagucuucuugcaugugacuuaugucccugcacaagaaaagaacuucacaacugcuccugccauuugucaugauggaaaagcacacuuuccucgugaaggugucuuuguuucaaauggcacacacugguuuguaacacaaaggaauuuuuaugaaccacaaaucauuacuacagacaacacauuugugucugguaacugugauguuguaauaggaauugucaacaacacaguuuaugauccuuugcaaccugaauuagacucauucaaggaggaguuagauaaauauuuuaagaaucauacaucaccagauguugauuuaggugacaucucuggcauuaaugcuucaguuguaaacauucaaaaagaaauugaccgccucaaugagguugccaagaauuuaaaugaaucucucaucgaucuccaagaacuuggaaaguaugagcaguauauaaaauggccaugguacauuuggcuagguuuuauagcuggcuugauugccauaguaauggugacaauuaugcuuugcuguaugaccaguugcuguaguugucucaagggcuguuguucuuguggauccugcugcaaauuugaugaagacgacucugagccagugcucaaaggagucaaauuacauuacacauaaggacuagucccuguucccagagcccacuuuuuuuucuuuuuuugaaauaaaauagccugucuuucagaucucaaaggcucuuuucagagccaccaaaaaaaaaaaaaaaaaaaaaaaaaaaaaaaaaaaaaaaaaaaaaaaaaaaaaaaaaaaaaaaaaaaaaaaaaaaaaaaaaaaaaaaaaaaaaaaaaaaaa

SEQ ID NO: 12218 - RNA, 4094 nt, Artificial Sequence
  SARS-CoV-2/Tianmen/HBCDC-HB-07/2020__EPI_ISL_412983 spike protein mRNA wt (1-1273)
aggagagucccgcagucggcguccagcggcucugcuuguucgugugugugucguugcaggccuuauucaagcuuaccauguuuguuuuucuuguuuuauugccacuagucucuagucaguguguuaaucuuacaaccagaacucaauuacccccugcauacacuaauucuuucacacgugguguuuauuacccugacaaaguuuucagauccucaguuuuacauucaacucaggacuuguucuuaccuuucuuuuccaauguuacuugguuccaugcuauacaugucucugggaccaaugguacuaagagguuugauaacccuguccuaccauuuaaugaugguguuuauuuugcuuccacugagaagucuaacauaauaagaggcuggauuuuugguacuacuuuagauucgaagacccagucccuacuuauuguuaauaacgcuacuaauguuguuauuaaagucugugaauuucaauuuuguaaugauccauuuuuggguguuuauuaccacaaaaacaacaaaaguuggauggaaagugaguucagaguuuauucuagugcgaauaauugcacuuuugaauaugucucucagccuuuucuuauggaccuugaaggaaaacaggguaauuucaaaaaucuuagggaauuuguguuuaagaauauugaugguuauuuuaaaauauauucuaagcacacgccuauuaauuuagugcgugaucucccucaggguuuuucggcuuuagaaccauugguagauuugccaauagguauuaacaucacuagguuucaaacuuuacuugcuuuacauagaaguuauuugacuccuggugauucuucuucagguuggacagcuggugcugcagcuuauuauguggguuaucuucaaccuaggacuuuucuauuaaaauauaaugaaaauggaaccauuacagaugcuguagacugugcacuugacccucucucagaaacaaaguguacguugaaauccuucacuguagaaaaaggaaucuaucaaacuucuaacuuuagaguccaaccaacagaaucuauuguuagauuuccuaauauuacaaacuugugcccuuuuggugaaguuuuuaacgccaccagauuugcaucuguuuaugcuuggaacaggaagagaaucagcaacuguguugcugauuauucuguccuauauaauuccgcaucauuuuccacuuuuaaguguuauggagugucuccuacuaaauuaaaugaucucugcuuuacuaaugucuaugcagauucauuuguaauuagaggugaugaagucagacaaaucgcuccagggcaaacuggaaagauugcugauuauaauuauaaauuaccagaugauuuuacaggcugcguuauagcuuggaauucuaacaaucuugauucuaagguuggugguaauuauaauuaccuguauagauuguuuaggaagucuaaucucaaaccuuuugagagagauauuucaacugaaaucuaucaggccgguagcacaccuuguaaugguguugaagguuuuaauuguuacuuuccuuuacaaucauaugguuuccaacccacuaaugguguugguuaccaaccauacagaguaguaguacuuucuuuugaacuucuacaugcaccagcaacuguuuguggaccuaaaaagucuacuaauuugguuaaaaacaaaugugucaauuucaacuucaaugguuuaacaggcacagguguucuuacugagucuaacaaaaaguuucugccuuuccaacaauuuggcagagacauugcugacacuacugaugcuguccgugauccacagacacuugagauucuugacauuacaccauguucuuuugguggugucaguguuauaacaccaggaacaaauacuucuaaccagguugcuguucuuuaucaggaucuuaacugcacagaagucccuguugcuauucaugcagaucaacuuacuccuacuuggcguguuuauucuacagguucuaauguuuuucaaacacgugcaggcuguuuaauaggggcugaacaugucaacaacucauaugagugugacauacccauuggugcagguauaugcgcuaguuaucagacucagacuaauucuccucggcgggcacguaguguagcuagucaauccaucauugccuacacuaugucacuuggugcagaaaauucaguugcuuacucuaauaacucuauugccauacccacaaauuuuacuauuaguguuaccacagaaauucuaccagugucuaugaccaagacaucaguagauuguacaauguacauuuguggugauucaacugaaugcagcaaucuuuuguugcaauauggcaguuuuuguacacaauuaaaccgugcuuuaacuggaauagcuguugaacaagacaaaaacacccaagaaguuuuugcacaagucaaacaaauuuacaaaacaccaccaauuaaagauuuuggugguuuuaauuuuucacaaauauuaccagauccaucaaaaccaagcaagaggucauuuauugaagaucuacuuuucaacaaagugacacuugcagaugcuggcuucaucaaacaauauggugauugccuuggugauauugcugcuagagaccucauuugugcacaaaaguuuaacggccuuacuguuuugccaccuuugcucacagaugaaaugauugcucaauacacuucugcacuguuagcggguacaaucacuucugguuggaccuuuggugcaggugcugcauuacaaauaccauuugcuaugcaaauggcuuauagguuuaaugguauuggaguuacacagaauguucucuaugagaaccaaaaauugauugccaaccaauuuaauagugcuauuggcaaaauucaagacucacuuucuuccacagcaagugcacuuggaaaacuucaagauguggucaaccaaaaugcacaagcuuuaaacacgcuuguuaaacaacuuagcuccaauuuuggugcaauuucaaguguuuuaaaugauauccuuucacgucuugacaaaguugaggcugaagugcaaauugauagguugaucacaggcagacuucaaaguuugcagacauaugugacucaacaauuaauuagagcugcagaaaucagagcuucugcuaaucuugcugcuacuaaaaugucagaguguguacuuggacaaucaaaaagaguugauuuuuguggaaagggcuaucaucuuauguccuucccucagucagcaccucaugguguagucuucuugcaugugacuuaugucccugcacaagaaaagaacuucacaacugcuccugccauuugucaugauggaaaagcacacuuuccucgugaaggugucuuuguuucaaauggcacacacugguuuguaacacaaaggaauuuuuaugaaccacaaaucauuacuacagacaacacauuugugucugguaacugugauguuguaauaggaauugucaacaacacaguuuaugauccuuugcaaccugaauuagacucauucaaggaggaguuagauaaauauuuuaagaaucauacaucaccagauguugauuuaggugacaucucuggcauuaaugcuucaguuguaaacauucaaaaagaaauugaccgccucaaugagguugccaagaauuuaaaugaaucucucaucgaucuccaagaacuuggaaaguaugagcaguauauaaaauggccaugguacauuuggcuagguuuuauagcuggcuugauugccauaguaauggugacaauuaugcuuugcuguaugaccaguugcuguaguugucucaagggcuguuguucuuguggauccugcugcaaauuugaugaagacgacucugagccagugcucaaaggagucaaauuacauuacacauaaggacuagucccuguucccagagcccacuuuuuuuucuuuuuuugaaauaaaauagccugucuuucagaucucaaaggcucuuuucagagccaccaaaaaaaaaaaaaaaaaaaaaaaaaaaaaaaaaaaaaaaaaaaaaaaaaaaaaaaaaaaaaaaaaaaaaaaaaaaaaaaaaaaaaaaaaaaaaaaaaaaaa

SEQ ID NO: 12219 - RNA, 4094 nt, Artificial Sequence
  SARS-CoV-2/Hong Kong/case42_VM20002493/2020__EPI_ISL_414527 spike protein mRNA wt (1-1273)
aggagagucccgcagucggcguccagcggcucugcuuguucgugugugugucguugcaggccuuauucaagcuuaccauguuuguuuuucuuguuuuauugccacuagucucuagucaguguguuaaucuuacaaccagaacucaauuacccccugcauacacuaauucuuucacacgugguguuuauuacccugacaaaguuuucagauccucaguuuuacauucaacucaggacuuguucuuaccuuucuuuuccaauguuacuugguuccaugcuauacaugucucugggaccaaugguacuaagagguuugauaacccuguccuaccauuuaaugaugguguuuauuuugcuuccacugagaagucuaacauaauaagaggcuggauuuuugguacuacuuuagauucgaagacccagucccuacuuauuguuaauaacgcuacuaauguuguuauuaaagucugugaauuucaauuuuguaaugauccauuuuuggguguuuauuaccacaaaaacaacaaaaguuggauggaaagugaguucagaguuuauucuagugcgaauaauugcacuuuugaauaugucucucagccuuuucuuauggaccuugaaggaaaacaggguaauuucaaaaaucuuagggaauuuguguuuaagaauauugaugguuauuuuaaaauauauucuaagcacacgccuauuaauuuagugcgugaucucccucaggguuuuucggcuuuagaaccauugguagauuugccaauagguauuaacaucacuagguuucaaacuuuacuugcuuuacauagaaguuauuugacuccuggugauucuucuucagguuggacagcuggugcugcagcuuauuauguggguuaucuucaaccuaggacuuuucuauuaaaauauaaugaaaauggaaccauuacagaugcuguagacugugcacuugacccucucucagaaacaaaguguacguugaaauccuucacuguagaaaaaggaaucuaucaaacuucuaacuuuagaguccaaccaacagaaucuauuguuagauuuccuaauauuacaaacuugugcccuuuuggugaaguuuuuaacgccaccagauuugcaucuguuuaugcuuggaacaggaagagaaucagcaacuguguugcugauuauucuguccuauauaauuccgcaucauuuuccacuuuuaaguguuauggagugucuccuacuaaauuaaaugaucucugcuuuacuaaugucuaugcagauucauuuguaauuagaggugaugaagucagacaaaucgcuccagggcaaacuggaaagauugcugauuauaauuauaaauuaccagaugauuuuacaggcugcguuauagcuuggaauucuaacaaucuugauucuaagguuggugguaauuauaauuaccuguauagauuguuuaggaagucuaaucucaaaccuuuugagagagauauuucaacugaaaucuaucaggccgguagcacaccuuguaaugguguugaagguuuuaauuguuacuuuccuuuacaaucauaugguuuccaacccacuaaugguguugguuaccaaccauacagaguaguaguacuuucuuuugaacuucuacaugcaccagcaacuguuuguggaccuaaaaagucuacuaauuugguuaaaaacaaaugugucaauuucaacuucaaugguuuaacaggcacagguguucuuacugagucuaacaaaaaguuucugccuuuccaacaauuuggcagagacauugcugacacuacugaugcuguccgugauccacagacacuugagauucuugacauuacaccauguucuuuugguggugucaguguuauaacaccaggaacaaauacuucuaaccagguugcuguucuuuaucaggauguuaacugcacagaagucccuguugcuauucaugcagaucaacuuacuccuacuuggcguguuuauucuacagguucuaauguuuuucaaacacgugcaggcuguuuaauaggggcugaacaugucaacaacucauaugagugugacauacccauuggugcagguauaugcgcuaguuaucagacucagacuaauucuccucggcgggcacguaguguagcuagucaauccaucauugccuacacuaugucacuuggugcagaaaauucaguugcuuacucuaauaacucuauugccauacccacaaauuuugcuauuaguguuaccacagaaauucuaccagugucuaugaccaagacaucaguagauuguacaauguacauuuguggugauucaacugaaugcagcaaucuuuuguugcaauauggcaguuuuuguacacaauuaaaccgugcuuuaacuggaauagcuguugaacaagacaaaaacacccaagaaguuuuugcacaagucaaacaaauuuacaaaacaccaccaauuaaagauuuuggugguuuuaauuuuucacaaauauuaccagauccaucaaaaccaagcaagaggucauuuauugaagaucuacuuuucaacaaagugacacuugcagaugcuggcuucaucaaacaauauggugauugccuuggugauauugcugcuagagaccucauuugugcacaaaaguuuaacggccuuacuguuuugccaccuuugcucacagaugaaaugauugcucaauacacuucugcacuguuagcggguacaaucacuucugguuggaccuuuggugcaggugcugcauuacaaauaccauuugcuaugcaaauggcuuauagguuuaaugguauuggaguuacacagaauguucucuaugagaaccaaaaauugauugccaaccaauuuaauagugcuauuggcaaaauucaagacucacuuucuuccacagcaagugcacuuggaaaacuucaagauguggucaaccaaaaugcacaagcuuuaaacacgcuuguuaaacaacuuagcuccaauuuuggugcaauuucaaguguuuuaaaugauauccuuucacgucuugacaaaguugaggcugaagugcaaauugauagguugaucacaggcagacuucaaaguuugcagacauaugugacucaacaauuaauuagagcugcagaaaucagagcuucugcuaaucuugcugcuacuaaaaugucagaguguguacuuggacaaucaaaaagaguugauuuuuguggaaagggcuaucaucuuauguccuucccucagucagcaccucaugguguagucuucuugcaugugacuuaugucccugcacaagaaaagaacuucacaacugcuccugccauuugucaugauggaaaagcacacuuuccucgugaaggugucuuuguuucaaauggcacacacugguuuguaacacaaaggaauuuuuaugaaccacaaaucauuacuacagacaacacauuugugucugguaacugugauguuguaauaggaauugucaacaacacaguuuaugauccuuugcaaccugaauuagacucauucaaggaggaguuagauaaauauuuuaagaaucauacaucaccagauguugauuuaggugacaucucuggcauuaaugcuucaguuguaaacauucaaaaagaaauugaccgccucaaugagguugccaagaauuuaaaugaaucucucaucgaucuccaagaacuuggaaaguaugagcaguauauaaaauggccaugguacauuuggcuagguuuuauagcuggcuugauugccauaguaauggugacaauuaugcuuugcuguaugaccaguugcuguaguugucucaagggcuguuguucuuguggauccugcugcaaauuugaugaagacgacucugagccagugcucaaaggagucaaauuacauuacacauaaggacuagucccuguucccagagcccacuuuuuuuucuuuuuuugaaauaaaauagccugucuuucagaucucaaaggcucuuuucagagccaccaaaaaaaaaaaaaaaaaaaaaaaaaaaaaaaaaaaaaaaaaaaaaaaaaaaaaaaaaaaaaaaaaaaaaaaaaaaaaaaaaaaaaaaaaaaaaaaaaaaaa

SEQ ID NO: 12220 - RNA, 4094 nt, Artificial Sequence
  SARS-CoV-2/USA/CruiseA-23/2020__EPI_ISL_414482 spike protein mRNA wt (1-1273)
aggagagucccgcagucggcguccagcggcucugcuuguucgugugugugucguugcaggccuuauucaagcuuaccauguuuguuuuucuuguuuuauugccacuagucucuagucaguguguuaaucuuacaaccagaacucaauuacccccugcauacacuaauucuuucacacgugguguuuauuacccugacaaaguuuucagauccucaguuuuacauucaacucaggacuuguucuuaccuuucuuuuccaauguuacuugguuccaugcuauacaugucucugggaccaaugguacuaagagguuugauaacccuguccuaccauuuaaugaugguguuuauuuugcuuccacugagaagucuaacauaauaagaggcuggauuuuugguacuacuuuagauucgaagacccagucccuacuuauuguuaauaacgcuacuaauguuguuauuaaagucugugaauuucaauuuuguaaugauccauuuuuggguguuuauuaccacaaaaacaacaaaaguuggauggaaagugaguucagaguuuauucuagugcgaauaauugcacuuuugaauaugucucucagccuuuucuuauggaccuugaaguaaaacaggguaauuucaaaaaucuuagggaauuuguguuuaagaauauugaugguuauuuuaaaauauauucuaagcacacgccuauuaauuuagugcgugaucucccucaggguuuuucggcuuuagaaccauugguagauuugccaauagguauuaacaucacuagguuucaaacuuuacuugcuuuacauagaaguuauuugacuccuggugauucuucuucagguuggacagcuggugcugcagcuuauuauguggguuaucuucaaccuaggacuuuucuauuaaaauauaaugaaaauggaaccauuacagaugcuguagacugugcacuugacccucucucagaaacaaaguguacguugaaauccuucacuguagaaaaaggaaucuaucaaacuucuaacuuuagaguccaaccaacagaaucuauuguuagauuuccuaauauuacaaacuugugcccuuuuggugaaguuuuuaacgccaccagauuugcaucuguuuaugcuuggaacaggaagagaaucagcaacuguguugcugauuauucuguccuauauaauuccgcaucauuuuccacuuuuaaguguuauggagugucuccuacuaaauuaaaugaucucugcuuuacuaaugucuaugcagauucauuuguaauuagaggugaugaagucagacaaaucgcuccagggcaaacuggaaagauugcugauuauaauuauaaauuaccagaugauuuuacaggcugcguuauagcuuggaauucuaacaaucuugauucuaagguuggugguaauuauaauuaccuguauagauuguuuaggaagucuaaucucaaaccuuuugagagagauauuucaacugaaaucuaucaggccgguagcacaccuuguaaugguguugaagguuuuaauuguuacuuuccuuuacaaucauaugguuuccaacccacuaaugguguugguuaccaaccauacagaguaguaguacuuucuuuugaacuucuacaugcaccagcaacuguuuguggaccuaaaaagucuacuaauuugguuaaaaacaaaugugucaauuucaacuucaaugguuuaacaggcacagguguucuuacugagucuaacaaaaaguuucugccuuuccaacaauuuggcagagacauugcugacacuacugaugcuguccgugauccacagacacuugagauucuugacauuacaccauguucuuuugguggugucaguguuauaacaccaggaacaaauacuucuaaccagguugcuguucuuuaucaggauguuaacugcacagaagucccuguugcuauucaugcagaucaacuuacuccuacuuggcguguuuauucuacagguucuaauguuuuucaaacacgugcaggcuguuuaauaggggcugaacaugucaacaacucauaugagugugacauacccauuggugcagguauaugcgcuaguuaucagacucagacuaauucuccucggcgggcacguaguguagcuagucaauccaucauugccuacacuaugucacuuggugcagaaaauucaguugcuuacucuaauaacucuauugccauacccacaaauuuuacuauuaguguuaccacagaaauucuaccagugucuaugaccaagacaucaguagauuguacaauguacauuuguggugauucaacugaaugcagcaaucuuuuguugcaauauggcaguuuuuguacacaauuaaaccgugcuuuaacuggaauagcuguugaacaagacaaaaacacccaagaaguuuuugcacaagucaaacaaauuuacaaaacaccaccaauuaaagauuuuggugguuuuaauuuuucacaaauauuaccagauccaucaaaaccaagcaagaggucauuuauugaagaucuacuuuucaacaaagugacacuugcagaugcuggcuucaucaaacaauauggugauugccuuggugauauugcugcuagagaccucauuugugcacaaaaguuuaacggccuuacuguuuugccaccuuugcucacagaugaaaugauugcucaauacacuucugcacuguuagcggguacaaucacuucugguuggaccuuuggugcaggugcugcauuacaaauaccauuugcuaugcaaauggcuuauagguuuaaugguauuggaguuacacagaauguucucuaugagaaccaaaaauugauugccaaccaauuuaauagugcuauuggcaaaauucaagacucacuuucuuccacagcaagugcacuuggaaaacuucaagauguggucaaccaaaaugcacaagcuuuaaacacgcuuguuaaacaacuuagcuccaauuuuggugcaauuucaaguguuuuaaaugauauccuuucacgucuugacaaaguugaggcugaagugcaaauugauagguugaucacaggcagacuucaaaguuugcagacauaugugacucaacaauuaauuagagcugcagaaaucagagcuucugcuaaucuugcugcuacuaaaaugucagaguguguacuuggacaaucaaaaagaguugauuuuuguggaaagggcuaucaucuuauguccuucccucagucagcaccucaugguguagucuucuugcaugugacuuaugucccugcacaagaaaagaacuucacaacugcuccugccauuugucaugauggaaaagcacacuuuccucgugaaggugucuuuguuucaaauggcacacacugguuuguaacacaaaggaauuuuuaugaaccacaaaucauuacuacagacaacacauuugugucugguaacugugauguuguaauaggaauugucaacaacacaguuuaugauccuuugcaaccugaauuagacucauucaaggaggaguuagauaaauauuuuaagaaucauacaucaccagauguugauuuaggugacaucucuggcauuaaugcuucaguuguaaacauucaaaaagaaauugaccgccucaaugagguugccaagaauuuaaaugaaucucucaucgaucuccaagaacuuggaaaguaugagcaguauauaaaauggccaugguacauuuggcuagguuuuauagcuggcuugauugccauaguaauggugacaauuaugcuuugcuguaugaccaguugcuguaguugucucaagggcuguuguucuuguggauccugcugcaaauuugaugaagacgacucugagccagugcucaaaggagucaaauuacauuacacauaaggacuagucccuguucccagagcccacuuuuuuuucuuuuuuugaaauaaaauagccugucuuucagaucucaaaggcucuuuucagagccaccaaaaaaaaaaaaaaaaaaaaaaaaaaaaaaaaaaaaaaaaaaaaaaaaaaaaaaaaaaaaaaaaaaaaaaaaaaaaaaaaaaaaaaaaaaaaaaaaaaaaa

SEQ ID NO: 12221 - RNA, 4094 nt, Artificial Sequence
  SARS-CoV-2/Hong Kong/case85_VM20002868/2020__EPI_ISL_414519 spike protein mRNA wt (1-1273)
aggagagucccgcagucggcguccagcggcucugcuuguucgugugugugucguugcaggccuuauucaagcuuaccauguuuguuuuucuuguuuuagugccacuagucucuagucaguguguuaaucuuacaaccagaacucaauuacccccugcauacacuaauucuuucacacgugguguuuauuacccugacaaaguuuucagauccucaguuuuacauucaacucaggacuuguucuuaccuuucuuuuccaauguuacuugguuccaugcuauacaugucucugggaccaaugguacuaagagguuugauaacccuguccuaccauuuaaugaugguguuuauuuugcuuccacugagaagucuaacauaauaagaggcuggauuuuugguacuacuuuagauucgaagacccagucccuacuuauuguuaauaacgcuacuaauguuguuauuaaagucugugaauuucaauuuuguaaugauccauuuuuggguguuuauuaccacaaaaacaacaaaaguuggauggaaagugaguucagaguuuauucuagugcgaauaauugcacuuuugaauaugucucucagccuuuucuuauggaccuugaaggaaaacaggguaauuucaaaaaucuuagggaauuuguguuuaagaauauugaugguuauuuuaaaauauauucuaagcacacgccuauuaauuuagugcgugaucucccucaggguuuuucggcuuuagaaccauugguagauuugccaauagguauuaacaucacuagguuucaaacuuuacuugcuuuacauagaaguuauuugacuccuggugauucuucuucagguuggacagcuggugcugcagcuuauuauguggguuaucuucaaccuaggacuuuucuauuaaaauauaaugaaaauggaaccauuacagaugcuguagacugugcacuugacccucucucagaaacaaaguguacguugaaauccuucacuguagaaaaaggaaucuaucaaacuucuaacuuuagaguccaaccaacagaaucuauuguuagauuuccuaauauuacaaacuugugcccuuuuggugaaguuuuuaacgccaccagauuugcaucuguuuaugcuuggaacaggaagagaaucagcaacuguguugcugauuauucuguccuauauaauuccgcaucauuuuccacuuuuaaguguuauggagugucuccuacuaaauuaaaugaucucugcuuuacuaaugucuaugcagauucauuuguaauuagaggugaugaagucagacaaaucgcuccagggcaaacuggaaagauugcugauuauaauuauaaauuaccagaugauuuuacaggcugcguuauagcuuggaauucuaacaaucuugauucuaagguuggugguaauuauaauuaccuguauagauuguuuaggaagucuaaucucaaaccuuuugagagagauauuucaacugaaaucuaucaggccgguagcacaccuuguaaugguguugaagguuuuaauuguuacuuuccuuuacaaucauaugguuuccaacccacuaaugguguugguuaccaaccauacagaguaguaguacuuucuuuugaacuucuacaugcaccagcaacuguuuguggaccuaaaaagucuacuaauuugguuaaaaacaaaugugucaauuucaacuucaaugguuuaacaggcacagguguucuuacugagucuaacaaaaaguuucugccuuuccaacaauuuggcagagacauugcugacacuacugaugcuguccgugauccacagacacuugagauucuugacauuacaccauguucuuuugguggugucaguguuauaacaccaggaacaaauacuucuaaccagguugcuguucuuuaucaggauguuaacugcacagaagucccuguugcuauucaugcagaucaacuuacuccuacuuggcguguuuauucuacagguucuaauguuuuucaaacacgugcaggcuguuuaauaggggcugaacaugucaacaacucauaugagugugacauacccauuggugcagguauaugcgcuaguuaucagacucagacuaauucuccucggcgggcacguaguguagcuagucaauccaucauugccuacacuaugucacuuggugcagaaaauucaguugcuuacucuaauaacucuauugccauacccacaaauuuuacuauuaguguuaccacagaaauucuaccagugucuaugaccaagacaucaguagauuguacaauguacauuuguggugauucaacugaaugcagcaaucuuuuguugcaauauggcaguuuuuguacacaauuaaaccgugcuuuaacuggaauagcuguugaacaagacaaaaacacccaagaaguuuuugcacaagucaaacaaauuuacaaaacaccaccaauuaaagauuuuggugguuuuaauuuuucacaaauauuaccagauccaucaaaaccaagcaagaggucauuuauugaagaucuacuuuucaacaaagugacacuugcagaugcuggcuucaucaaacaauauggugauugccuuggugauauugcugcuagagaccucauuugugcacaaaaguuuaacggccuuacuguuuugccaccuuugcucacagaugaaaugauugcucaauacacuucugcacuguuagcggguacaaucacuucugguuggaccuuuggugcaggugcugcauuacaaauaccauuugcuaugcaaauggcuuauagguuuaaugguauuggaguuacacagaauguucucuaugagaaccaaaaauugauugccaaccaauuuaauagugcuauuggcaaaauucaagacucacuuucuuccacagcaagugcacuuggaaaacuucaagauguggucaaccaaaaugcacaagcuuuaaacacgcuuguuaaacaacuuagcuccaauuuuggugcaauuucaaguguuuuaaaugauauccuuucacgucuugacaaaguugaggcugaagugcaaauugauagguugaucacaggcagacuucaaaguuugcagacauaugugacucaacaauuaauuagagcugcagaaaucagagcuucugcuaaucuugcugcuacuaaaaugucagaguguguacuuggacaaucaaaaagaguugauuuuuguggaaagggcuaucaucuuauguccuucccucagucagcaccucaugguguagucuucuugcaugugacuuaugucccugcacaagaaaagaacuucacaacugcuccugccauuugucaugauggaaaagcacacuuuccucgugaaggugucuuuguuucaaauggcacacacugguuuguaacacaaaggaauuuuuaugaaccacaaaucauuacuacagacaacacauuugugucugguaacugugauguuguaauaggaauugucaacaacacaguuuaugauccuuugcaaccugaauuagacucauucaaggaggaguuagauaaauauuuuaagaaucauacaucaccagauguugauuuaggugacaucucuggcauuaaugcuucaguuguaaacauucaaaaagaaauugaccgccucaaugagguugccaagaauuuaaaugaaucucucaucgaucuccaagaacuuggaaaguaugagcaguauauaaaauggccaugguacauuuggcuagguuuuauagcuggcuugauugccauaguaauggugacaauuaugcuuugcuguaugaccaguugcuguaguugucucaagggcuguuguucuuguggauccugcugcaaauuugaugaagacgacucugagccagugcucaaaggagucaaauuacauuacacauaaggacuagucccuguucccagagcccacuuuuuuuucuuuuuuugaaauaaaauagccugucuuucagaucucaaaggcucuuuucagagccaccaaaaaaaaaaaaaaaaaaaaaaaaaaaaaaaaaaaaaaaaaaaaaaaaaaaaaaaaaaaaaaaaaaaaaaaaaaaaaaaaaaaaaaaaaaaaaaaaaaaaa

SEQ ID NO: 12222 - RNA, 4094 nt, Artificial Sequence
  SARS-CoV-2/England/200990660/2020__EPI_ISL_414523 spike protein mRNA wt (1-1273)
aggagagucccgcagucggcguccagcggcucugcuuguucgugugugugucguugcaggccuuauucaagcuuaccauguuuguuuuucuuguuuuauugccacuagucucuagucaguguguuaaucuuacaaccagaacucaauuacccccugcauacacuaauucuuucacacgugguguuuauuacccugacaaaguuuucagauccucaguuuuacauucaacucaggacuuguucuuaccuuucuuuuccaauguuacuugguuccaugcuauacaugucucugggaccaaugguacuaagagguuugauaacccuguccuaccauuuaaugaugguguuuauuuugcuuccacugagaagucuaacauaauaagaggcuggauuuuugguacuacuuuagauucgaagacccagucccuacuuauuguuaauaacgcuacuaauguuguuauuaaagucugugaauuucaauuuuguaaugauccauuuuuggguguuuauuaccacaaaaacaacaaaaguuggauggaaagugaguucagaguuuauucuagugcgaauaauugcacuuuugaauaugucucucagccuuuucuuauggaccuugaaggaaaacaggguaauuucaaaaaucuuagggaauuuguguuuaagaauauugaugguuauuuuaaaauauauucuaagcacacgccuauuaauuuagugcgugaucucccucaggguuuuucggcuuuagaaccauugguagauuugccaauagguauuaacaucacuagguuucaaacuuuacuugcuuuacauagaaguuauuugacuccuggugauucuucuucagguuggacagcuggugcugcagcuuauuauguggguuaucuucaaccuaggacuuuucuauuaaaauauaaugaaaauggaaccauuacagaugcuguagacugugcacuugacccucucucagaaacaaaguguacguugaaauccuucacuguagaaaaaggaaucuaucaaacuucuaacuuuagaguccaaccaacagaaucuauuguuagauuuccuaauauuacaaacuugugcccuuuuggugaaguuuuuaacgccaccagauuugcaucuguuuaugcuuggaacaggaagagaaucagcaacuguguugcugauuauucuguccuauauaauuccgcaucauuuuccacuuuuaaguguuauggagugucuccuacuaaauuaaaugaucucugcuuuacuaaugucuaugcagauucauuuguaauuagaggugaugaagucagacaaaucgcuccagggcaaacuggaaagauugcugauuauaauuauaaauuaccagaugauuuuacaggcugcguuauagcuuggaauucuaacaaucuugauucuaagguuggugguaauuauaauuaccuguauagauuguuuaggaagucuaaucucaaaccuuuugagagagauauuucaacugaaaucuaucaggccgguagcacaccuuguaaugguguugaagguuuuaauuguuacuuuccuuuacaaucauaugguuuccaacccacuaaugguguugguuaccaaccauacagaguaguaguacuuucuuuugaacuucuacaugcaccagcaacuguuuguggaccuaaaaagucuacuaauuugguuaaaaacaaaugugucaauuucaacuucaaugguuuaacaggcacagguguucuuacugagucuaacaaaaaguuucugccuuuccaacaauuuggcagagacauugcugacacuacugaugcuguccgugauccacagacacuugagauucuugacauuacaccauguucuuuugguggugucaguguuauaacaccaggaacaaauacuucuaaccagguugcuguucuuuaucaggguguuaacugcacagaagucccuguugcuauucaugcagaucaacuuacuccuacuuggcguguuuauucuacagguucuaauguuuuucaaacacgugcaggcuguuuaauaggggcugaacaugucaacaacucauaugagugugacauacccauuggugcagguauaugcgcuaguuaucagacucagacuaauucuccucggcgggcacguaguguagcuagucaauccaucauugccuacacuaugucacuuggugcagaaaauucaguugcuuacucuaauaacucuauugccauacccacaaauuuuacuauuaguguuaccacagaaauucuaccagugucuaugaccaagacaucaguagauuguacaauguacauuuguggugauucaacugaaugcagcaaucuuuuguugcaauauggcaguuuuuguacacaauuaaaccgugcuuuaacuggaauagcuguugaacaagacaaaaacacccaagaaguuuuugcacaagucaaacaaauuuacaaaacaccaccaauuaaagauuuuggugguuuuaauuuuucacaaauauuaccagauccaucaaaaccaagcaagaggucauuuauugaagaucuacuuuucaacaaagugacacuugcagaugcuggcuucaucaaacaauauggugauugccuuggugauauugcugcuagagaccucauuugugcacaaaaguuuaacggccuuacuguuuugccaccuuugcucacagaugaaaugauugcucaauacacuucugcacuguuagcggguacaaucacuucugguuggaccuuuggugcaggugcugcauuacaaauaccauuugcuaugcaaauggcuuauagguuuaaugguauuggaguuacacagaauguucucuaugagaaccaaaaauugauugccaaccaauuuaauagugcuauuggcaaaauucaagacucacuuucuuccacagcaagugcacuuggaaaacuucaagauguggucaaccaaaaugcacaagcuuuaaacacgcuuguuaaacaacuuagcuccaauuuuggugcaauuucaaguguuuuaaaugauauccuuucacgucuugacaaaguugaggcugaagugcaaauugauagguugaucacaggcagacuucaaaguuugcagacauaugugacucaacaauuaauuagagcugcagaaaucagagcuucugcuaaucuugcugcuacuaaaaugucagaguguguacuuggacaaucaaaaagaguugauuuuuguggaaagggcuaucaucuuauguccuucccucagucagcaccucaugguguagucuucuugcaugugacuuaugucccugcacaagaaaagaacuucacaacugcuccugccauuugucaugauggaaaagcacacuuuccucgugaaggugucuuuguuucaaauggcacacacugguuuguaacacaaaggaauuuuuaugaaccacaaaucauuacuacagacaacacauuugugucugguaacugugauguuguaauaggaauugucaacaacacaguuuaugauccuuugcaaccugaauuagacucauucaaggaggaguuagauaaauauuuuaagaaucauacaucaccagauguugauuuaggugacaucucuggcauuaaugcuucaguuguaaacauucaaaaagaaauugaccgccucaaugagguugccaagaauuuaaaugaaucucucaucgaucuccaagaacuuggaaaguaugagcaguauauaaaauggccaugguacauuuggcuagguuuuauagcuggcuugauugccauaguaauggugacaauuaugcuuugcuguaugaccaguugcuguaguugucucaagggcuguuguucuuguggauccugcugcaaauuugaugaagacgacucugagcuagugcucaaaggagucaaauuacauuacacauaaggacuagucccuguucccagagcccacuuuuuuuucuuuuuuugaaauaaaauagccugucuuucagaucucaaaggcucuuuucagagccaccaaaaaaaaaaaaaaaaaaaaaaaaaaaaaaaaaaaaaaaaaaaaaaaaaaaaaaaaaaaaaaaaaaaaaaaaaaaaaaaaaaaaaaaaaaaaaaaaaaaaa

SEQ ID NO: 12223 - RNA, 4094 nt, Artificial Sequence
  SARS-CoV-2/Australia/NSW09/2020__EPI_ISL_413595 spike protein mRNA wt (1-1273)
aggagagucccgcagucggcguccagcggcucugcuuguucgugugugugucguugcaggccuuauucaagcuuaccauguuuguuuuucuuguuuuauugccacuagucucuagucaguguguuaaucuuacaaccagaacucaauuacccccugcauacacuaauucuuucacacgugguguuuauuacccugacaaaguuuucagauccucaguuuuacauucaacucaggacuuguucuuaccuuucuuuuccaauguuacuugguuccaugcuauacaugucucugggaccaaugguacuaagagguuugauaacccuguccuaccauuuaaugaugguguuuauuuugcuuccacugagaagucuaacauaauaagaggcuggauuuuugguacuacuuuagauucgaagacccagucccuacuuauuguuaauaacgcuacuaauguuguuauuaaagucugugaauuucaauuuuguaaugauccauuuuuggguguuuauuaccacaaaaacaacaaaaguuggauggaaagugaguucagaguuuauucuagugcgaauaauugcacuuuugaauaugucucucagccuuuucuuauggaccuugaaggaaaacaggguaauuucaaaaaucuuagggaauuuguguuuaagaauauugaugguuauuuuaaaauauauucuaagcacacgccuauuaauuuagugcgugaucucccucaggguuuuucggcuuuagaaccauugguagauuugccaauagguauuaacaucacuagguuucaaacuuuacuugcuuuacauagaaguuauuugacuccuggugauucuucuucagguuggacagcuggugcugcagcuuauuauguggguuaucuucaaccuaggacuuuucuauuaaaauauaaugaaaauggaaccauuacagaugcuguagacugugcacuugacccucucucagaaacaaaguguacguugaaauccuucacuguagaaaaaggaaucuaucaaacuucuaacuuuagaguccaaccaacagaaucuauuguuagauuuccuaauauuacaaacuugugcccuuuuggugaaguuuuuaacgccaccagauuugcaucuguuuaugcuuggaacaggaagagaaucagcaacuguguugcugauuauucuguccuauauaauuccgcaucauuuuccacuuuuaaguguuauggagugucuccuacuaaauuaaaugaucucugcuuuacuaaugucuaugcagauucauuuguaauuagaggugaugaagucagacaaaucgcuccagggcaaacuggaaagauugcugauuauaauuauaaauuaccagaugauuuuacaggcugcguuauagcuuggaauucuaacaaucuugauucuaagguuggugguaauuauaauuaccuguauagauuguuuaggaagucuaaucucaaaccuuuugagagagauauuucaacugaaaucuaucaggccgguagcacaccuuguaaugguguugaagguuuuaauuguuacuuuccuuuacaaucauaugguuuccaacccacuaaugguguugguuaccaaccauacagaguaguaguacuuucuuuugaacuucuacaugcaccagcaacuguuuguggaccuaaaaagucuacuaauuugguuaaaaacaaaugugucaauuucaacuucaaugguuuaacaggcacagguguucuuacugagucuaacaaaaaguuucugccuuuccaacaauuuggcagagacauugcugacacuacugaugcuguccgugauccacagacacuugagauucuugacauuacaccauguucuuuugguggugucaguguuauaacaccaggaacaaauacuucuaaccagguugcuguucuuuaucaggauguuaacugcacagaagucccuguugcuauucaugcagaucaacuuacuccuacuuggcguguuuauucuacagguucuaauguuuuucaaacacgugcaggcuguuuaauaggggcugaacaugucaacaacucauaugagugugacauacccauuggugcagguauaugcgcuaguuaucagacucagacuaauucuccucggcgggcacguaguguagcuagucaauccaucauugccuacacuaugucacuuggugcagaaaauucaguugcuuacucuaauaacucuauugccauacccacaaauuuuacuauuaguguuaccacagaaauucuaccagugucuaugaccaagacaucaguagauuguacaauguacauuuguggugauucaacugaaugcagcaaucuuuuguugcaauauggcaguuuuuguacacaauuaaaccgugcuuuaacuggaauagcuguugaacaagacaaaaacacccaagaaguuuuugcacaagucaaacaaauuuacaaaacaccaccaauuaaagauuuuggugguuuuaauuuuucacaaauauuaccagauccaucaaaaccaagcaagaggucauuuauugaagaucuacuuuucaacaaagugacacuugcagaugcuggcuucaucaaacaauauggugauugccuuggugauauugcugcuagagaccucauuugugcacaaaaguuuaacggccuuacuguuuugccaccuuugcucacagaugaaaugauugcucaauacacuucugcacuguuagcggguacaaucacuucugguuggaccuuuggugcaggugcugcauuacaaauaccauuugcuaugcaaauggcuuauagguuuaaugguauuggaguuacacagaauguucucuaugagaaccaaaaauugauugccaaccaauuuaauagugcuauuggcaaaauucaagacucacuuucuuucacagcaagugcacuuggaaaacuucaagauguggucaaccaaaaugcacaagcuuuaaacacgcuuguuaaacaacuuagcuccaauuuuggugcaauuucaaguguuuuaaaugauauccuuucacgucuugacaaaguugaggcugaagugcaaauugauagguugaucacaggcagacuucaaaguuugcagacauaugugacucaacaauuaauuagagcugcagaaaucagagcuucugcuaaucuugcugcuacuaaaaugucagaguguguacuuggacaaucaaaaagaguugauuuuuguggaaagggcuaucaucuuauguccuucccucagucagcaccucaugguguagucuucuugcaugugacuuaugucccugcacaagaaaagaacuucacaacugcuccugccauuugucaugauggaaaagcacacuuuccucgugaaggugucuuuguuucaaauggcacacacugguuuguaacacaaaggaauuuuuaugaaccacaaaucauuacuacagacaacacauuugugucugguaacugugauguuguaauaggaauugucaacaacacaguuuaugauccuuugcaaccugaauuagacucauucaaggaggaguuagauaaauauuuuaagaaucauacaucaccagauguugauuuaggugacaucucuggcauuaaugcuucaguuguaaacauucaaaaagaaauugaccgccucaaugagguugccaagaauuuaaaugaaucucucaucgaucuccaagaacuuggaaaguaugagcaguauauaaaauggccaugguacauuuggcuagguuuuauagcuggcuugauugccauaguaauggugacaauuaugcuuugcuguaugaccaguugcuguaguugucucaagggcuguuguucuuguggauccugcugcaaauuugaugaagacgacucugagccagugcucaaaggagucaaauuacauuacacauaaggacuagucccuguucccagagcccacuuuuuuuucuuuuuuugaaauaaaauagccugucuuucagaucucaaaggcucuuuucagagccaccaaaaaaaaaaaaaaaaaaaaaaaaaaaaaaaaaaaaaaaaaaaaaaaaaaaaaaaaaaaaaaaaaaaaaaaaaaaaaaaaaaaaaaaaaaaaaaaaaaaaa

SEQ ID NO: 12224 - RNA, 4094 nt, Artificial Sequence
  SARS-CoV-2/Australia/NSW10/2020__EPI_ISL_413596 spike protein mRNA wt (1-1273)
aggagagucccgcagucggcguccagcggcucugcuuguucgugugugugucguugcaggccuuauucaagcuuaccauguuuguuuuucuuguuuuauugccacuagucucuagucaguguguuaaucuuacaaccagaacucaauuacccccugcauacacuaauucuuucacacgugguguuuauuacccugacaaaguuuucagauccucaguuuuacauucaacucaggacuuguucuuaccuuucuuuuccaauguuacuugguuccaugcuauacaugucucugggaccaaugguacuaagagguuugauaacccuguccuaccauuuaaugaugguguuuauuuugcuuccacugagaagucuaacauaauaagaggcuggauuuuugguacuacuuuagauucgaagacccagucccuacuuauuguuaauaacgcuacuaauguuguuauuaaagucugugaauuucaauuuuguaaugauccauuuuuggguguuuauuaccacaaaaacaacaaaaguuggauggaaagugaguucagaguuuauucuagugcgaauaauugcacuuuugaauaugucucucagccuuuucuuauggaccuugaaggaaaacaggguaauuucaaaaaucuuagggaauuuguguuuaagaauauugaugguuauuuuaaaauauauucuaagcacacgccuauuaauuuagugcgugaucucccucaggguuuuucggcuuuagaaccauugguagauuugccaauagguauuaacaucacuagguuucaaacuuuacuugcuuuacauagaaguuauuugacuccuggugauucuucuucagguuggacagcuggugcugcagcuuauuauguggguuaucuucaaccuaggacuuuucuauuaaaauauaaugaaaauggaaccauuacagaugcuguagacugugcacuugacccucucucagaaacaaaguguacguugaaauccuucacuguagaaaaaggaaucuaucaaacuucuaacuuuagaguccaaccaacagaaucuauuguuagauuuccuaauauuacaaacuugugcccuuuuggugaaguuuuuaacgccaccagauuugcaucuguuuaugcuuggaacaggaagagaaucagcaacuguguugcugauuauucuguccuauauaauuccgcaucauuuuccacuuuuaaguguuauggagugucuccuacuaaauuaaaugaucucugcuuuacuaaugucuaugcagauucauuuguaauuagaggugaugaagucagacaaaucgcuccagggcaaacuggaaagauugcugauuauaauuauaaauuaccagaugauuuuacaggcugcguuauagcuuggaauucuaacaaucuugauucuaagguuggugguaauuauaauuaccuguauagauuguuuaggaagucuaaucucaaaccuuuugagagagauauuucaacugaaaucuaucaggccgguagcacaccuuguaaugguguugaagguuuuaauuguuacuuuccuuuacaaucauaugguuuccaacccacuaaugguguugguuaccaaccauacagaguaguaguacuuucuuuugaacuucuacaugcaccagcaacuguuuguggaccuaaaaagucuacuaauuugguuaaaaacaaaugugucaauuucaacuucaaugguuuaacaggcacagguguucuuacugagucuaacaaaaaguuucugccuuuccaacaauuuggcagagacauugcugacacuacugaugcuguccgugauccacagacacuugagauucuugacauuacaccauguucuuuugguggugucaguguuauaacaccaggaacaaauacuucuaaccagguugcuguucuuuaucaggauguuaacugcacagaagucccuguugcuauucaugcagaucaacuuacuccuacuuggcguguuuauucuacagguucuaauguuuuucaaacacgugcaggcuguuuaauaggggcugaacaugucaacaacucauaugagugugacauacccauuggugcagguauaugcgcuaguuaucagacucagacuaauucuccucggcgggcacguaguguagcuagucaauccaucauugccuacacuaugucacuuggugcagaaaauucaguugcuuacucuaauaacucuauugccauacccacaaauuuuacuauuaguguuaccacagaaauucuaccagugucuaugaccaagacaucaguagauuguacaauguacauuuguggugauucaacugaaugcagcaaucuuuuguugcaauauggcaguuuuuguacacaauuaaaccgugcuuuaacuggaauagcuguugaacaagacaaaaacacccaagaaguuuuugcacaagucaaacaaauuuacaaaacaccaccaauuaaagauuuuggugguuuuaauuuuucacaaauauuaccagauccaucaaaaccaagcaagaggucauuuauugaagaucuacuuuucaacaaagugacacuugcagaugcuggcuucaucaaacaauauggugauugccuuggugauauugcugcuagagaccucauuugugcacaaaaguuuaacggccuuacuguuuugccaccuuugcucacagaugaaaugauugcucaauacacuucugcacuguuagcggguacaaucacuucugguuggaccuuuggugcaggugcugcauuacaaauaccauuugcuaugcaaauggcuuauagguuuaaugguauuggaguuacacagaauguucucuaugagaaccaaaaauugauugccaaccaauuuaauagugcuauuggcaaaauucaagacucacuuucuuccacagcaagugcacuuggaaaacuucaagauguggucaaccaaaaugcacaagcuuuaaacacgcuuguuaaacaacuuagcuccaauuuuggugcaauuucaaguguuuuaaaugauauccuuucacgucuugacaaaguugaggcugaagugcaaauugauagguugaucacaggcagacuucaaaguuugcagacauaugugacucaacaauuaauuagagcugcagaaaucagagcuucugcuaaucuugcugcuacuaaaaugucagaguguguacuuggacaaucaaaaagaguugauuuuuguggaaagggcuaucaucuuauguccuucccucagucagcaccucaugguguagucuucuugcaugugacuuaugucccugcacaagaaaagaacuucacaacugcuccugccauuugucaugauggaaaagcacacuuuccucgugaaggugucuuuguuucaaauggcacacacugguuuguaacacaaaggaauuuuuaugaaccacaaaucauuacuacagacaacacauuugugucugguaacugugauguuguaauaggaauugucaacaacacaguuuaugauccuuugcaaccugaauuagacucauucaaggaggaguuagauaaauauuuuaagaaucauacaucaccagauguugauuuaggugacaucucuggcauuaaugcuucaguuguaaacauucaaaaagaaauugaccgccucaaugagguugccaagaauuuaaaugaaucucucaucgaucuccaagaacuuggaaaguaugagcaguauauaaaauggccaugguacauuuggcuagguuuuauagcuggcuugauugccauaguaauggugacaauuaugcuuugcuguaugaccaguugcuguaguugucucaagggcuguuguucuuguggauccugcuucaaauuugaugaagacgacucugagccagugcucaaaggagucaaauuacauuacacauaaggacuagucccuguucccagagcccacuuuuuuuucuuuuuuugaaauaaaauagccugucuuucagaucucaaaggcucuuuucagagccaccaaaaaaaaaaaaaaaaaaaaaaaaaaaaaaaaaaaaaaaaaaaaaaaaaaaaaaaaaaaaaaaaaaaaaaaaaaaaaaaaaaaaaaaaaaaaaaaaaaaaa

SEQ ID NO: 12225 - RNA, 4094 nt, Artificial Sequence
  SARS-CoV-2/Switzerland/1000477797/2020__EPI_ISL_413023 spike protein mRNA wt (1-1273)
aggagagucccgcagucggcguccagcggcucugcuuguucgugugugugucguugcaggccuuauucaagcuuaccauguuuguuuuucuuguuuuauugccacuagucucuagucaguguguuaaucuuacaaccagaacucaauuacccccugcauacacuaauucuuucacacgugguguuuauuacccugacaaaguuuucagauccucaguuuuacauucaacucaggacuuguucuuaccuuucuuuuccaauguuacuugguuccaugcuauacaugucucugggaccaaugguacuaagagguuugauaacccuguccuaccauuuaaugaugguguuuauuuugcuuccacugagaagucuaacauaauaagaggcuggauuuuugguacuacuuuagauucgaagacccagucccuacuuauuguuaauaacgcuacuaauguuguuauuaaagucugugaauuucaauuuuguaaugauccauuuuuggguguuuauuaccacaaaaacaacaaaaguuggauggaaagugaguucagaguuuauucuagugcgaauaauugcacuuuugaauaugucucucagccuuuucuuauggaccuugaaggaaaacaggguaauuucaaaaaucuuagggaauuuguguuuaagaauauugaugguuauuuuaacauauauucuaagcacacgccuauuaauuuagugcgugaucucccucaggguuuuucggcuuuagaaccauugguagauuugccaauagguauuaacaucacuagguuucaaacuuuacuugcuuuacauagaaguuauuugacuccuggugauucuucuucagguuggacagcuggugcugcagcuuauuauguggguuaucuucaaccuaggacuuuucuauuaaaauauaaugaaaauggaaccauuacagaugcuguagacugugcacuugacccucucucagaaacaaaguguacguugaaauccuucacuguagaaaaaggaaucuaucaaacuucuaacuuuagaguccaaccaacagaaucuauuguuagauuuccuaauauuacaaacuugugcccuuuuggugaaguuuuuaacgccaccagauuugcaucuguuuaugcuuggaacaggaagagaaucagcaacuguguugcugauuauucuguccuauauaauuccgcaucauuuuccacuuuuaaguguuauggagugucuccuacuaaauuaaaugaucucugcuuuacuaaugucuaugcagauucauuuguaauuagaggugaugaagucagacaaaucgcuccagggcaaacuggaaagauugcugauuauaauuauaaauuaccagaugauuuuacaggcugcguuauagcuuggaauucuaacaaucuugauucuaagguuggugguaauuauaauuaccuguauagauuguuuaggaagucuaaucucaaaccuuuugagagagauauuucaacugaaaucuaucaggccgguagcacaccuuguaaugguguugaagguuuuaauuguuacuuuccuuuacaaucauaugguuuccaacccacuaaugguguugguuaccaaccauacagaguaguaguacuuucuuuugaacuucuacaugcaccagcaacuguuuguggaccuaaaaagucuacuaauuugguuaaaaacaaaugugucaauuucaacuucaaugguuuaacaggcacagguguucuuacugagucuaacaaaaaguuucugccuuuccaacaauuuggcagagacauugcugacacuacugaugcuguccgugauccacagacacuugagauucuugacauuacaccauguucuuuugguggugucaguguuauaacaccaggaacaaauacuucuaaccagguugcuguucuuuaucaggguguuaacugcacagaagucccuguugcuauucaugcagaucaacuuacuccuacuuggcguguuuauucuacagguucuaauguuuuucaaacacgugcaggcuguuuaauaggggcugaacaugucaacaacucauaugagugugacauacccauuggugcagguauaugcgcuaguuaucagacucagacuaauucuccucggcgggcacguaguguagcuagucaauccaucauugccuacacuaugucacuuggugcagaaaauucaguugcuuacucuaauaacucuauugccauacccacaaauuuuacuauuaguguuaccacagaaauucuaccagugucuaugaccaagacaucaguagauuguacaauguacauuuguggugauucaacugaaugcagcaaucuuuuguugcaauauggcaguuuuuguacacaauuaaaccgugcuuuaacuggaauagcuguugaacaagacaaaaacacccaagaaguuuuugcacaagucaaacaaauuuacaaaacaccaccaauuaaagauuuuggugguuuuaauuuuucacaaauauuaccagauccaucaaaaccaagcaagaggucauuuauugaagaucuacuuuucaacaaagugacacuugcagaugcuggcuucaucaaacaauauggugauugccuuggugauauugcugcuagagaccucauuugugcacaaaaguuuaacggccuuacuguuuugccaccuuugcucacagaugaaaugauugcucaauacacuucugcacuguuagcggguacaaucacuucugguuggaccuuuggugcaggugcugcauuacaaauaccauuugcuaugcaaauggcuuauagguuuaaugguauuggaguuacacagaauguucucuaugagaaccaaaaauugauugccaaccaauuuaauagugcuauuggcaaaauucaagacucacuuucuuccacagcaagugcacuuggaaaacuucaagauguggucaaccaaaaugcacaagcuuuaaacacgcuuguuaaacaacuuagcuccaauuuuggugcaauuucaaguguuuuaaaugauauccuuucacgucuugacaaaguugaggcugaagugcaaauugauagguugaucacaggcagacuucaaaguuugcagacauaugugacucaacaauuaauuagagcugcagaaaucagagcuucugcuaaucuugcugcuacuaaaaugucagaguguguacuuggacaaucaaaaagaguugauuuuuguggaaagggcuaucaucuuauguccuucccucagucagcaccucaugguguagucuucuugcaugugacuuaugucccugcacaagaaaagaacuucacaacugcuccugccauuugucaugauggaaaagcacacuuuccucgugaaggugucuuuguuucaaauggcacacacugguuuguaacacaaaggaauuuuuaugaaccacaaaucauuacuacagacaacacauuugugucugguaacugugauguuguaauaggaauugucaacaacacaguuuaugauccuuugcaaccugaauuagacucauucaaggaggaguuagauaaauauuuuaagaaucauacaucaccagauguugauuuaggugacaucucuggcauuaaugcuucaguuguaaacauucaaaaagaaauugaccgccucaaugagguugccaagaauuuaaaugaaucucucaucgaucuccaagaacuuggaaaguaugagcaguauauaaaauggccaugguacauuuggcuagguuuuauagcuggcuugauugccauaguaauggugacaauuaugcuuugcuguaugaccaguugcuguaguugucucaagggcuguuguucuuguggauccugcugcaaauuugaugaagacgacucugagccagugcucaaaggagucaaauuacauuacacauaaggacuagucccuguucccagagcccacuuuuuuuucuuuuuuugaaauaaaauagccugucuuucagaucucaaaggcucuuuucagagccaccaaaaaaaaaaaaaaaaaaaaaaaaaaaaaaaaaaaaaaaaaaaaaaaaaaaaaaaaaaaaaaaaaaaaaaaaaaaaaaaaaaaaaaaaaaaaaaaaaaaaa

SEQ ID NO: 12226 - RNA, 4094 nt, Artificial Sequence
  SARS-CoV-2/Belgium/BA-02291/2020__EPI_ISL_415159 spike protein mRNA wt (1-1273)
aggagagucccgcagucggcguccagcggcucugcuuguucgugugugugucguugcaggccuuauucaagcuuaccauguuuguuuuucuuguuuuauugccacuagucucuagucaguguguuaaucuuacaaccagaacucaauuacccccugcauacacuaauucuuucacacgugguguuuauuacccugacaaaguuuucagauccucaguuuuacauucaacucaggacuuguucuuaccuuucuuuuccaauguuacuugguuccaugcuauacaugucucugggaccaaugguacuaagagguuugauaacccuguccuaccauuuaaugaugguguuuauuuugcuuccacugagaagucuaacauaauaagaggcuggauuuuugguacuacuuuagauucgaagacccagucccuacuuauuguuaauaacgcuacuaauguuguuauuaaagucugugaauuucaauuuuguaaugauccauuuuuggguguuuauuaccacaaaaacaacaaaaguuggauggaaagugaguucagaguuuauucuagugcgaauaauugcacuuuugaauaugucucucagccuuuucuuauggaccuugaaggaaaacaggguaauuucaaaaaucuuagggaauuuguguuuaagaauauugaugguuauuuuaaaauauauucuaagcacacgccuauuaauuuagugcgugaucucccucaggguuuuucggcuuuagaaccauugguagauuugccaauagguauuaacaucacuagguuucaaacuuuacuugcuuuacauagaaguuauuugacuccuggugauucuucuucagguuggacagcuggugcugcagcuuauuauguggguuaucuucaaccuaggacuuuucuauuaaaauauaaugaaaauggaaccauuacagaugcuguagacugugcacuugacccucucucagaaacaaaguguacguugaaauccuucacuguagaaaaaggaaucuaucaaacuucuaacuuuagaguccaaccaacagaaucuauuguuagauuuccuaauauuacaaacuugugcccuuuuggugaaguuuuuaacgccaccagauuugcaucuguuuaugcuuggaacaggaagagaaucagcaacuguguugcugauuauucuguccuauauaauuccgcaucauuuuccacuuuuaaguguuauggagugucuccuacuaaauuaaaugaucucugcuuuacuaaugucuaugcagauucauuuguaauuagaggugaugaagucagacaaaucgcuccagggcaaacuggaaagauugcugauuauaauuauaaauuaccagaugauuuuacaggcugcguuauagcuuggaauucuaacaaucuugauucuaagguuggugguaauuauaauuaccuguauagauuguuuaggaggucuaaucucaaaccuuuugagagagauauuucaacugaaaucuaucaggccgguagcacaccuuguaaugguguugaagguuuuaauuguuacuuuccuuuacaaucauaugguuuccaacccacuaaugguguugguuaccaaccauacagaguaguaguacuuucuuuugaacuucuaccugcaccagcaacuguuuguggaccuaaaaagucuacuaauuugguuaaaaacaaaugugucaauuucaacuucaaugguuuaacaggcacagguguucuuacugagucuaacaaaaaguuucugccuuuccaacaauuuggcagagacauugcugacacuacugaugcuguccgugauccacagacacuugagauucuugacauuacaccauguucuuuugguggugucaguguuauaacaccaggaacaaauacuucuaaccagguugcuguucuuuaucaggguguuaacugcacagaagucccuguugcuauucaugcagaucaacuuacuccuacuuggcguguuuauucuacagguucuaauguuuuucaaacacgugcaggcuguuuaauaggggcugaacaugucaacaacucauaugagugugacauacccauuggugcagguauaugcgcuaguuaucagacucagacuaauucuccucggcgggcacguaguguagcuagucaauccaucauugccuacacuaugucacuuggugcagaaaauucaguugcuuacucuaauaacucuauugccauacccacaaauuuuacuauuaguguuaccacagaaauucuaccagugucuaugaccaagacaucaguagauuguacaauguacauuuguggugauucaacugaaugcagcaaucuuuuguugcaauauggcaguuuuuguacacaauuaaaccgugcuuuaacuggaauagcuguugaacaagacaaaaacacccaagaaguuuuugcacaagucaaacaaauuuacaaaacaccaccaauuaaagauuuuggugguuuuaauuuuucacaaauauuaccagauccaucaaaaccaagcaagaggucauuuauugaagaucuacuuuucaacaaagugacacuugcagaugcuggcuucaucaaacaauauggugauugccuuggugauauugcugcuagagaccucauuugugcacaaaaguuuaacggccuuacuguuuugccaccuuugcucacagaugaaaugauugcucaauacacuucugcacuguuagcggguacaaucacuucugguuggaccuuuggugcaggugcugcauuacaaauaccauuugcuaugcaaauggcuuauagguuuaaugguauuggaguuacacagaauguucucuaugagaaccaaaaauugauugccaaccaauuuaauagugcuauuggcaaaauucaagacucacuuucuucugcagcaccugcacuuggaaaacuucaagauguggucaaccaaaaugcacaagcuuuaaacacgcuuguuaaacaacuuagcuccaauuuuggugcaauuucaaguguuuuaaaugauauccuuucacgucuugacaaaguugaggcugaagugcaaauugauagguugaucacaggcagacuucaaaguuugcagacauaugugacucaacaauuaauuagagcugcagaaaucagagcuucugcuaaucuugcugcuacuaaaaugucagaguguguacuuggacaaucaaaaagaguugauuuuuguggaaagggcuaucaucuuauguccuucccucagucagcaccucaugguguagucuucuugcaugugacuuaugucccugcacaagaaaagaacuucacaacugcuccugccauuugucaugauggaaaagcacacuuuccucgugaaggugucuuuguuucaaauggcacacacugguuuguaacacaaaggaauuuuuaugaaccacaaaucauuacuacagacaacacauuugugucugguaacugugauguuguaauaggaauugucaacaacacaguuuaugauccuuugcaaccugaauuagacucauucaaggaggaguuagauaaauauuuuaagaaucauacaucaccagauguugauuuaggugacaucucuggcauuaaugcuucaguuguaaacauucaaaaagaaauugaccgccucaaugagguugccaagaauuuaaaugaaucucucaucgaucuccaagaacuuggaaaguaugagcaguauauaaaauggccaugguacauuuggcuagguuuuauagcuggcuugauugccauaguaauggugacaauuaugcuuugcuguaugaccaguugcuguaguugucucaagggcuguuguucuuguggauccugcugcaaauuugaugaagacgacucugagccagugcucaaaggagucaaauuacauuacacauaaggacuagucccuguucccagagcccacuuuuuuuucuuuuuuugaaauaaaauagccugucuuucagaucucaaaggcucuuuucagagccaccaaaaaaaaaaaaaaaaaaaaaaaaaaaaaaaaaaaaaaaaaaaaaaaaaaaaaaaaaaaaaaaaaaaaaaaaaaaaaaaaaaaaaaaaaaaaaaaaaaaaa

SEQ ID NO: 12227 - RNA, 4094 nt, Artificial Sequence
  SARS-CoV-2/USA/WA8-UW5/2020__EPI_ISL_413486 spike protein mRNA wt (1-1273)
aggagagucccgcagucggcguccagcggcucugcuuguucgugugugugucguugcaggccuuauucaagcuuaccauguuuguuuuucuuguuuuauugccacuagucucuagucaguguguuaaucuuacaaccagaacucaauuacccccugcauacacuaauucuuucacacgugguguuuauuacccugacaaaguuuucagauccucaguuuuacauucaacucaggacuuguucuuaccuuucuuuuccaauguuacuugguuccaugcuauacaugucucugggaccaaugguacuaagagguuugauaacccuguccuaccauuuaaugaugguguuuauuuugcuuccacugagaagucuaacauaauaagaggcuggauuuuugguacuacuuuagauucgaagacccagucccuacuuauuguuaauaacgcuacuaauguuguuauuaaagucugugaauuucaauuuuguaaugauccauuuuuggguguuuauuaccacaaaaacaacaaaaguuggauggaaagugaguucagaguuuauucuagugcgaauaauugcacuuuugaauaugucucucagccuuuucuuauggaccuugaaggaaaacaggguaauuucaaaaaucuuagggaauuuguguuuaagaauauugaugguuauuuuaaaauauauucuaagcacacgccuauuaauuuagugcgugaucucccucaggguuuuucggcuuuagaaccauugguagauuugccaauagguauuaacaucacuagguuucaaacuuuacuugcuuuacauagaaguuauuugacuccuggugauucuucuucagguuggacagcuggugcugcagcuuauuauguggguuaucuucaaccuaggacuuuucuauuaaaauauaaugaaaauggaaccauuacagaugcuguagacugugcacuugacccucucucagaaacaaaguguacguugaaauccuucacuguagaaaaaggaaucuaucaaacuucuaacuuuagaguccaaccaacagaaucuauuguuagauuuccuaauauuacaaacuugugcccuuuuggugaaguuuuuaacgccaccagauuugcaucuguuuaugcuuggaacaggaagagaaucagcaacuguguugcugauuauucuguccuauauaauuccgcaucauuuuccacuuuuaaguguuauggagugucuccuacuaaauuaaaugaucucugcuuuacuaaugucuaugcagauucauuuguaauuagaggugaugaagucagacaaaucgcuccagggcaaacuggaaagauugcugauuauaauuauaaauuaccagaugauuuuacaggcugcguuauagcuuggaauucuaacaaucuugauucuaagguuggugguaauuauaauuaccuguauagauuguuuaggaagucuaaucucaaaccuuuugagagagauauuucaacugaaaucuaucaggccgguagcacaccuuguaaugguguugaagguuuuaauuguuacuuuccuuuacaaucauaugguuuccaacccacuaaugguguugguuaccaaccauacagaguaguaguacuuucuuuugaacuucuacaugcaccagcaacuguuuguggaccuaaaaagucuacuaauuugguuaaaaacaaaugugucaauuucaacuucaaugguuuaacaggcacagguguucuuacugagucuaacaaaaaguuucugccuuuccaacaauuuggcagagacauugcugacacuacugaugcuguccgugauccacagacacuugagauucuugacauuacaccauguucuuuugguggugucaguguuauaacaccaggaacaaauacuucuaaccagguugcuguucuuuaucaggauguuaacugcacagaagucccuguugcuauucaugcagaucaacuuacuccuacuuggcguguuuauucuacagguucuaauguuuuucaaacacgugcaggcuguuuaauaggggcugaauaugucaacaacucauaugagugugacauacccauuggugcagguauaugcgcuaguuaucagacucagacuaauucuccucggcgggcacguaguguagcuagucaauccaucauugccuacacuaugucacuuggugcagaaaauucaguugcuuacucuaauaacucuauugccauacccacaaauuuuacuauuaguguuaccacagaaauucuaccagugucuaugaccaagacaucaguagauuguacaauguacauuuguggugauucaacugaaugcagcaaucuuuuguugcaauauggcaguuuuuguacacaauuaaaccgugcuuuaacuggaauagcuguugaacaagacaaaaacacccaagaaguuuuugcacaagucaaacaaauuuacaaaacaccaccaauuaaagauuuuggugguuuuaauuuuucacaaauauuaccagauccaucaaaaccaagcaagaggucauuuauugaagaucuacuuuucaacaaagugacacuugcagaugcuggcuucaucaaacaauauggugauugccuuggugauauugcugcuagagaccucauuugugcacaaaaguuuaacggccuuacuguuuugccaccuuugcucacagaugaaaugauugcucaauacacuucugcacuguuagcggguacaaucacuucugguuggaccuuuggugcaggugcugcauuacaaauaccauuugcuaugcaaauggcuuauagguuuaaugguauuggaguuacacagaauguucucuaugagaaccaaaaauugauugccaaccaauuuaauagugcuauuggcaaaauucaagacucacuuucuuccacagcaagugcacuuggaaaacuucaagauguggucaaccaaaaugcacaagcuuuaaacacgcuuguuaaacaacuuagcuccaauuuuggugcaauuucaaguguuuuaaaugauauccuuucacgucuugacaaaguugaggcugaagugcaaauugauagguugaucacaggcagacuucaaaguuugcagacauaugugacucaacaauuaauuagagcugcagaaaucagagcuucugcuaaucuugcugcuacuaaaaugucagaguguguacuuggacaaucaaaaagaguugauuuuuguggaaagggcuaucaucuuauguccuucccucagucagcaccucaugguguagucuucuugcaugugacuuaugucccugcacaagaaaagaacuucacaacugcuccugccauuugucaugauggaaaagcacacuuuccucgugaaggugucuuuguuucaaauggcacacacugguuuguaacacaaaggaauuuuuaugaaccacaaaucauuacuacagacaacacauuugugucugguaacugugauguuguaauaggaauugucaacaacacaguuuaugauccuuugcaaccugaauuagacucauucaaggaggaguuagauaaauauuuuaagaaucauacaucaccagauguugauuuaggugacaucucuggcauuaaugcuucaguuguaaacauucaaaaagaaauugaccgccucaaugagguugccaagaauuuaaaugaaucucucaucgaucuccaagaacuuggaaaguaugagcaguauauaaaauggccaugguacauuuggcuagguuuuauagcuggcuugauugccauaguaauggugacaauuaugcuuugcuguaugaccaguugcuguaguugucucaagggcuguuguucuuguggauccugcugcaaauuugaugaagacgacucugagccagugcucaaaggagucaaauuacauuacacauaaggacuagucccuguucccagagcccacuuuuuuuucuuuuuuugaaauaaaauagccugucuuucagaucucaaaggcucuuuucagagccaccaaaaaaaaaaaaaaaaaaaaaaaaaaaaaaaaaaaaaaaaaaaaaaaaaaaaaaaaaaaaaaaaaaaaaaaaaaaaaaaaaaaaaaaaaaaaaaaaaaaaa

SEQ ID NO: 12228 - RNA, 4094 nt, Artificial Sequence
  SARS-CoV-2/England/20102000506/2020__EPI_ISL_415147 spike protein mRNA wt (1-1273)
aggagagucccgcagucggcguccagcggcucugcuuguucgugugugugucguugcaggccuuauucaagcuuaccauguuuguuuuucuuguuuuauugccacuagucucuagucaguguguuaaucuuacaaccagaacucaauuacccccugcauacacuaauucuuucacacgugguguuuauuacccugacaaaguuuucagauccucaguuuuacauucaacucaggacuuguucuuaccuuucuuuuccaauguuacuugguuccaugcuauacaugucucugggaccaaugguacuaagagguuugauaacccuguccuaccauuuaaugaugguguuuauuuugcuuccacugagaagucuaacauaauaagaggcuggauuuuugguacuacuuuagauucgaagacccagucccuacuuauuguuaauaacgcuacuaauguuguuauuaaagucugugaauuucaauuuuguaaugauccauuuuuggguguuuauuaccacaaaaacaacaaaaguuggauggaaagugaguucagaguuuauucuagugcgaauaauugcacuuuugaauaugucucucagccuuuucuuauggaccuugaaggaaaacaggguaauuucaaaaaucuuagggaauuuguguuuaagaauauugaugguuauuuuaaaauauauucuaagcacacgccuauuaauuuagugcgugaucucccucaggguuuuucggcuuuagaaccauugguagauuugccaauagguauuaacaucacuagguuucaaacuuuacuugcuuuacauagaaguuauuugacuccuggugauucuucuucagguuggacagcuggugcugcagcuuauuauguggguuaucuucaaccuaggacuuuucuauuaaaauauaaugaaaauggaaccauuacagaugcuguagacugugcacuugacccucucucagaaacaaaguguacguugaaauccuucacuguagaaaaaggaaucuaucaaacuucuaacuuuagaguccaaccaacagaaucuauuguuagauuuccuaauauuacaaacuugugcccuuuuggugaaguuuuuaacgccaccagauuugcaucuguuuaugcuuggaacaggaagagaaucagcaacuguguugcugauuauucuguccuauauaauuccgcaucauuuuccacuuuuaaguguuauggagugucuccuacuaaauuaaaugaucucugcuuuacuaaugucuaugcagauucauuuguaauuagaggugaugaagucagacaaaucgcuccagggcaaacuggaaagauugcugauuauaauuauaaauuaccagaugauuuuacaggcugcguuauagcuuggaauucuaacaaucuugauucuaagguuggugguaauuauaauuaccuguauagauuguuuaggaagucuaaucucaaaccuuuugagagagauauuucaacugaaaucuaucaggccgguagcacaccuuguaaugguguugaagguuuuaauuguuacuuuccuuuacaaucauaugguuuccaacccacuaaugguguugguuaccaaccauacagaguaguaguacuuucuuuugaacuucuacaugcaccagcaacuguuuguggaccuaaaaagucuacuaauuugguuaaaaacaaaugugucaauuucaacuucaaugguuuaacaggcacagguguucuuacugagucuaacaaaaaguuucugccuuuccaacaauuuggcagagacauugcugacacuacugaugcuguccgugauccacagacacuugagauucuugacauuacaccauguucuuuugguggugucaguguuauaacaccaggaacaaauacuucuaaccagguugcuguucuuuaucaggguguuaacugcacagaagucccuguugcuauucaugcagaucaacuuacuccuacuuggcguguuuauucuacagguucuaauguuuuucaaacacgugcaggcuguuuaauaggggcugaacaugucaacaacucauaugagugugacauacccauuggugcagguauaugcgcuaguuaucagacucagacuaauucuccucggcgggcacguaguguagcuagucaauccaucauugccuacacuaugucacuuggugcagaaaauucaguugcuuacucuaauaacucuauugccauacccacaaauuuuacuauuaguguuaccacagaaauucuaccagugucuaugaccaagacaucaguagauuguacaauguacauuuguggugauucaacugaaugcagcaaucuuuuguugcaauauggcaguuuuuguacacaauuaaaccgugcuuuaacuggaauagcuguugaacaagacaaaaacacccaagaaguuuuugcacaagucaaacaaauuuacaaaacaccaccaauuaaagauuuuggugguuuuaauuuuucacaaauauuaccagauccaucaaaaccaagcaagaggucauuuauugaagaucuacuuuucaacaaagugacacuugcagaugcuggcuucaucaaacaauaugguuauugccuuggugauauugcugcuagagaccucauuugugcacaaaaguuuaacggccuuacuguuuugccaccuuugcucacagaugaaaugauugcucaauacacuucugcacuguuagcggguacaaucacuucugguuggaccuuuggugcaggugcugcauuacaaauaccauuugcuaugcaaauggcuuauagguuuaaugguauuggaguuacacagaauguucucuaugagaaccaaaaauugauugccaaccaauuuaauagugcuauuggcaaaauucaagacucacuuucuuccacagcaagugcacuuggaaaacuucaagauguggucaaccaaaaugcacaagcuuuaaacacgcuuguuaaacaacuuagcuccaauuuuggugcaauuucaaguguuuuaaaugauauccuuucacgucuugacaaaguugaggcugaagugcaaauugauagguugaucacaggcagacuucaaaguuugcagacauaugugacucaacaauuaauuagagcugcagaaaucagagcuucugcuaaucuugcugcuacuaaaaugucagaguguguacuuggacaaucaaaaagaguugauuuuuguggaaagggcuaucaucuuauguccuucccucagucagcaccucaugguguagucuucuugcaugugacuuaugucccugcacaagaaaagaacuucacaacugcuccugccauuugucaugauggaaaagcacacuuuccucgugaaggugucuuuguuucaaauggcacacacugguuuguaacacaaaggaauuuuuaugaaccacaaaucauuacuacagacaacacauuugugucugguaacugugauguuguaauaggaauugucaacaacacaguuuaugauccuuugcaaccugaauuagacucauucaaggaggaguuagauaaauauuuuaagaaucauacaucaccagauguugauuuaggugacaucucuggcauuaaugcuucaguuguaaacauucaaaaagaaauugaccgccucaaugagguugccaagaauuuaaaugaaucucucaucgaucuccaagaacuuggaaaguaugagcaguauauaaaauggccaugguacauuuggcuagguuuuauagcuggcuugauugccauaguaauggugacaauuaugcuuugcuguaugaccaguugcuguaguugucucaagggcuguuguucuuguggauccugcugcaaauuugaugaagacgacucugagccagugcucaaaggagucaaauuacauuacacauaaggacuagucccuguucccagagcccacuuuuuuuucuuuuuuugaaauaaaauagccugucuuucagaucucaaaggcucuuuucagagccaccaaaaaaaaaaaaaaaaaaaaaaaaaaaaaaaaaaaaaaaaaaaaaaaaaaaaaaaaaaaaaaaaaaaaaaaaaaaaaaaaaaaaaaaaaaaaaaaaaaaaa

SEQ ID NO: 12229 - RNA, 4094 nt, Artificial Sequence
  SARS-CoV-2/Belgium/VAG-03013/2020__EPI_ISL_415155 spike protein mRNA wt (1-1273)
aggagagucccgcagucggcguccagcggcucugcuuguucgugugugugucguugcaggccuuauucaagcuuaccauguuuguuuuucuuguuuuauugccacuagucucuagucaguguguuaaucuuacaaccagaacucaauuacccccugcauacacuaauucuuucacacgugguguuuauuacccugacaaaguuuucagauccucaguuuuacauucaacucaggacuuguucuuaccuuucuuuuccaauguuacuugguuccaugcuauacaugucucugggaccaaugguacuaagagguuugauaacccuguccuaccauuuaaugaugguguuuauuuugcuuccacugagaagucuaacauaauaagaggcuggauuuuugguacuacuuuagauucgaagacccagucccuacuuauuguuaauaacgcuacuaauguuguuauuaaagucugugaauuucaauuuuguaaugauccauuuuuggguguuuauuaccacaaaaacaacaaaaguuggauggaaagugaguucagaguuuauucuagugcgaauaauugcacuuuugaauaugucucucagccuuuucuuauggaccuugaaggaaaacaggguaauuucaaaaaucuuagggaauuuguguuuaagaauauugaugguuauuuuaaaauauauucuaagcacacgccuauuaauuuagugcgugaucucccucaggguuuuucggcuuuagaaccauugguagauuugccaauagguauuaacaucacuagguuucaaacuuuacuugcuuuacauagaaguuauuugacuccuggugauucuucuucagguuggacagcuggugcugcagcuuauuauguggguuaucuucaaccuaggacuuuucuauuaaaauauaaugaaaauggaaccauuacagaugcuguagacugugcacuugacccucucucagaaacaaaguguacguugaaauccuucacuguagaaaaaggaaucuaucaaacuucuaacuuuagaguccaaccaacagaaucuauuguuagauuuccuaauauuacaaacuugugcccuuuuggugaaguuuuuaacgccaccagauuugcaucuguuuaugcuuggaacaggaagagaaucagcaacuguguugcugauuauucuguccuauauaauuccgcaucauuuuccacuuuuaaguguuauggagugucuccuacuaaauuaaaugaucucugcuuuacuaaugucuaugcagauucauuuguaauuagaggugaugaagucagacaaaucgcuccagggcaaacuggaaagauugcugauuauaauuauaaauuaccagaugauuuuacaggcugcguuauagcuuggaauucuaacaaucuugauucuaagguuggugguaauuauaauuaccuguauagauuguuuaggaagucuaaucucaaaccuuuugagagagauauuucaacugaaaucuaucaggccgguagcacaccuuguaaugguguugaagguuuuaauuguuacuuuccuuuacaaucauaugguuuccaacccacuaaugguguugguuaccaaccauacagaguaguaguacuuucuuuugaacuucuacaugcaccagcaacuguuuguggaccuaaaaagucuacuaauuugguuaaaaacaaaugugucaauuucaacuucaaugguuuaacaggcacagguguucuuacugagucuaacaaaaaguuucugccuuuccaacaauuuggcagagacauugcugacacuacugaugcuguccgugauccacagacacuugagauucuugacauuacaccauguucuuuugguggugucaguguuauaacaccaggaacaaauacuucuaaccagguugcuguucuuuaucaggguguuaacugcacagaagucccuguugcuauucaugcagaucaacuuacuccuacuuggcguguuuauucuacagguucuaauguuuuucaaacacgugcaggcuguuuaauaggggcugaacaugucaacaacucauaugagugugacauacccauuggugcagguauaugcgcuaguuaucagacucagacuaauucuccucggcgggcacguaguguagcuagucaauccaucauugccuacacuaugucacuuggugcagaaaauucaguugcuuacucuaauaacucuauugccauacccacaaauuuuacuauuaguguuaccacagaaauucuaccagugucuaugaccaagacaucaguagauuguacaauguacauuuguggugauucaacugaaugcagcaaucuuuuguugcaauauggcaguuuuuguacacaauuaaaccgugcuuuaacuggaauagcuguugaacaagacaaaaacacccaagaaguuuuugcacaagucaaacaaauuuacaaaacaccaccaauuaaagauuuuggugguuuuaauuuuucacaaauauuaccagauccaucaaaaccaagcaagaggucauuuauugaagaucuacuuuucaacaaagugacacuugcagaugcuggcuucaucaaacaauauggugauugccuuggugauauugcugcuagagaccucauuugugcacaaaaguuuaacggccuuacuguuuugccaccuuugcucacagaugaaaugauugcucaauacacuucugcacuguuagcggguacaaucacuucugguuggaccuuuggugcaggugcugcauuacaaauaccauuugcuaugcaaauggcuuauagguuuaaugguauuggaguuacacagaauguucucuaugagaaccaaaaauugauugccaaccaauuuaauagugcuauuggcaaaauucaagacucacuuucuuccacagcaacugcacuuggaaaacuucaagauguggucaaccaaaaugcacaagcuuuaaacacgcuuguuaaacaacuuagcuccaauuuuggugcaauuucaaguguuuuaaaugauauccuuucacgucuugacaaaguugaggcugaagugcaaauugauagguugaucacaggcagacuucaaaguuugcagacauaugugacucaacaauuaauuagagcugcagaaaucagagcuucugcuaaucuugcugcuacuaaaaugucagaguguguacuuggacaaucaaaaagaguugauuuuuguggaaagggcuaucaucuuauguccuucccucagucagcaccucaugguguagucuucuugcaugugacuuaugucccugcacaagaaaagaacuucacaacugcuccugccauuugucaugauggaaaagcacacuuuccucgugaaggugucuuuguuucaaauggcacacacugguuuguaacacaaaggaauuuuuaugaaccacaaaucauuacuacagacaacacauuugugucugguaacugugauguuguaauaggaauugucaacaacacaguuuaugauccuuugcaaccugaauuagacucauucaaggaggaguuagauaaauauuuuaagaaucauacaucaccagauguugauuuaggugacaucucuggcauuaaugcuucaguuguaaacauucaaaaagaaauugaccgccucaaugagguugccaagaauuuaaaugaaucucucaucgaucuccaagaacuuggaaaguaugagcaguauauaaaauggccaugguacauuuggcuagguuuuauagcuggcuugauugccauaguaauggugacaauuaugcuuugcuguaugaccaguugcuguaguugucucaagggcuguuguucuuguggauccugcugcaaauuugaugaagacgacucugagccagugcucaaaggagucaaauuacauuacacauaaggacuagucccuguucccagagcccacuuuuuuuucuuuuuuugaaauaaaauagccugucuuucagaucucaaaggcucuuuucagagccaccaaaaaaaaaaaaaaaaaaaaaaaaaaaaaaaaaaaaaaaaaaaaaaaaaaaaaaaaaaaaaaaaaaaaaaaaaaaaaaaaaaaaaaaaaaaaaaaaaaaaa

SEQ ID NO: 12230 - RNA, 4094 nt, Artificial Sequence
  SARS-CoV-2/Belgium/BC-03016/2020__EPI_ISL_415157 spike protein mRNA wt (1-1273)
aggagagucccgcagucggcguccagcggcucugcuuguucgugugugugucguugcaggccuuauucaagcuuaccauguuuguuuuucuuguuuuauugccacuagucucuagucaguguguuaaucuuacaaccagaacucaauuacccccugcauacacuaauucuuucacacgugguguuuauuacccugacaaaguuuucagauccucaguuuuacauucaacucaggacuuguucuuaccuuucuuuuccaauguuacuugguuccaugcuauacaugucucugggaccaaugguacuaagagguuugauaacccuguccuaccauuuaaugaugguguuuauuuugcuuccacugagaagucuaacauaauaagaggcuggauuuuugguacuacuuuagauucgaagacccagucccuacuuauuguuaauaacgcuacuaauguuguuauuaaagucugugaauuucaauuuuguaaugauccauuuuuggguguuuauuaccacaaaaacaacaaaaguuggauggaaagugaguucagaguuuauucuagugcgaauaauugcacuuuugaauaugucucucagccuuuucuuauggaccuugaaggaaaacaggguaauuucaaaaaucuuagggaauuuguguuuaagaauauugaugguuauuuuaaaauauauucuaagcacacgccuauuaauuuagugcgugaucucccucaggguuuuucggcuuuagaaccauugguagauuugccaauagguauuaacaucacuagguuucaaacuuuacuugcuuuacauagaaguuauuugacuccuggugauucuucuucagguuggacagcuggugcugcagcuuauuauguggguuaucuucaaccuaggacuuuucuauuaaaauauaaugaaaauggaaccauuacagaugcuguagacugugcacuugacccucucucagaaacaaaguguacguugaaauccuucacuguagaaaaaggaaucuaucaaacuucuaacuuuagaguccaaccaacagaaucuauuguuagauuuccuaauauuacaaacuugugcccuuuuggugaaguuuuuaacgccaccagauuugcaucuguuuaugcuuggaacaggaagagaaucagcaacuguguugcugauuauucuguccuauauaauuccgcaucauuuuccacuuuuaaguguuauggagugucuccuacuaaauuaaaugaucucugcuuuacuaaugucuaugcagauucauuuguaauuagaggugaugaagucagacaaaucgcuccagggcaaacuggaaagauugcugauuauaauuauaaauuaccagaugauuuuacaggcugcguuauagcuuggaauucuaacaaucuugauucuaagguuggugguaauuauaauuaccuguauagauuguuuaggaagucuaaucucaaaccuuuugagagagauauuucaacugaaaucuaucaggccgguagcacaccuuguaaugguguugaagguuuuaauuguuacuuuccuuuacaaucauaugguuuccaacccacuaaugguguugguuaccaaccauacagaguaguaguacuuucuuuugaacuucuacaugcaccagcaacuguuuguggaccuaaaaagucuacuaauuugguuaaaaacaaaugugucaauuucaacuucaaugguuuaacaggcacagguguucuuacugagucuaacaaaaaguuucugccuuuccaacaauuuggcagagacauugcugacacuacugaugcuguccgugauccacagacacuugagauucuugacauuacaccauguucuuuugguggugucaguguuauaacaccaggaacaaauacuucuaaccagguugcuguucuuuaucaggguguuaacugcacagaagucccuguugcuauucaugcagaucaacuuacuccuacuuggcguguuuauucuacagguucuaauguuuuucaaacacgugcaggcuguuuaauaggggcugaacaugucaacaacucauaugagugugacauacccauuggugcagguauaugcgcuaguuaucagacucagacuaauucuccucggcgggcacguaguguagcuagucaauccaucauugccuacacuaugucacuuggugcagaaaauucaguugcuuacucuaauaacucuauugccauacccacaaauuuuacuauuaguguuaccacagaaauucuaccagugucuaugaccaagacaucaguagauuguacaauguacauuuguggugauucaacugaaugcagcaaucuuuuguugcaauauggcaguuuuuguacacaauuaaaccgugcuuuaacuggaauagcuguugaacaagacaaaaacacccaagaaguuuuugcacaagucaaacaaauuuacaaaacaccaccaauuaaagauuuuggugguuuuaauuuuucacaaauauuaccagauccaucaaaaccaagcaagaggucauuuauugaagaucuacuuuucaacaaagugacacuugcagaugcuggcuucaucaaacaauauggugauugccuuggugauauugcugcuagagaccucauuugugcacaaaaguuuaacggccuuacuguuuugccaccuuugcucacagaugaaaugauugcucaauacacuucugcacuguuagcggguacaaucacuucugguuggaccuuuggugcaggugcugcauuacaaauaccauuugcuaugcaaauggcuuauagguuuaaugguauuggaguuacacagaauguucucuaugagaaccaaaaauugauugccaaccaauuuaauagugcuauuggcaaaauucaagacucacuuucuuccacagcaccugcacuuggaaaacuucaagauguggucaaccaaaaugcacaagcuuuaaacacgcuuguuaaacaacuuagcuccaauuuuggugcaauuucaaguguuuuaaaugauauccuuucacgucuugacaaaguugaggcugaagugcaaauugauagguugaucacaggcagacuucaaaguuugcagacauaugugacucaacaauuaauuagagcugcagaaaucagagcuucugcuaaucuugcugcuacuaaaaugucagaguguguacuuggacaaucaaaaagaguugauuuuuguggaaagggcuaucaucuuauguccuucccucagucagcaccucaugguguagucuucuugcaugugacuuaugucccugcacaagaaaagaacuucacaacugcuccugccauuugucaugauggaaaagcacacuuuccucgugaaggugucuuuguuucaaauggcacacacugguuuguaacacaaaggaauuuuuaugaaccacaaaucauuacuacagacaacacauuugugucugguaacugugauguuguaauaggaauugucaacaacacaguuuaugauccuuugcaaccugaauuagacucauucaaggaggaguuagauaaauauuuuaagaaucauacaucaccagauguugauuuaggugacaucucuggcauuaaugcuucaguuguaaacauucaaaaagaaauugaccgccucaaugagguugccaagaauuuaaaugaaucucucaucgaucuccaagaacuuggaaaguaugagcaguauauaaaauggccaugguacauuuggcuagguuuuauagcuggcuugauugccauaguaauggugacaauuaugcuuugcuguaugaccaguugcuguaguugucucaagggcuguuguucuuguggauccugcugcaaauuugaugaagacgacucugagccagugcucaaaggagucaaauuacauuacacauaaggacuagucccuguucccagagcccacuuuuuuuucuuuuuuugaaauaaaauagccugucuuucagaucucaaaggcucuuuucagagccaccaaaaaaaaaaaaaaaaaaaaaaaaaaaaaaaaaaaaaaaaaaaaaaaaaaaaaaaaaaaaaaaaaaaaaaaaaaaaaaaaaaaaaaaaaaaaaaaaaaaaa

SEQ ID NO: 12231 - RNA, 4094 nt, Artificial Sequence
  SARS-CoV-2/Germany/BavPat3/2020__EPI_ISL_414521 spike protein mRNA wt (1-1273)
aggagagucccgcagucggcguccagcggcucugcuuguucgugugugugucguugcaggccuuauucaagcuuaccauguuuguuuuucuuguuuuauugccacuagucucuagucaguguguuaaucuuacaaccagaacucaauuacccccugcauacacuaauucuuucacacgugguguuuauuacccugacaaaguuuucagauccucaguuuuacauucaacucaggacuuguucuuaccuuucuuuuccaauguuacuugguuccaugcuauacaugucucugggaccaaugguacuaagagguuugauaacccuguccuaccauuuaaugaugguguuuauuuugcuuccacugagaagucuaacauaauaagaggcuggauuuuugguacuacuuuagauucgaagacccagucccuacuuauuguuaauaacgcuacuaauguuguuauuaaagucugugaauuucaauuuuguaaugauccauuuuuggguguuuauuaccacaaaaacaacaaaaguuggauggaaagugaguucagaguuuauucuagugcgaauaauugcacuuuugaauaugucucucagccuuuucuuauggaccuugaaggaaaacaggguaauuucaaaaaucuuagggaauuuguguuuaagaauauugaugguuauuuuaaaauauauucuaagcacacgccuauuaauuuagugcgugaucucccucaggguuuuucggcuuuagaaccauugguagauuugccaauagguauuaacaucacuagguuucaaacuuuacuugcuuuacauagaaguuauuugacuccuggugauucuucuucagguuggacagcuggugcugcagcuuauuauguggguuaucuucaaccuaggacuuuucuauuaaaauauaaugaaaauggaaccauuacagaugcuguagacugugcacuugacccucucucagaaacaaaguguacguugaaauccuucacuguagaaaaaggaaucuaucaaacuucuaacuuuagaguccaaccaacagaaucuauuguuagauuuccuaauauuacaaacuugugcccuuuuggugaaguuuuuaacgccaccagauuugcaucuguuuaugcuuggaacaggaagagaaucagcaacuguguugcugauuauucuguccuauauaauuccgcaucauuuuccacuuuuaaguguuauggagugucuccuacuaaauuaaaugaucucugcuuuacuaaugucuaugcagauucauuuguaauuagaggugaugaagucagacaaaucgcuccagggcaaacuggaaagauugcugauuauaauuauaaauuaccagaugauuuuacaggcugcguuauagcuuggaauucuaacaaucuugauucuaagguuggugguaauuauaauuaccuguauagauuguuuaggaagucuaaucucaaaccuuuugagagagauauuucaacugaaaucuaucaggccgguagcacaccuuguaaugguguugaagguuuuaauuguuacuuuccuuuacaaucauaugguuuccaacccacuaaugguguugguuaccaaccauacagaguaguaguacuuucuuuugaacuucuacaugcaccagcaacuguuuguggaccuaaaaagucuacuaauuugguuaaaaacaaaugugucaauuucaacuucaaugguuuaacaggcacagguguucuuacugagucuaacaaaaaguuucugccuuuccaacaauuuggcagagacauugcugacacuacugaugcuguccgugauccacagacacuugagauucuugacauuacaccauguucuuuugguggugucaguguuauaacaccaggaacaaauacuucuaaccagguugcuguucuuuaucaggauguuaacugcacagaagucccuguugcuauucaugcagaucaacuuacuccuacuuggcguguuuauucuacagguucuaauguuuuucaaacacgugcaggcuguuuaauaggggcugaacaugucaacaacucauaugagugugacauacccauuggugcagguauaugcgcuaguuaucagacucagacuaauucuccucggcgggcacguaguguagcuagucaauccaucauugccuacacuaugucacuuggugcagaaaauucaguugcuuacucuaauaacucuauugccauacccacaaauuuuacuauuaguguuaccacagaaauucuaccagugucuaugaccaagacaucaguagauuguacaauguacauuuguggugauucaacugaaugcagcaaucuuuuguugcaauauggcaguuuuuguacacaauuaaaccgugcuuuaacuggaauagcuguugaacaagacaaaaacacccaacaaguuuuugcacaagucaaacaaauuuacaaaacaccaccaauuaaagauuuuggugguuuuaauuuuucacaaauauuaccagauccaucaaaaccaagcaagaggucauuuauugaagaucuacuuuucaacaaagugacacuugcagaugcuggcuucaucaaacaauauggugauugccuuggugauauugcugcuagagaccucauuugugcacaaaaguuuaacggccuuacuguuuugccaccuuugcucacagaugaaaugauugcucaauacacuucugcacuguuagcggguacaaucacuucugguuggaccuuuggugcaggugcugcauuacaaauaccauuugcuaugcaaauggcuuauagguuuaaugguauuggaguuacacagaauguucucuaugagaaccaaaaauugauugccaaccaauuuaauagugcuauuggcaaaauucaagacucacuuucuuccacagcaagugcacuuggaaaacuucaagauguggucaaccaaaaugcacaagcuuuaaacacgcuuguuaaacaacuuagcuccaauuuuggugcaauuucaaguguuuuaaaugauauccuuucacgucuugacaaaguugaggcugaagugcaaauugauagguugaucacaggcagacuucaaaguuugcagacauaugugacucaacaauuaauuagagcugcagaaaucagagcuucugcuaaucuugcugcuacuaaaaugucagaguguguacuuggacaaucaaaaagaguugauuuuuguggaaagggcuaucaucuuauguccuucccucagucagcaccucaugguguagucuucuugcaugugacuuaugucccugcacaagaaaagaacuucacaacugcuccugccauuugucaugauggaaaagcacacuuuccucgugaaggugucuuuguuucaaauggcacacacugguuuguaacacaaaggaauuuuuaugaaccacaaaucauuacuacagacaacacauuugugucugguaacugugauguuguaauaggaauugucaacaacacaguuuaugauccuuugcaaccugaauuagacucauucaaggaggaguuagauaaauauuuuaagaaucauacaucaccagauguugauuuaggugacaucucuggcauuaaugcuucaguuguaaacauucaaaaagaaauugaccgccucaaugagguugccaagaauuuaaaugaaucucucaucgaucuccaagaacuuggaaaguaugagcaguauauaaaauggccaugguacauuuggcuagguuuuauagcuggcuugauugccauaguaauggugacaauuaugcuuugcuguaugaccaguugcuguaguugucucaagggcuguuguucuuguggauccugcugcaaauuugaugaagacgacucugagccagugcucaaaggagucaaauuacauuacacauaaggacuagucccuguucccagagcccacuuuuuuuucuuuuuuugaaauaaaauagccugucuuucagaucucaaaggcucuuuucagagccaccaaaaaaaaaaaaaaaaaaaaaaaaaaaaaaaaaaaaaaaaaaaaaaaaaaaaaaaaaaaaaaaaaaaaaaaaaaaaaaaaaaaaaaaaaaaaaaaaaaaaa

SEQ ID NO: 12232 - RNA, 4094 nt, Artificial Sequence
  SARS-CoV-2/France/HF1805/2020__EPI_ISL_414628 spike protein mRNA wt (1-1273)
aggagagucccgcagucggcguccagcggcucugcuuguucgugugugugucguugcaggccuuauucaagcuuaccauguuuguuuuucuuguuuuauugccacuagucucuagucaguguguuaaucuuacaaccagaacucaauuacccccugcauacacuaauucuuucacacgugguguuuauuacccugacaaaguuuucagauccucaguuuuacauucaacucaggacuuguucuuaccuuucuuuuccaauguuacuugguuccaugcuauacaugucucugggaccaaugguacuaagagguuugauaacccuguccuaccauuuaaugaugguguuuauuuugcuuccacugagaagucuaacauaauaagaggcuggauuuuugguacuacuuuagauucgaagacccagucccuacuuauuguuaauaacgcuacuaauguuguuauuaaagucugugaauuucaauuuuguaaugauccauuuuuggguguuuauuaccacaaaaacaacaaaaguuggauggaaagugaguucagaguuuauucuagugcgaauaauugcacuuuugaauaugucucucagccuuuucuuauggaccuugaaggaaaacaggguaauuucaaaaaucuuagggaauuuguguuuaagaauauugaugguuauuuuaaaauauauucuaagcacacgccuauuaauuuagugcgugaucucccucaggguuuuucggcuuuagaaccauugguagauuugccaauagguauuaacaucacuagguuucaaacuuuacuugcuuuacauagaaguuauuugacuccuggugauucuucuucagguuggacagcuggugcugcagcuuauuauguggguuaucuucaaccuaggacuuuucuauuaaaauauaaugaaaauggaaccauuacagaugcuguagacugugcacuugacccucucucagaaacaaaguguacguugaaauccuucacuguagaaaaaggaaucuaucaaacuucuaacuuuagaguccaaccaacagaaucuauuguuagauuuccuaauauuacaaacuugugcccuuuuggugaaguuuuuaacgccaccagauuugcaucuguuuaugcuuggaacaggaagagaaucagcaacuguguugcugauuauucuguccuauauaauuccgcaucauuuuccacuuuuaaguguuauggagugucuccuacuaaauuaaaugaucucugcuuuacuaaugucuaugcagauucauuuguaauuagaggugaugaagucagacaaaucgcuccagggcaaacuggaaagauugcugauuauaauuauaaauuaccagaugauuuuacaggcugcguuauagcuuggaauucuaacaaucuugauucuaagguuggugguaauuauaauuaccuguauagauuguuuaggaagucuaaucucaaaccuuuugagagagauauuucaacugaaaucuaucaggccgguagcacaccuuguaaugguguugaagguuuuaauuguuacuuuccuuuacaaucauaugguuuccaacccacuaaugguguugguuaccaaccauacagaguaguaguacuuucuuuugaacuucuacaugcaccagcaacuguuuguggaccuaaaaagucuacuaauuugguuaaaaacaaaugugucaauuucaacuucaaugguuuaacaggcacagguguucuuacugagucuaacaaaaaguuucugccuuuccaacaauuuggcagagacauugcugacacuacugaugcuguccgugauccacagacacuugagauucuugacauuacaccauguucuuuugguggugucaguguuauaacaccaggaacaaauacuucuaaccagguugcuguucuuuaucaggguguuaacugcacagaagucccuguugcuauucaugcagaucaacuuacuccuacuuggcguguuuauucuacagguucuaauguuuuucaaacacgugcaggcuguuuaauaggggcugaacaugucaacaacucauaugagugugacauacccauuggugcagguauaugcgcuaguuaucagacucagacuaauucuccucggcgggcacguaguguagcuagucaauccaucauugccuacacuaugucacuuggugcagaaaauucaguugcuuacucuaauaacucuauugccauacccacaaauuuuacuauuaguguuaccacagaaauucuaccagugucuaugaccaagacaucaguagauuguacaauguacauuuguggugauucaacugaaugcagcaaucuuuuguugcaauauggcaguuuuuguacacaauuaaaccgugcuuuaacuggaauagcuguugaacaagacaaaaacacccaagaaguuuuugcacaagucaaacaaauuuacaaaacaccaccaauuaaagauuuuggugguuuuaauuuuucacaaauauuaccagauccaucaaaaccaagcaagaggucauuuauugaagaucuacuuuucaacaaagugacacuugcagaugcuggcuucaucaaacaauauggugauugccuuggugauauugcugcuagagaccucauuugugcacaaaaguuuaacggccuuacuguuuugccaccuuugcucacagaugaaaugauugcucaauacacuucugcacuguuagcggguacaaucacuucugguuggaccuuuggugcaggugcugcauuacaaauaccauuugcuaugcaaauggcuuauagguuuaaugguauuggaguuacacagaauguucucuaugagaaccaaaaauugauugccaaccaauuuaauagugcuauuggcaaaauucaagacucacuuucuuccacagcaagugcacuuggaaaacuucaagauguggucaaccaaaaugcacaagcuuuaaacacgcuuguuaaacaacuuagcuccaauuuuggugcaauuucaaguguuuuaaaugauauccuuucacgucuugacaaaguugaggcugaagugcaaauugauagguugaucacaggcagacuucaaaguuugcagacauaugugacucaacaauuaauuagagcugcagaaaucagagcuucugcuaaucuugcugcuacuaaaaugucagaguguguacuuggacaaucaaaaagaguugauuuuuguggaaagggcuaucaucuuauguccuucccucagucagcaccucaugguguagucuucuugcaugugacuuaugucccugcacaagaaaagaacuucacaacugcuccugccauuugucaugauggaaaagcacacuuuccucgugaaggugucuuuguuucaaauggcacacacugguuuguaacacaaaggaauuuuuaugaaccacaaaucauuacuacagacaacacauuugugucugguaacugugauguuguaauaggaguugucaacaacacaguuuaugauccuuugcaaccugaauuagacucauucaaggaggaguuagauaaauauuuuaagaaucauacaucaccagauguugauuuaggugacaucucuggcauuaaugcuucaguuguaaacauucaaaaagaaauugaccgccucaaugagguugccaagaauuuaaaugaaucucucaucgaucuccaagaacuuggaaaguaugagcaguauauaaaauggccaugguacauuuggcuagguuuuauagcuggcuugauugccauaguaauggugacaauuaugcuuugcuguaugaccaguugcuguaguugucucaagggcuguuguucuuguggauccugcugcaaauuugaugaagacgacucugagccagugcucaaaggagucaaauuacauuacacauaaggacuagucccuguucccagagcccacuuuuuuuucuuuuuuugaaauaaaauagccugucuuucagaucucaaaggcucuuuucagagccaccaaaaaaaaaaaaaaaaaaaaaaaaaaaaaaaaaaaaaaaaaaaaaaaaaaaaaaaaaaaaaaaaaaaaaaaaaaaaaaaaaaaaaaaaaaaaaaaaaaaaa

SEQ ID NO: 12233 - RNA, 4094 nt, Artificial Sequence
  SARS-CoV-2/Netherlands/ZuidHolland_9/2020__EPI_ISL_414445 spike protein mRNA wt (1-1273)
aggagagucccgcagucggcguccagcggcucugcuuguucgugugugugucguugcaggccuuauucaagcuuaccauguuuguuuuucuuguuuuauugccacuagucucuagucaguguguuaaucuuacaaccagaacucaauuacccccugcauacacuaauucuuucacacgugguguuuauuacccugacaaaguuuucagauccucaguuuuacauucaacucaggacuuguucuuaccuuucuuuuccaauguuacuugguuccaugcuauacaugucucugggaccaaugguacuaagagguuugauaacccuguccuaccauuuaaugaugguguuuauuuugcuuccacugagaagucuaacauaauaagaggcuggauuuuugguacuacuuuagauucgaagacccagucccuacuuauuguuaauaacgcuacuaauguuguuauuaaagucugugaauuucaauuuuguaaugauccauuuuuggguguuuauuaccacaaaaacaacaaaaguuggauggaaagugaguucagaguuuauucuagugcgaauaauugcacuuuugaauaugucucucagccuuuucuuauggaccuugaaggaaaacaggguaauuucaaaaaucuuagggaauuuguguuuaagaauauugaugguuauuuuaaaauauauucuaagcacacgccuauuaauuuagugcgugaucucccucaggguuuuucggcuuuagaaccauugguagauuugccaauagguauuaacaucacuagguuucaaacuuuacuugcuuuacauagaaguuauuugacuccuggugauucuucuucagguuggacagcuggugcugcagcuuauuauguggguuaucuucaaccuaggacuuuucuauuaaaauauaaugaaaauggaaccauuacagaugcuguagacugugcacuugacccucucucagaaacaaaguguacguugaaauccuucacuguagaaaaaggaaucuaucaaacuucuaacuuuagaguccaaccaacagaaucuauuguuagauuuccuaauauuacaaacuugugcccuuuuggugaaguuuuuaacgccaccagauuugcaucuguuuaugcuuggaacaggaagagaaucagcaacuguguugcugauuauucuguccuauauaauuccgcaucauuuuccacuuuuaaguguuauggagugucuccuacuaaauuaaaugaucucugcuuuacuaaugucuaugcagauucauuuguaauuagaggugaugaagucagacaaaucgcuccagggcaaacuggaaagauugcugauuauaauuauaaauuaccagaugauuuuacaggcugcguuauagcuuggaauucuaacaaucuugauucuaagguuggugguaauuauaauuaccuguauagauuguuuaggaagucuaaucucaaaccuuuugagagagauauuucaacugaaaucuaucaggccgguagcacaccuuguaaugguguugaagguuuuaauuguuacuuuccuuuacaaucauaugguuuccaacccacuaaugguguugguuaccaaccauacagaguaguaguacuuucuuuugaacuucuacaugcaccagcaacuguuuguggaccuaaaaagucuacuaauuugguuaaaaacaaaugugucaauuucaacuucaaugguuuaacaggcacagguguucuuacugagucuaacaaaaaguuucugccuuuccaacaauuuggcagagacauugcugacacuacugaugcuguccgugauccacagacacuugagauucuugacauuacaccauguucuuuugguggugucaguguuauaacaccaggaacaaauacuucuaaccagguugcuguucuuuaucaggguguuaacugcacagaagucccuguugcuauucaugcagaucaacuuacuccuacuuggcguguuuauucuacagguucuaauguuuuucaaacacgugcaggcuguuuaauaggggcugaacaugucaacaacucauaugagugugacauacccauuggugcagguauaugcgcuaguuaucagacucagacuaauucuccucggcgggcacguaguguagcuagucaauccaucauugccuacacuaugucacuuggugcagaaaauucaguugcuuacucuaauaacucuauugccauacccacaaauuuuacuauuaguguuaccacagaaauucuaccagugucuaugaccaagacaucaguagauuguacaauguacauuuguggugauucaacugaaugcagcaaucuuuuguugcaauauggcaguuuuuguacacaauuaaaccgugcuuuaacuggaauagcuguugaacaagacaaaaacacccaagaaguuuuugcacaagucaaacaaauuuacaaaacaccaccaauuaaagauuuuggugguuuuaauuuuucacaaauauuaccagauccaucaaaaccaagcaagaggucauuuauugaagaucuacuuuucaacaaagugacacuugcagaugcuggcuucaucaaacaauauggugauugccuuggugauauugcugcuagagaccucauuuguguacaaaaguuuaacggccuuacuguuuugccaccuuugcucacagaugaaaugauugcucaauacacuucugcacuguuagcggguacaaucacuucugguuggaccuuuggugcaggugcugcauuacaaauaccauuugcuaugcaaauggcuuauagguuuaaugguauuggaguuacacagaauguucucuaugagaaccaaaaauugauugccaaccaauuuaauagugcuauuggcaaaauucaagacucacuuucuuccacagcaagugcacuuggaaaacuucaagauguggucaaccaaaaugcacaagcuuuaaacacgcuuguuaaacaacuuagcuccaauuuuggugcaauuucaaguguuuuaaaugauauccuuucacgucuugacaaaguugaggcugaagugcaaauugauagguugaucacaggcagacuucaaaguuugcagacauaugugacucaacaauuaauuagagcugcagaaaucagagcuucugcuaaucuugcugcuacuaaaaugucagaguguguacuuggacaaucaaaaagaguugauuuuuguggaaagggcuaucaucuuauguccuucccucagucagcaccucaugguguagucuucuugcaugugacuuaugucccugcacaagaaaagaacuucacaacugcuccugccauuugucaugauggaaaagcacacuuuccucgugaaggugucuuuguuucaaauggcacacacugguuuguaacacaaaggaauuuuuaugaaccacaaaucauuacuacagacaacacauuugugucugguaacugugauguuguaauaggaauugucaacaacacaguuuaugauccuuugcaaccugaauuagacucauucaaggaggaguuagauaaauauuuuaagaaucauacaucaccagauguugauuuaggugacaucucuggcauuaaugcuucaguuguaaacauucaaaaagaaauugaccgccucaaugagguugccaagaauuuaaaugaaucucucaucgaucuccaagaacuuggaaaguaugagcaguauauaaaauggccaugguacauuuggcuagguuuuauagcuggcuugauugccauaguaauggugacaauuaugcuuugcuguaugaccaguugcuguaguugucucaagggcuguuguucuuguggauccugcugcaaauuugaugaagacgacucugagccagugcucaaaggagucaaauuacauuacacauaaggacuagucccuguucccagagcccacuuuuuuuucuuuuuuugaaauaaaauagccugucuuucagaucucaaaggcucuuuucagagccaccaaaaaaaaaaaaaaaaaaaaaaaaaaaaaaaaaaaaaaaaaaaaaaaaaaaaaaaaaaaaaaaaaaaaaaaaaaaaaaaaaaaaaaaaaaaaaaaaaaaaa

SEQ ID NO: 12234 - RNA, 4094 nt, Artificial Sequence
  SARS-CoV-2/Finland/FIN03032020A/2020__EPI_ISL_413602 spike protein mRNA wt (1-1273)
aggagagucccgcagucggcguccagcggcucugcuuguucgugugugugucguugcaggccuuauucaagcuuaccauguuuguuuuucuuguuuuauugccacuagucucuagucaguguguuaaucuuacaaccagaacucaauuacccccugcauacacuaauucuuucacacgugguguuuauuacccugacaaaguuuucagauccucaguuuuacauucaacucaggacuuguucuuaccuuucuuuuccaauguuacuugguuccaugcuauacaugucucugggaccaaugguacuaagagguuugauaacccuguccuaccauuuaaugaugguguuuauuuugcuuccacugagaagucuaacauaauaagaggcuggauuuuugguacuacuuuagauucgaagacccagucccuacuuauuguuaauaacgcuacuaauguuguuauuaaagucugugaauuucaauuuuguaaugauccauuuuuggguguuuauuaccacaaaaacaacaaaaguuggauggaaagugaguucagaguuuauucuagugcgaauaauugcacuuuugaauaugucucucagccuuuucuuauggaccuugaaggaaaacaggguaauuucaaaaaucuuagggaauuuguguuuaagaauauugaugguuauuuuaaaauauauucuaagcacacgccuauuaauuuagugcgugaucucccucaggguuuuucggcuuuagaaccauugguagauuugccaauagguauuaacaucacuagguuucaaacuuuacuugcuuuacauagaaguuauuugacuccuggugauucuucuucagguuggacagcuggugcugcagcuuauuauguggguuaucuucaaccuaggacuuuucuauuaaaauauaaugaaaauggaaccauuacagaugcuguagacugugcacuugacccucucucagaaacaaaguguacguugaaauccuucacuguagaaaaaggaaucuaucaaacuucuaacuuuagaguccaaccaacagaaucuauuguuagauuuccuaauauuacaaacuugugcccuuuuggugaaguuuuuaacgccaccagauuugcaucuguuuaugcuuggaacaggaagagaaucagcaacuguguugcugauuauucuguccuauauaauuccgcaucauuuuccacuuuuaaguguuauggagugucuccuacuaaauuaaaugaucucugcuuuacuaaugucuaugcagauucauuuguaauuagaggugaugaagucagacaaaucgcuccagggcaaacuggaaagauugcugauuauaauuauaaauuaccagaugauuuuacaggcugcguuauaucuuggaauucuaacaaucuugauucuaagguuggugguaauuauaauuaccuguauagauuguuuaggaagucuaaucucaaaccuuuugagagagauauuucaacugaaaucuaucaggccgguagcacaccuuguaaugguguugaagguuuuaauuguuacuuuccuuuacaaucauaugguuuccaacccacuaaugguguugguuaccaaccauacagaguaguaguacuuucuuuugaacuucuacaugcaccagcaacuguuuguggaccuaaaaagucuacuaauuugguuaaaaacaaaugugucaauuucaacuucaaugguuuaacaggcacagguguucuuacugagucuaacaaaaaguuucugccuuuccaacaauuuggcagagacauugcugacacuacugaugcuguccgugauccacagacacuugagauucuugacauuacaccauguucuuuugguggugucaguguuauaacaccaggaacaaauacuucuaaccagguugcuguucuuuaucaggguguuaacugcacagaagucccuguugcuauucaugcagaucaacuuacuccuacuuggcguguuuauucuacagguucuaauguuuuucaaacacgugcaggcuguuuaauaggggcugaacaugucaacaacucauaugagugugacauacccauuggugcagguauaugcgcuaguuaucagacucagacuaauucuccucggcgggcacguaguguagcuagucaauccaucauugccuacacuaugucacuuggugcagaaaauucaguugcuuacucuaauaacucuauugccauacccacaaauuuuacuauuaguguuaccacagaaauucuaccagugucuaugaccaagacaucaguagauuguacaauguacauuuguggugauucaacugaaugcagcaaucuuuuguugcaauauggcaguuuuuguacacaauuaaaccgugcuuuaacuggaauagcuguugaacaagacaaaaacacccaagaaguuuuugcacaagucaaacaaauuuacaaaacaccaccaauuaaagauuuuggugguuuuaauuuuucacaaauauuaccagauccaucaaaaccaagcaagaggucauuuauugaagaucuacuuuucaacaaagugacacuugcagaugcuggcuucaucaaacaauauggugauugccuuggugauauugcugcuagagaccucauuugugcacaaaaguuuaacggccuuacuguuuugccaccuuugcucacagaugaaaugauugcucaauacacuucugcacuguuagcggguacaaucacuucugguuggaccuuuggugcaggugcugcauuacaaauaccauuugcuaugcaaauggcuuauagguuuaaugguauuggaguuacacagaauguucucuaugagaaccaaaaauugauugccaaccaauuuaauagugcuauuggcaaaauucaagacucacuuucuuccacagcaagugcacuuggaaaacuucaagauguggucaaccaaaaugcacaagcuuuaaacacgcuuguuaaacaacuuagcuccaauuuuggugcaauuucaaguguuuuaaaugauauccuuucacgucuugacaaaguugaggcugaagugcaaauugauagguugaucacaggcagacuucaaaguuugcagacauaugugacucaacaauuaauuagagcugcagaaaucagagcuucugcuaaucuugcugcuacuaaaaugucagaguguguacuuggacaaucaaaaagaguugauuuuuguggaaagggcuaucaucuuauguccuucccucagucagcaccucaugguguagucuucuugcaugugacuuaugucccugcacaagaaaagaacuucacaacugcuccugccauuugucaugauggaaaagcacacuuuccucgugaaggugucuuuguuucaaauggcacacacugguuuguaacacaaaggaauuuuuaugaaccacaaaucauuacuacagacaacacauuugugucugguaacugugauguuguaauaggaauugucaacaacacaguuuaugauccuuugcaaccugaauuagacucauucaaggaggaguuagauaaauauuuuaagaaucauacaucaccagauguugauuuaggugacaucucuggcauuaaugcuucaguuguaaacauucaaaaagaaauugaccgccucaaugagguugccaagaauuuaaaugaaucucucaucgaucuccaagaacuuggaaaguaugagcaguauauaaaauggccaugguacauuuggcuagguuuuauagcuggcuugauugccauaguaauggugacaauuaugcuuugcuguaugaccaguugcuguaguugucucaagggcuguuguucuuguggauccugcugcaaauuugaugaagacgacucugagccagugcucaaaggagucaaauuacauuacacauaaggacuagucccuguucccagagcccacuuuuuuuucuuuuuuugaaauaaaauagccugucuuucagaucucaaaggcucuuuucagagccaccaaaaaaaaaaaaaaaaaaaaaaaaaaaaaaaaaaaaaaaaaaaaaaaaaaaaaaaaaaaaaaaaaaaaaaaaaaaaaaaaaaaaaaaaaaaaaaaaaaaaa

SEQ ID NO: 12235 - RNA, 4094 nt, Artificial Sequence
  SARS-CoV-2/France/GE1977/2020__EPI_ISL_414632 spike protein mRNA wt (1-1273)
aggagagucccgcagucggcguccagcggcucugcuuguucgugugugugucguugcaggccuuauucaagcuuaccauguuuguuuuucuuguuuuauugccacuagucucuagucaguguguuaaucuuacaaccagaacucaauuacccccugcauacacuaauucuuucacacgugguguuuauuacccugacaaaguuuucagauccucaguuuuacauucaacucaggacuuguucuuaccuuucuuuuccaauguuacuugguuccaugcuauacaugucucugggaccaaugguacuaagagguuugauaacccuguccuaccauuuaaugaugguguuuauuuugcuuccacugagaagucuaacauaauaagaggcuggauuuuugguacuacuuuagauucgaagacccagucccuacuuauuguuaauaacgcuacuaauguuguuauuaaagucugugaauuucaauuuuguaaugauccauuuuuggguguuuauuaccacaaaaacaacaaaaguuggauggaaagugaguucagaguuuauucuagugcgaauaauugcacuuuugaauaugucucucagccuuuucuuauggaccuugaaggaaaacaggguaauuucaaaaaucuuagggaauuuguguuuaagaauauugaugguuauuuuaaaauauauucuaagcacacgccuauuaauuuagugcgugaucucccucaggguuuuucggcuuuagaaccauugguagauuugccaauagguauuaacaucacuagguuucaaacuuuacuugcuuuacauagaaguuauuugacuccuggugauucuucuucagguuggacagcuggugcugcagcuuauuauguggguuaucuucaaccuaggacuuuucuauuaaaauauaaugaaaauggaaccauuacagaugcuguagacugugcacuugacccucucucagaaacaaaguguacguugaaauccuucacuguagaaaaaggaaucuaucaaacuucuaacuuuagaguccaaccaacagaaucuauuguuagauuuccuaauauuacaaacuugugcccuuuuggugaaguuuuuaacgccaccagauuugcaucuguuuaugcuuggaacaggaagagaaucagcaacuguguugcugauuauucuguccuauauaauuccgcaucauuuuccacuuuuaaguguuauggagugucuccuacuaaauuaaaugaucucugcuuuacuaaugucuaugcagauucauuuguaauuagaggugaugaagucagacaaaucgcuccagggcaaacuggaaagauugcugauuauaauuauaaauuaccagaugauuuuacaggcugcguuauagcuuggaauucuaacaaucuugauucuaagguuggugguaauuauaauuaccuguauagauuguuuaggaagucuaaucucaaaccuuuugagagagauauuucaacugaaaucuaucaggccgguagcacaccuuguaaugguguugaagguuuuaauuguuacuuuccuuuacaaucauaugguuuccaacccacuaaugguguugguuaccaaccauacagaguaguaguacuuucuuuugaacuucuacaugcaccagcaacuguuuguggaccuaaaaagucuacuaauuugguuaaaaacaaaugugucaauuucaacuucaaugguuuaacaggcacagguguucuuacugagucuaacaaaaaguuucugccuuuccaacaauuuggcagagacauugcugacacuacugaugcuguccgugauccacagacacuugagauucuugacauuacaccauguucuuuugguggugucaguguuauaacaccaggaacaaauacuucuaaccagguugcuguucuuuaucaggguguuaacugcacagaagucccuguugcuauucaugcagaucaacuuacuccuacuuggcguguuuauucuacagguucuaauguuuuucaaacacgugcaggcuguuuaauaggggcugaacaugucaacaacucauaugagugugacauacccauuggugcagguauaugcgcuaguuaucagacucagacuaauucuccucggcgggcacguaguguagcuagucaauccaucauugccuacacuaugucacuuggugcagaaaauucaguugcuuacucuaauaacucuauugccauacccacaaauuuuacuauuaguguuaccacagaaauucuaccagugucuaugaccaagacaucaguagauuguacaauguacauuuguggugauucaacugaaugcagcaaucuuuuguugcaauauggcaguuuuuguacacaauuaaaccgugcuuuaacuggaauagcuguugaacaagacaaaaacacccaagaaguuuuugcacaagucaaacaaauuuacaaaacaccaccaauuaaagauuuuggugguuuuaauuuuucacaaauauuaccagauccaucaaaaccaagcaagaggucauuuauugaagaucuacuuuucaacaaagugacacuugcagaugcuggcuucaucaaacaauauggugauugccuuggugauauugcugcuagagaccucauuugugcacaaaaguuuaacggccuuacuguuuugccaccuuugcucacagaugaaaugauugcucaauacacuucugcacuguuagcggguacaaucacuucugguuggaccuuuggugcaggugcugcauuacaaauaccauuugcuaugcaaauggcuuauagguuuaaugguauuggaguuacacagaauguucucuaugagaaccaaaaauugauugccaaccaauuuaauagugcuauuggcaaaauucaagacucacuuuuuuccacagcaagugcacuuggaaaacuucaagauguggucaaccaaaaugcacaagcuuuaaacacgcuuguuaaacaacuuagcuccaauuuuggugcaauuucaaguguuuuaaaugauauccuuucacgucuugacaaaguugaggcugaagugcaaauugauagguugaucacaggcagacuucaaaguuugcagacauaugugacucaacaauuaauuagagcugcagaaaucagagcuucugcuaaucuugcugcuacuaaaaugucagaguguguacuuggacaaucaaaaagaguugauuuuuguggaaagggcuaucaucuuauguccuucccucagucagcaccucaugguguagucuucuugcaugugacuuaugucccugcacaagaaaagaacuucacaacugcuccugccauuugucaugauggaaaagcacacuuuccucgugaaggugucuuuguuucaaauggcacacacugguuuguaacacaaaggaauuuuuaugaaccacaaaucauuacuacagacaacacauuugugucugguaacugugauguuguaauaggaauugucaacaacacaguuuaugauccuuugcaaccugaauuagacucauucaaggaggaguuagauaaauauuuuaagaaucauacaucaccagauguugauuuaggugacaucucuggcauuaaugcuucaguuguaaacauucaaaaagaaauugaccgccucaaugagguugccaagaauuuaaaugaaucucucaucgaucuccaagaacuuggaaaguaugagcaguauauaaaauggccaugguacauuuggcuagguuuuauagcuggcuugauugccauaguaauggugacaauuaugcuuugcuguaugaccaguugcuguaguugucucaagggcuguuguucuuguggauccugcugcaaauuugaugaagacgacucugagccagugcucaaaggagucaaauuacauuacacauaaggacuagucccuguucccagagcccacuuuuuuuucuuuuuuugaaauaaaauagccugucuuucagaucucaaaggcucuuuucagagccaccaaaaaaaaaaaaaaaaaaaaaaaaaaaaaaaaaaaaaaaaaaaaaaaaaaaaaaaaaaaaaaaaaaaaaaaaaaaaaaaaaaaaaaaaaaaaaaaaaaaaa

SEQ ID NO: 12236 - RNA, 4094 nt, Artificial Sequence
  SARS-CoV-2/Finland/FIN-313/2020__EPI_ISL_414641 spike protein mRNA wt (1-1273)
aggagagucccgcagucggcguccagcggcucugcuuguucgugugugugucguugcaggccuuauucaagcuuaccauguuuguuuuucuuguuuuauugccacuagucucuagucaguguguuaaucuuacaaccagaacucaauuacccccugcauacacuaauucuuucacacgugguguuuauuacccugacaaaguuuucagauccucaguuuuacauucaacucaggacuuguucuuaccuuucuuuuccaauguuacuugguuccaugcuauacaugucucugggaccaaugguacuaagagguuugauaacccuguccuaccauuuaaugaugguguuuauuuugcuuccacugagaagucuaacauaauaagaggcuggauuuuugguacuacuuuagauucgaagacccagucccuacuuauuguuaauaacgcuacuaauguuguuauuaaagucugugaauuucaauuuuguaaugauccauuuuuggguguuuauuaccacaaaaacaacaaaaguuggauggaaagugaguucagaguuuauucuagugcgaauaauugcacuuuugaauaugucucucagccuuuucuuauggaccuugaaggaaaacaggguaauuucaaaaaucuuagggaauuuguguuuaagaauauugaugguuauuuuaaaauauauucuaagcacacgccuauuaauuuagugcgugaucucccucaggguuuuucggcuuuagaaccauugguagauuugccaauagguauuaacaucacuagguuuaaaacuuuacuugcuuuacauagaaguuauuugacuccuggugauucuucuucagguuggacagcuggugcugcagcuuauuauguggguuaucuucaaccuaggacuuuucuauuaaaauauaaugaaaauggaaccauuacagaugcuguagacugugcacuugacccucucucagaaacaaaguguacguugaaauccuucacuguagaaaaaggaaucuaucaaacuucuaacuuuagaguccaaccaacagaaucuauuguuagauuuccuaauauuacaaacuugugcccuuuuggugaaguuuuuaacgccaccagauuugcaucuguuuaugcuuggaacaggaagagaaucagcaacuguguugcugauuauucuguccuauauaauuccgcaucauuuuccacuuuuaaguguuauggagugucuccuacuaaauuaaaugaucucugcuuuacuaaugucuaugcagauucauuuguaauuagaggugaugaagucagacaaaucgcuccagggcaaacuggaaagauugcugauuauaauuauaaauuaccagaugauuuuacaggcugcguuauagcuuggaauucuaacaaucuugauucuaagguuggugguaauuauaauuaccuguauagauuguuuaggaagucuaaucucaaaccuuuugagagagauauuucaacugaaaucuaucaggccgguagcacaccuuguaaugguguugaagguuuuaauuguuacuuuccuuuacaaucauaugguuuccaacccacuaaugguguugguuaccaaccauacagaguaguaguacuuucuuuugaacuucuacaugcaccagcaacuguuuguggaccuaaaaagucuacuaauuugguuaaaaacaaaugugucaauuucaacuucaaugguuuaacaggcacagguguucuuacugagucuaacaaaaaguuucugccuuuccaacaauuuggcagagacauugcugacacuacugaugcuguccgugauccacagacacuugagauucuugacauuacaccauguucuuuugguggugucaguguuauaacaccaggaacaaauacuucuaaccagguugcuguucuuuaucaggguguuaacugcacagaagucccuguugcuauucaugcagaucaacuuacuccuacuuggcguguuuauucuacagguucuaauguuuuucaaacacgugcaggcuguuuaauaggggcugaacaugucaacaacucauaugagugugacauacccauuggugcagguauaugcgcuaguuaucagacucagacuaauucuccucggcgggcacguaguguagcuagucaaucuaucauugccuacacuaugucacuuggugcagaaaauucaguugcuuacucuaauaacucuauugccauacccacaaauuuuacuauuaguguuaccacagaaauucuaccagugucuaugaccaagacaucaguagauuguacaauguacauuuguggugauucaacugaaugcagcaaucuuuuguugcaauauggcaguuuuuguacacaauuaaaccgugcuuuaacuggaauagcuguugaacaagacaaaaacacccaagaaguuuuugcacaagucaaacaaauuuacaaaacaccaccaauuaaagauuuuggugguuuuaauuuuucacaaauauuaccagauccaucaaaaccaagcaagaggucauuuauugaagaucuacuuuucaacaaagugacacuugcagaugcuggcuucaucaaacaauauggugauugccuuggugauauugcugcuagagaccucauuugugcacaaaaguuuaacggccuuacuguuuugccaccuuugcucacagaugaaaugauugcucaauacacuucugcacuguuagcggguacaaucacuucugguuggaccuuuggugcaggugcugcauuacaaauaccauuugcuaugcaaauggcuuauagguuuaaugguauuggaguuacacagaauguucucuaugagaaccaaaaauugauugccaaccaauuuaauagugcuauuggcaaaauucaagacucacuuucuuccacagcaagugcacuuggaaaacuucaagauguggucaaccaaaaugcacaagcuuuaaacacgcuuguuaaacaacuuagcuccaauuuuggugcaauuucaaguguuuuaaaugauauccuuucacgucuugacaaaguugaggcugaagugcaaauugauagguugaucacaggcagacuucaaaguuugcagacauaugugacucaacaauuaauuagagcugcagaaaucagagcuucugcuaaucuugcugcuacuaaaaugucagaguguguacuuggacaaucaaaaagaguugauuuuuguggaaagggcuaucaucuuauguccuucccucagucagcaccucaugguguagucuucuugcaugugacuuaugucccugcacaagaaaagaacuucacaacugcuccugccauuugucaugauggaaaagcacacuuuccucgugaaggugucuuuguuucaaauggcacacacugguuuguaacacaaaggaauuuuuaugaaccacaaaucauuacuacagacaacacauuugugucugguaacugugauguuguaauaggaauugucaacaacacaguuuaugauccuuugcaaccugaauuagacucauucaaggaggaguuagauaaauauuuuaagaaucauacaucaccagauguugauuuaggugacaucucuggcauuaaugcuucaguuguaaacauucaaaaagaaauugaccgccucaaugagguugccaagaauuuaaaugaaucucucaucgaucuccaagaacuuggaaaguaugagcaguauauaaaauggccaugguacauuuggcuagguuuuauagcuggcuugauugccauaguaauggugacaauuaugcuuugcuguaugaccaguugcuguaguugucucaagggcuguuguucuuguggauccugcugcaaauuugaugaagacgacucugagccagugcucaaaggagucaaauuacauuacacauaaggacuagucccuguucccagagcccacuuuuuuuucuuuuuuugaaauaaaauagccugucuuucagaucucaaaggcucuuuucagagccaccaaaaaaaaaaaaaaaaaaaaaaaaaaaaaaaaaaaaaaaaaaaaaaaaaaaaaaaaaaaaaaaaaaaaaaaaaaaaaaaaaaaaaaaaaaaaaaaaaaaaa

SEQ ID NO: 12237 - RNA, 4094 nt, Artificial Sequence
  SARS-CoV-2/Netherlands/ZuidHolland_2/2020__EPI_ISL_414556 spike protein mRNA wt (1-1273)
aggagagucccgcagucggcguccagcggcucugcuuguucgugugugugucguugcaggccuuauucaagcuuaccauguuuguuuuucuuguuuuauugccacuagucucuagucaguguguuaaucuuacaaccagaacucaauuacccccugcauacacuaauucuuucacacgugguguuuauuacccugacaaaguuuucagauccucaguuuuacauucaacucaggacuuguucuuaccuuucuuuuccaauguuacuugguuccaugcuauacaugucucugggaccaaugguacuaagagguuugauaacccuguccuaccauuuaaugaugguguuuauuuugcuuccacugagaagucuaacauaauaagaggcuggauuuuugguacuacuuuagauucgaagacccagucccuacuuauuguuaauaacgcuacuaauguuguuauuaaagucugugaauuucaauuuuguaaugauccauuuuuggguguuuauuaccacaaaaacaacaaaaguuggauggaaagugaguucagaguuuauucuagugcgaauaauugcacuuuugaauaugucucucagccuuuucuuauggaccuugaaggaaaacaggguaauuucaaaaaucuuagggaauuuguguuuaagaauauugaugguuauuuuaaaauauauucuaagcacacgccuauuaauuuagugcgugaucucccucaggguuuuucggcuuuagaaccauugguagauuugccaauagguauuaacaucacuagguuucaaacuuuacuugcuuuacauagaaguuauuugacuccuggugauucuucuucagguuggacagcuggugcugcagcuuauuauguggguuaucuucaaccuaggacuuuucuauuaaaauauaaugaaaauggaaccauuacagaugcuguagacugugcacuugacccucucucagaaacaaaguguacguugaaauccuucacuguagaaaaaggaaucuaucaaacuucuaacuuuagaguccaaccaacagaaucuauuguuagauuuccuaauauuacaaacuugugcccuuuuggugaaguuuuuaacgccaccagauuugcaucuguuuaugcuuggaacaggaagagaaucagcaacuguguugcugauuauucuguccuauauaauuccgcaucauuuuccacuuuuaaguguuauggagugucuccuacuaaauuaaaugaucucugcuuuacuaaugucuaugcagauucauuuguaauuagaggugaugaagucagacaaaucgcuccagggcaaacuggaaagauugcugauuauaauuauaaauuaccagaugauuuuacaggcugcguuauagcuuggaauucuaacaaucuugauucuaagguuggugguaauuauaauuaccuguauagauuguuuaggaagucuaaucucaaaccuuuugagagagauauuucaacugaaaucuaucaggccgguagcacaccuuguaaugguguugaagguuuuaauuguuacuuuccuuuacaaucauaugguuuccaacccacuaaugguguugguuaccaaccauacagaguaguaguacuuucuuuugaacuucuacaugcaccagcaacuguuuguggaccuaaaaagucuacuaauuugguuaaaaacaaaugugucaauuucaacuucaaugguuuaacaggcacagguguucuuacugagucuaacaaaaaguuucugccuuuccaacaauuuggcagagacauugcugacacuacugaugcuguccgugauccacagacacuugagauucuugacauuacaccauguucuuuugguggugucaguguuauaacaccaggaacaaauacuucuaaccagguugcuguucuuuaucaggguguuaacugcacagaagucccuguugcuauucaugcagaucaacuuacuccuacuuggcguguuuauucuacagguucuaauguuuuucaaacacgugcaggcuguuuaauaggggcugaacaugucaacaacucauaugagugugacauacccauuggugcagguauaugcgcuaguuaucagacucagacuaauucuccucggcgggcacguaguguagcuagucaauccaucauugccuacacuaugucacuuggugcagaaaauucaguugcuuacucuaauaacucuauugccauacccacaaauuuuacuauuaguguuaccacagaaauucuaccagugucuaugaccaagacaucaguagauuguacaauguacauuuguggugauucaacugaaugcagcaaucuuuuguugcaauauggcaguuuuuguacacaauuaaaccgugcuuuaacuggaauagcucuugaacaagacaaaaacacccaagaaguuuuugcacaagucaaacaaauuuacaaaacaccaccaauuaaagauuuuggugguuuuaauuuuucacaaauauuaccagauccaucaaaaccaagcaagaggucauuuauugaagaucuacuuuucaacaaagugacacuugcagaugcuggcuucaucaaacaauauggugauugccuuggugauauugcugcuagagaccucauuugugcacaaaaguuuaacggccuuacuguuuugccaccuuugcucacagaugaaaugauugcucaauacacuucugcacuguuagcggguacaaucacuucugguuggaccuuuggugcaggugcugcauuacaaauaccauuugcuaugcaaauggcuuauagguuuaaugguauuggaguuacacagaauguucucuaugagaaccaaaaauugauugccaaccaauuuaauagugcuauuggcaaaauucaagacucacuuucuuccacagcaagugcacuuggaaaacuucaagauguggucaaccaaaaugcacaagcuuuaaacacgcuuguuaaacaacuuagcuccaauuuuggugcaauuucaaguguuuuaaaugauauccuuucacgucuugacaaaguugaggcugaagugcaaauugauagguugaucacaggcagacuucaaaguuugcagacauaugugacucaacaauuaauuagagcugcagaaaucagagcuucugcuaaucuugcugcuacuaaaaugucagaguguguacuuggacaaucaaaaagaguugauuuuuguggaaagggcuaucaucuuauguccuucccucagucagcaccucaugguguagucuucuugcaugugacuuaugucccugcacaagaaaagaacuucacaacugcuccugccauuugucaugauggaaaagcacacuuuccucgugaaggugucuuuguuucaaauggcacacacugguuuguaacacaaaggaauuuuuaugaaccacaaaucauuacuacagacaacacauuugugucugguaacugugauguuguaauaggaauugucaacaacacaguuuaugauccuuugcaaccugaauuagacucauucaaggaggaguuagauaaauauuuuaagaaucauacaucaccagauguugauuuaggugacaucucuggcauuaaugcuucaguuguaaacauucaaaaagaaauugaccgccucaaugagguugccaagaauuuaaaugaaucucucaucgaucuccaagaacuuggaaaguaugagcaguauauaaaauggccaugguacauuuggcuagguuuuauagcuggcuugauugccauaguaauggugacaauuaugcuuugcuguaugaccaguugcuguaguugucucaagggcuguuguucuuguggauccugcugcaaauuugaugaagacgacucugagccagugcucaaaggagucaaauuacauuacacauaaggacuagucccuguucccagagcccacuuuuuuuucuuuuuuugaaauaaaauagccugucuuucagaucucaaaggcucuuuucagagccaccaaaaaaaaaaaaaaaaaaaaaaaaaaaaaaaaaaaaaaaaaaaaaaaaaaaaaaaaaaaaaaaaaaaaaaaaaaaaaaaaaaaaaaaaaaaaaaaaaaaaa

SEQ ID NO: 12238 - RNA, 4094 nt, Artificial Sequence
  SARS-CoV-2/USA/WA-UW31/2020__EPI_ISL_414618 spike protein mRNA wt (1-1273)
aggagagucccgcagucggcguccagcggcucugcuuguucgugugugugucguugcaggccuuauucaagcuuaccauguuuguuuuucuuguuuuauugccacuagucucuagucaguguguuaaucuuacaaccagaacucaauuacccccugcauacacuaauucuuucacacgugguguuuauuacccugacaaaguuuucagauccucaguuuuacauucaacucaggacuuguucuuaccuuucuuuuccaauguuacuugguuccaugcuauacaugucucugggaccaaugguacuaagagguuugauaacccuguccuaccauuuaaugaugguguuuauuuugcuuccacugagaagucuaacauaauaagaggcuggauuuuugguacuacuuuagauucgaagacccagucccuacuuauuguuaauaacgcuacuaauguuguuauuaaagucugugaauuucaauuuuguaaugauccauuuuuggguguuuauuaccacaaaaacaacaaaaguuggauggaaagugaguucagaguuuauucuagugcgaauaauugcacuuuugaauaugucucucagccuuuucuuauggaccuugaaggaaaacaggguaauuucaaaaaucuuagggaauuuguguuuaagaauauugaugguuauuuuaaaauauauucuaagcacacgccuauuaauuuagugcgugaucucccucaggguuuuucggcuuuagaaccauugguagauuugccaauagguauuaacaucacuagguuucaaacuuuacuugcuuuacauagaaguuauuugacuccuggugauucuucuucagguuggacagcuggugcugcagcuuauuauguggguuaucuucaaccuaggacuuuucuauuaaaauauaaugaaaauggaaccauuacagaugcuguagacugugcacuugacccucucucagaaacaaaguguacguugaaauccuucacuguagaaaaaggaaucuaucaaacuucuaacuuuagaguccaaccaacagaaucuauuguuagauuuccuaauauuacaaacuugugcccuuuuggugaaguuuuuaacgccaccagauuugcaucuguuuaugcuuggaacaggaagagaaucagcaacuguguugcugauuauucuguccuauauaauuccgcaucauuuuccacuuuuaaguguuauggagugucuccuacuaaauuaaaugaucucugcuuuacuaaugucuaugcagauucauuuguaauuagaggugaugaagucagacaaaucgcuccagggcaaacuggaaagauugcugauuauaauuauaaauuaccagaugauuuuacaggcugcguuauagcuuggaauucuaacaaucuugauucuaagguuggugguaauuauaauuaccuguauagauuguuuaggaagucuaaucucaaaccuuuugagagagauauuucaacugaaaucuaucaggccgguagcacaccuuguaauggugcugaagguuuuaauuguuacuuuccuuuacaaucauaugguuuccaacccacuaaugguguugguuaccaaccauacagaguaguaguacuuucuuuugaacuucuacaugcaccagcaacuguuuguggaccuaaaaagucuacuaauuugguuaaaaacaaaugugucaauuucaacuucaaugguuuaacaggcacagguguucuuacugagucuaacaaaaaguuucugccuuuccaacaauuuggcagagacauugcugacacuacugaugcuguccgugauccacagacacuugagauucuugacauuacaccauguucuuuugguggugucaguguuauaacaccaggaacaaauacuucuaaccagguugcuguucuuuaucaggauguuaacugcacagaagucccuguugcuauucaugcagaucaacuuacuccuacuuggcguguuuauucuacagguucuaauguuuuucaaacacgugcaggcuguuuaauaggggcugaacaugucaacaacucauaugagugugacauacccauuggugcagguauaugcgcuaguuaucagacucagacuaauucuccucggcgggcacguaguguagcuagucaauccaucauugccuacacuaugucacuuggugcagaaaauucaguugcuuacucuaauaacucuauugccauacccacaaauuuuacuauuaguguuaccacagaaauucuaccagugucuaugaccaagacaucaguagauuguacaauguacauuuguggugauucaacugaaugcagcaaucuuuuguugcaauauggcaguuuuuguacacaauuaaaccgugcuuuaacuggaauagcuguugaacaagacaaaaacacccaagaaguuuuugcacaagucaaacaaauuuacaaaacaccaccaauuaaagauuuuggugguuuuaauuuuucacaaauauuaccagauccaucaaaaccaagcaagaggucauuuauugaagaucuacuuuucaacaaagugacacuugcagaugcuggcuucaucaaacaauauggugauugccuuggugauauugcugcuagagaccucauuugugcacaaaaguuuaacggccuuacuguuuugccaccuuugcucacagaugaaaugauugcucaauacacuucugcacuguuagcggguacaaucacuucugguuggaccuuuggugcaggugcugcauuacaaauaccauuugcuaugcaaauggcuuauagguuuaaugguauuggaguuacacagaauguucucuaugagaaccaaaaauugauugccaaccaauuuaauagugcuauuggcaaaauucaagacucacuuucuuccacagcaagugcacuuggaaaacuucaagauguggucaaccaaaaugcacaagcuuuaaacacgcuuguuaaacaacuuagcuccaauuuuggugcaauuucaaguguuuuaaaugauauccuuucacgucuugacaaaguugaggcugaagugcaaauugauagguugaucacaggcagacuucaaaguuugcagacauaugugacucaacaauuaauuagagcugcagaaaucagagcuucugcuaaucuugcugcuacuaaaaugucagaguguguacuuggacaaucaaaaagaguugauuuuuguggaaagggcuaucaucuuauguccuucccucagucagcaccucaugguguagucuucuugcaugugacuuaugucccugcacaagaaaagaacuucacaacugcuccugccauuugucaugauggaaaagcacacuuuccucgugaaggugucuuuguuucaaauggcacacacugguuuguaacacaaaggaauuuuuaugaaccacaaaucauuacuacagacaacacauuugugucugguaacugugauguuguaauaggaauugucaacaacacaguuuaugauccuuugcaaccugaauuagacucauucaaggaggaguuagauaaauauuuuaagaaucauacaucaccagauguugauuuaggugacaucucuggcauuaaugcuucaguuguaaacauucaaaaagaaauugaccgccucaaugagguugccaagaauuuaaaugaaucucucaucgaucuccaagaacuuggaaaguaugagcaguauauaaaauggccaugguacauuuggcuagguuuuauagcuggcuugauugccauaguaauggugacaauuaugcuuugcuguaugaccaguugcuguaguugucucaagggcuguuguucuuguggauccugcugcaaauuugaugaagacgacucugagccagugcucaaaggagucaaauuacauuacacauaaggacuagucccuguucccagagcccacuuuuuuuucuuuuuuugaaauaaaauagccugucuuucagaucucaaaggcucuuuucagagccaccaaaaaaaaaaaaaaaaaaaaaaaaaaaaaaaaaaaaaaaaaaaaaaaaaaaaaaaaaaaaaaaaaaaaaaaaaaaaaaaaaaaaaaaaaaaaaaaaaaaaa

SEQ ID NO: 12239 - RNA, 4094 nt, Artificial Sequence
  SARS-CoV-2/South Korea/SNU01/2020__EPI_ISL_411929 spike protein mRNA wt (1-1273)
aggagagucccgcagucggcguccagcggcucugcuuguucgugugugugucguugcaggccuuauucaagcuuaccauguuuguuuuucuuguuuuauugccacuagucucuagucaguguguuaaucuuacaaccagaacucaauuacccccugcauacacuaauucuuucacacgugguguuuauuacccugacaaaguuuucagauccucaguuuuacauucaacucaggacuuguucuuaccuuucuuuuccaauguuacuugguuccaugcuauacaugucucugggaccaaugguacuaagagguuugauaacccuguccuaccauuuaaugaugguguuuauuuugcuuccacugagaagucuaacauaauaagaggcuggauuuuugguacuacuuuagauucgaagacccagucccuacuuauuguuaauaacgcuacuaauguuguuauuaaagucugugaauuucaauuuuguaaugauccauuuuuggguguuuauuaccacaaaaacaacaaaaguuggauggaaagugaguucagaguuuauucuagugcgaauaauugcacuuuugaauaugucucucagccuuuucuuauggaccuugaaggaaaacaggguaauuucaaaaaucuuagggaauuuguguuuaagaauauugaugguuauuuuaaaauauauucuaagcacacgccuauuaauuuagugcgugaucucccucaggguuuuugggcuuuagaaccauugguagauuugccaauagguauuaacaucacuagguuucaaacuuuacuugcuuuacauagaaguuauuugacuccuggugauucuucuucagguuggacagcuggugcugcagcuuauuauguggguuaucuucaaccuaggacuuuucuauuaaaauauaaugaaaauggaaccauuacagaugcuguagacugugcacuugacccucucucagaaacaaaguguacguugaaauccuucacuguagaaaaaggaaucuaucaaacuucuaacuuuagaguccaaccaacagaaucuauuguuagauuuccuaauauuacaaacuugugcccuuuuggugaaguuuuuaacgccaccagauuugcaucuguuuaugcuuggaacaggaagagaaucagcaacuguguugcugauuauucuguccuauauaauuccgcaucauuuuccacuuuuaaguguuauggagugucuccuacuaaauuaaaugaucucugcuuuacuaaugucuaugcagauucauuuguaauuagaggugaugaagucagacaaaucgcuccagggcaaacuggaaagauugcugauuauaauuauaaauuaccagaugauuuuacaggcugcguuauagcuuggaauucuaacaaucuugauucuaagguuggugguaauuauaauuaccuguauagauuguuuaggaagucuaaucucaaaccuuuugagagagauauuucaacugaaaucuaucaggccgguagcacaccuuguaaugguguugaagguuuuaauuguuacuuuccuuuacaaucauaugguuuccaacccacuaaugguguugguuaccaaccauacagaguaguaguacuuucuuuugaacuucuacaugcaccagcaacuguuuguggaccuaaaaagucuacuaauuugguuaaaaacaaaugugucaauuucaacuucaaugguuuaacaggcacagguguucuuacugagucuaacaaaaaguuucugccuuuccaacaauuuggcagagacauugcugacacuacugaugcuguccgugauccacagacacuugagauucuugacauuacaccauguucuuuugguggugucaguguuauaacaccaggaacaaauacuucuaaccagguugcuguucuuuaucaggauguuaacugcacagaagucccuguugcuauucaugcagaucaacuuacuccuacuuggcguguuuauucuacagguucuaauguuuuucaaacacgugcaggcuguuuaauaggggcugaacaugucaacaacucauaugagugugacauacccauuggugcagguauaugcgcuaguuaucagacucagacuaauucuccucggcgggcacguaguguagcuagucaauccaucauugccuacacuaugucacuuggugcagaaaauucaguugcuuacucuaauaacucuauugccauacccacaaauuuuacuauuaguguuaccacagaaauucuaccagugucuaugaccaagacaucaguagauuguacaauguacauuuguggugauucaacugaaugcagcaaucuuuuguugcaauauggcaguuuuuguacacaauuaaaccgugcuuuaacuggaauagcuguugaacaagacaaaaacacccaagaaguuuuugcacaagucaaacaaauuuacaaaacaccaccaauuaaagauuuuggugguuuuaauuuuucacaaauauuaccagauccaucaaaaccaagcaagaggucauuuauugaagaucuacuuuucaacaaagugacacuugcagaugcuggcuucaucaaacaauauggugauugccuuggugauauugcugcuagagaccucauuugugcacaaaaguuuaacggccuuacuguuuugccaccuuugcucacagaugaaaugauugcucaauacacuucugcacuguuagcggguacaaucacuucugguuggaccuuuggugcaggugcugcauuacaaauaccauuugcuaugcaaauggcuuauagguuuaaugguauuggaguuacacagaauguucucuaugagaaccaaaaauugauugccaaccaauuuaauagugcuauuggcaaaauucaagacucacuuucuuccacagcaagugcacuuggaaaacuucaagauguggucaaccaaaaugcacaagcuuuaaacacgcuuguuaaacaacuuagcuccaauuuuggugcaauuucaaguguuuuaaaugauauccuuucacgucuugacaaaguugaggcugaagugcaaauugauagguugaucacaggcagacuucaaaguuugcagacauaugugacucaacaauuaauuagagcugcagaaaucagagcuucugcuaaucuugcugcuacuaaaaugucagaguguguacuuggacaaucaaaaagaguugauuuuuguggaaagggcuaucaucuuauguccuucccucagucagcaccucaugguguagucuucuugcaugugacuuaugucccugcacaagaaaagaacuucacaacugcuccugccauuugucaugauggaaaagcacacuuuccucgugaaggugucuuuguuucaaauggcacacacugguuuguaacacaaaggaauuuuuaugaaccacaaaucauuacuacagacaacacauuugugucugguaacugugauguuguaauaggaauugucaacaacacaguuuaugauccuuugcaaccugaauuagacucauucaaggaggaguuagauaaauauuuuaagaaucauacaucaccagauguugauuuaggugacaucucuggcauuaaugcuucaguuguaaacauucaaaaagaaauugaccgccucaaugagguugccaagaauuuaaaugaaucucucaucgaucuccaagaacuuggaaaguaugagcaguauauaaaauggccaugguacauuuggcuagguuuuauagcuggcuugauugccauaguaauggugacaauuaugcuuugcuguaugaccaguugcuguaguugucucaagggcuguuguucuuguggauccugcugcaaauuugaugaagacgacucugagccagugcucaaaggagucaaauuacauuacacauaaggacuagucccuguucccagagcccacuuuuuuuucuuuuuuugaaauaaaauagccugucuuucagaucucaaaggcucuuuucagagccaccaaaaaaaaaaaaaaaaaaaaaaaaaaaaaaaaaaaaaaaaaaaaaaaaaaaaaaaaaaaaaaaaaaaaaaaaaaaaaaaaaaaaaaaaaaaaaaaaaaaaa

SEQ ID NO: 12240 - RNA, 4094 nt, Artificial Sequence
  SARS-CoV-2/China/WF0004/2020__EPI_ISL_413694 spike protein mRNA wt (1-1273)
aggagagucccgcagucggcguccagcggcucugcuuguucgugugugugucguugcaggccuuauucaagcuuaccauguuuguuuuucuuguuuuauugccacuagucucuagucaguguguuaaucuuacaaccagaacucaauuacccccugcauacacuaauucuuucacacgugguguuuauuacccugacaaaguuuucagauccucaguuuuacauucaacucaggacuuguucuuaccuuucuuuuccaauguuacuugguuccaugcuauacaugucucugggaccaaugguacuaagagguuugauaacccuguccuaccauuuaaugaugguguuuauuuugcuuccacugagaagucuaacauaauaagaggcuggauuuuugguacuacuuuagauucgaagacccagucccuacuuauuguuaauaacgcuacuaauguuguuauuaaagucugugaauuucaauuuuguaaugauccauuuuuggguguuuauuaccacaaaaacaacaaaaguuggacggaaagugaguucagaguuuauucuagugcgaauaauugcacuuuugaauaugucucucagccuuuucuuauggaccuugaaggaaaacaggguaauuucaaaaaucuuagggaauuuguguuuaagaauauugaugguuauuuuaaaauauauucuaagcacacgccuauuaauuuagugcgugaucucccucaggguuuuucggcuuuagaaccauugguagauuugccaauagguauuaacaucacuagguuucaaacuuuacuugcuuuacauagaaguuauuugacuccuggugauucuucuucagguuggacagcuggugcugcagcuuauuauguggguuaucuucaaccuaggacuuuucuauuaaaauauaaugaaaauggaaccauuacagaugcuguagacugugcacuugacccucucucagaaacaaaguguacguugaaauccuucacuguagaaaaaggaaucuaucaaacuucuaacuuuagaguccaaccaacagaaucuauuguuagauuuccuaauauuacaaacuugugcccuuuuggugaaguuuuuaacgccaccagauuugcaucuguuuaugcuuggaacaggaagagaaucagcaacuguguugcugauuauucuguccuauauaauuccgcaucauuuuccacuuuuaaguguuauggagugucuccuacuaaauuaaaugaucucugcuuuacuaaugucuaugcagauucauuuguaauuagaggugaugaagucagacaaaucgcuccagggcaaacuggaaagauugcugauuauaauuauaaauuaccagaugauuuuacaggcugcguuauagcuuggaauucuaacaaucuugauucuaagguuggugguaauuauaauuaccuguauagauuguuuaggaagucuaaucucaaaccuuuugagagagauauuucaacugaaaucuaucaggccgguagcacaccuuguaaugguguugaagguuuuaauuguuacuuuccuuuacaaucauaugguuuccaacccacuaaugguguugguuaccaaccauacagaguaguaguacuuucuuuugaacuucuacaugcaccagcaacuguuuguggaccuaaaaagucuacuaauuugguuaaaaacaaaugugucaauuucaacuucaaugguuuaacaggcacagguguucuuacugagucuaacaaaaaguuucugccuuuccaacaauuuggcagagacauugcugacacuacugaugcuguccgugauccacagacacuugagauucuugacauuacaccauguucuuuugguggugucaguguuauaacaccaggaacaaauacuucuaaccagguugcuguucuuuaucaggauguuaacugcacagaagucccuguugcuauucaugcagaucaacuuacuccuacuuggcguguuuauucuacagguucuaauguuuuucaaacacgugcaggcuguuuaauaggggcugaacaugucaacaacucauaugagugugacauacccauuggugcagguauaugcgcuaguuaucagacucagacuaauucuccucggcgggcacguaguguagcuagucaauccaucauugccuacacuaugucacuuggugcagaaaauucaguugcuuacucuaauaacucuauugccauacccacaaauuuuacuauuaguguuaccacagaaauucuaccagugucuaugaccaagacaucaguagauuguacaauguacauuuguggugauucaacugaaugcagcaaucuuuuguugcaauauggcaguuuuuguacacaauuaaaccgugcuuuaacuggaauagcuguugaacaagacaaaaacacccaagaaguuuuugcacaagucaaacaaauuuacaaaacaccaccaauuaaagauuuuggugguuuuaauuuuucacaaauauuaccagauccaucaaaaccaagcaagaggucauuuauugaagaucuacuuuucaacaaagugacacuugcagaugcuggcuucaucaaacaauauggugauugccuuggugauauugcugcuagagaccucauuugugcacaaaaguuuaacggccuuacuguuuugccaccuuugcucacagaugaaaugauugcucaauacacuucugcacuguuagcggguacaaucacuucugguuggaccuuuggugcaggugcugcauuacaaauaccauuugcuaugcaaauggcuuauagguuuaaugguauuggaguuacacagaauguucucuaugagaaccaaaaauugauugccaaccaauuuaauagugcuauuggcaaaauucaagacucacuuucuuccacagcaagugcacuuggaaaacuucaagauguggucaaccaaaaugcacaagcuuuaaacacgcuuguuaaacaacuuagcuccaauuuuggugcaauuucaaguguuuuaaaugauauccuuucacgucuugacaaaguugaggcugaagugcaaauugauagguugaucacaggcagacuucaaaguuugcagacauaugugacucaacaauuaauuagagcugcagaaaucagagcuucugcuaaucuugcugcuacuaaaaugucagaguguguacuuggacaaucaaaaagauuugauuuuuguggaaagggcuaucaucuuauguccuucccucagucagcaccucaugguguagucuucuugcaugugacuuaugucccugcacaagaaaagaacuucacaacugcuccugccauuugucaugauggaaaagcacacuuuccucgugaaggugucuuuguuucaaauggcacacacugguuuguaacacaaaggaauuuuuaugaaccacaaaucauuacuacagacaacacauuugugucugguaacugugauguuguaauaggaauugucaacaacacaguuuaugauccuuugcaaccugaauuagacucauucaaggaggaguuagauaaauauuuuaagaaucauacaucaccagauguugauuuaggugacaucucuggcauuaaugcuucaguuguaaacauucaaaaagaaauugaccgccucaaugagguugccaagaauuuaaaugaaucucucaucgaucuccaagaacuuggaaaguaugagcaguauauaaaauggccaugguacauuuggcuagguuuuauagcuggcuugauugccauaguaauggugacaauuaugcuuugcuguaugaccaguugcuguaguugucucaagggcuguuguucuuguggauccugcugcaaauuugaugaagacgacucugagccagugcucaaaggagucaaauuacauuacacauaaggacuagucccuguucccagagcccacuuuuuuuucuuuuuuugaaauaaaauagccugucuuucagaucucaaaggcucuuuucagagccaccaaaaaaaaaaaaaaaaaaaaaaaaaaaaaaaaaaaaaaaaaaaaaaaaaaaaaaaaaaaaaaaaaaaaaaaaaaaaaaaaaaaaaaaaaaaaaaaaaaaaa

SEQ ID NO: 12241 - RNA, 4094 nt, Artificial Sequence
  SARS-CoV-2/China/WF0028/2020__EPI_ISL_413791 spike protein mRNA wt (1-1273)
aggagagucccgcagucggcguccagcggcucugcuuguucgugugugugucguugcaggccuuauucaagcuuaccauguuuguuuuucuuguuuuauugccacuagucucuagucaguguguuaaucuuacaaccagaacucaauuacccccugcauacacuaauucuuucacacgugguguuuauuacccugacaaaguuuucagauccucaguuuuacauucaacucaggacuuguucuuaccuuucuuuuccaauguuacuugguuccaugcuauacaugucucugggaccaaugguacuaagagguuugauaacccuguccuaccauuuaaugaugguguuuauuuugcuuccacugagaagucuaacauaauaagaggcuggauuuuugguacuacuuuagauucgaagacccagucccuacuuauuguuaauaacgcuacuaauguuguuauuaaagucugugaauuucaauuuuguaaugauccauuuuuggguguuuauuaccacaaaaacaacaaaaguuggauggaaagugaguucagaguuuauucuagugcgaauaauugcacuuuugaauaugucucucagccuuuucuuauggaccuugaaggaaaacaggguaauuucaaaaaucuuagggaauuuguguuuaagaauauugaugguuauuuuaaaauauauucuaagcacacgccuauuaauuuagugcgugaucucccucaggguuuuucggcuuuagaaccauugguagauuugccaauagguauuaacaucacuagguuucaaacuuuacuugcuuuacauagaaguuauuugacuccuggugauucuucuucagguuggacagcuggugcugcagcuuauuauguggguuaucuucaaccuaggacuuuucuauuaaaauauaaugaaaauggaaccauuacagaugcuguagacugugcacuugacccucucucagaaacaaaguguacguugaaauccuucacuguagaaaaaggaaucuaucaaacuucuaacuuuagaguccaaccaacagaaucuauuguuagauuuccuaauauuacaaacuugugcccuuuuggugaaguuuuuaacgccaccagauuugcaucuguuuaugcuuggaacaggaagagaaucagcaacuguguugcugauuauucuguccuauauaauuccgcaucauuuuccacuuuuaaguguuauggagugucuccuacuaaauuaaaugaucucugcuuuacuaaugucuaugcagauucauuuguaauuagaggugaugaagucagacaaaucgcuccagggcaaacuggaaagauugcugauuauaauuauaaauuaccagaugauuuuacaggcugcguuauagcuuggaauucuaacaaucuugauucuaagguuggugguaauuauaauuaccuguauagauuguuuaggaagucuaaucucaaaccuuuugagagagauauuucaacugaaaucuaucaggccgguagcacaccuuguaaugguguugaagguuuuaauuguuacuuuccuuuacaaucauaugguuuccaacccacuaaugguguugguuaccaaccauacagaguaguaguacuuucuuuugaacuucuacaugcaccagcaacuguuuguggaccuaaaaagucuacuaauuugguuaaaaacaaaugugucaauuucaacuucaaugguuuaacaggcacagguguucuuacugagucuaacaaaaaguuucugccuuuccaacaauuuggcagagacauugcugacacuacugaugcuguccgugauccacagacacuugagauucuugacauuacaccauguucuuuugguggugucaguguuauaacaccaggaacaaauacuucuaaccagguugcuguucuuuaucaggauguuaacugcacagaagucccuguugcuauucaugcagaucaacuuacuccuacuuggcguguuuauucuacagguucuaauguuuuucaaacacgugcaggcuguuuaauaggggcugaacaugucaacaacucauaugagugugacauacccauuggugcagguauaugcgcuaguuaucagacucagacuaauucuccucggcgggcacguaguguagcuagucaauccaucauugccuacacuaugucacuuggugcagaaaauucaguugcuuacucuaauaacucuauugccauacccacaaauuuuacuauuaguguuaccacagaaauucuaccagugucuaugaccaagacaucaguagauuguacaauguacauuuguggugauucaacugaaugcagcaaucuuuuguugcaauauggcaguuuuuguacacaauuaaaccgugcuuuaacuggaauagcuguugaacaagacaaaaacacccaagaaguuuuugcacaagucaaacaaauuuacaaaacaccaccaauuaaagauuuuggugguuuuaauuuuucacaaauauuaccagauccaucaaaaccaagcaagaggucauuuauugaagaucuacuuuucaacaaagugacacuugcagaugcuggcuucaucaaacaauauggugauugccuuggugauauugcugcuagagaccucauuugugcacaaaaguuuaacggccuuacuguuuugccaccuuugcucacagaugaaaugauugcucaauacacuucugcacuguuagcggguacaaucacuucugguuggaccuuuggugcaggugcugcauuacaaauaccauuugcuaugcaaauggcuuauagguuuaaugguauuggaguuacacagaauguucucuaugagaaccaaaaauugauugccaaccaauuuaauagugcuauuggcaaaauucaagacucacuuucuuccacagcaagugcacuuggaaaacuucaagauguggucaaccaaaaugcacaagcuuuaaacacgcuuguuaaacaacuuagcuccaauuuuggugcaauuucaaguguuuuaaaugauauccuuucacgucuugacaaaguugaggcugaagugcaaauugauagguugaucacaggcagacuucaaaguuugcagacauaugugacucaacaauuaauuagagcugcagaaaucagagcuucugcuaaucuugcugcuacuaaaaugucagaguguguacuuggacaaucaaaaagaguugauuuuuguggaaagggcuaucaucuuauguccuucccucagucagcaccucaugguguagucuucuugcaugugacuuaugucccugcacaagaaaagaacuucacaacugcuccugccauuugucaugauggaaaagcacacuuuccucgugaaggugucuuuguuucaaauggcacacacugguuuguaacacaaaggaauuuuuaugaaccacaaaucauuacuacagacaacacauuugugucugguaacugugauguuguaauaggaauugucaacaacacaguuuaugauccuuugcaaccugaauuagaaucauucaaggaggaguuagauaaauauuuuaagaaucauacaucaccagauguugauuuaggugacaucucuggcauuaaugcuucaguuguaaacauucaaaaagaaauugaccgccucaaugagguugccaagaauuuaaaugaaucucucaucgaucuccaagaacuuggaaaguaugagcaguauauaaaauggccaugguacauuuggcuagguuuuauagcuggcuugauugccauaguaauggugacaauuaugcuuugcuguaugaccaguugcuguaguugucucaagggcuguuguucuuguggauccugcugcaaauuugaugaagacgacucugagccagugcucaaaggagucaaauuacauuacacauaaggacuagucccuguucccagagcccacuuuuuuuucuuuuuuugaaauaaaauagccugucuuucagaucucaaaggcucuuuucagagccaccaaaaaaaaaaaaaaaaaaaaaaaaaaaaaaaaaaaaaaaaaaaaaaaaaaaaaaaaaaaaaaaaaaaaaaaaaaaaaaaaaaaaaaaaaaaaaaaaaaaaa

SEQ ID NO: 12242 - RNA, 4094 nt, Artificial Sequence
  SARS-CoV-2/2019-nCoV/USA-CruiseA-18/2020__MT159716.1 spike protein mRNA wt (1-1273)
aggagagucccgcagucggcguccagcggcucugcuuguucgugugugugucguugcaggccuuauucaagcuuaccauguuuguuuuucuuguuuuauugccacuagucucuagucaguguguuaaucuuacaaccagaacucaauuacccccugcauacacuaauucuuucacacgugguguuuauuacccugacaaaguuuucagauccucaguuuuacauucaacucaggacuuguucuuaccuuucuuuuccaauguuacuugguuccaugcuauacaugucucugggaccaaugguacuaagagguuugauaacccuguccuaccauuuaaugaugguguuuauuuugcuuccacugagaagucuaacauaauaagaggcuggauuuuugguacuacuuuagauucgaagacccagucccuacuuauuguuaauaacgcuacuaauguuguuauuaaagucugugaauuucaauuuuguaaugauccauuuuuggguguuuauuaccacaaaaacaacaaaaguuggauggaaagugaguuaagaguuuauucuagugcgaauaauugcacuuuugaauaugucucucagccuuuucuuauggaccuugaaggaaaacaggguaauuucaaaaaucuuagggaauuuguguuuaagaauauugaugguuauuuuaaaauauauucuaagcacacgccuauuaauuuagugcgugaucucccucaggguuuuucggcuuuagaaccauugguagauuugccaauagguauuaacaucacuagguuucaaacuuuacuugcuuuacauagaaguuauuugacuccuggugauucuucuucagguuggacagcuggugcugcagcuuauuauguggguuaucuucaaccuaggacuuuucuauuaaaauauaaugaaaauggaaccauuacagaugcuguagacugugcacuugacccucucucagaaacaaaguguacguugaaauccuucacuguagaaaaaggaaucuaucaaacuucuaacuuuagaguccaaccaacagaaucuauuguuagauuuccuaauauuacaaacuugugcccuuuuggugaaguuuuuaacgccaccagauuugcaucuguuuaugcuuggaacaggaagagaaucagcaacuguguugcugauuauucuguccuauauaauuccgcaucauuuuccacuuuuaaguguuauggagugucuccuacuaaauuaaaugaucucugcuuuacuaaugucuaugcagauucauuuguaauuagaggugaugaagucagacaaaucgcuccagggcaaacuggaaagauugcugauuauaauuauaaauuaccagaugauuuuacaggcugcguuauagcuuggaauucuaacaaucuugauucuaagguuggugguaauuauaauuaccuguauagauuguuuaggaagucuaaucucaaaccuuuugagagagauauuucaacugaaaucuaucaggccgguagcacaccuuguaaugguguugaagguuuuaauuguuacuuuccuuuacaaucauaugguuuccaacccacuaaugguguugguuaccaaccauacagaguaguaguacuuucuuuugaacuucuacaugcaccagcaacuguuuguggaccuaaaaagucuacuaauuugguuaaaaacaaaugugucaauuucaacuucaaugguuuaacaggcacagguguucuuacugagucuaacaaaaaguuucugccuuuccaacaauuuggcagagacauugcugacacuacugaugcuguccgugauccacagacacuugagauucuugacauuacaccauguucuuuugguggugucaguguuauaacaccaggaacaaauacuucuaaccagguugcuguucuuuaucaggauguuaacugcacagaagucccuguugcuauucaugcagaucaacuuacuccuacuuggcguguuuauucuacagguucuaauguuuuucaaacacgugcaggcuguuuaauaggggcugaacaugucaacaacucauaugagugugacauacccauuggugcagguauaugcgcuaguuaucagacucagacuaauucuccucggcgggcacguaguguagcuagucaauccaucauugccuacacuaugucacuuggugcagaaaauucaguugcuuacucuaauaacucuauugccauacccacaaauuuuacuauuaguguuaccacagaaauucuaccagugucuaugaccaagacaucaguagauuguacaauguacauuuguggugauucaacugaaugcagcaaucuuuuguugcaauauggcaguuuuuguacacaauuaaaccgugcuuuaacuggaauagcuguugaacaagacaaaaacacccaagaaguuuuugcacaagucaaacaaauuuacaaaacaccaccaauuaaagauuuuggugguuuuaauuuuucacaaauauuaccagauccaucaaaaccaagcaagaggucauuuauugaagaucuacuuuucaacaaagugacacuugcagaugcuggcuucaucaaacaauauggugauugccuuggugauauugcugcuagagaccucauuugugcacaaaaguuuaacggccuuacuguuuugccaccuuugcucacagaugaaaugauugcucaauacacuucugcacuguuagcggguacaaucacuucugguuggaccuuuggugcaggugcugcauuacaaauaccauuugcuaugcaaauggcuuauagguuuaaugguauuggaguuacacagaauguucucuaugagaaccaaaaauugauugccaaccaauuuaauagugcuauuggcaaaauucaagacucacuuucuuccacagcaagugcacuuggaaaacuucaagauguggucaaccaaaaugcacaagcuuuaaacacgcuuguuaaacaacuuagcuccaauuuuggugcaauuucaaguguuuuaaaugauauccuuucacgucuugacaaaguugaggcugaagugcaaauugauagguugaucacaggcagacuucaaaguuugcagacauaugugacucaacaauuaauuagagcugcagaaaucagagcuucugcuaaucuugcugcuacuaaaaugucagaguguguacuuggacaaucaaaaagaguugauuuuuguggaaagggcuaucaucuuauguccuucccucagucagcaccucaugguguagucuucuugcaugugacuuaugucccugcacaagaaaagaacuucacaacugcuccugccauuugucaugauggaaaagcacacuuuccucgugaaggugucuuuguuucaaauggcacacacugguuuguaacacaaaggaauuuuuaugaaccacaaaucauuacuacagacaacacauuugugucugguaacugugauguuguaauaggaauugucaacaacacaguuuaugauccuuugcaaccugaauuagacucauucaaggaggaguuagauaaauauuuuaagaaucauacaucaccagauguugauuuaggugacaucucuggcauuaaugcuucaguuguaaacauucaaaaagaaauugaccgccucaaugagguugccaagaauuuaaaugaaucucucaucgaucuccaagaacuuggaaaguaugagcaguauauaaaauggccaugguacauuuggcuagguuuuauagcuggcuugauugccauaguaauggugacaauuaugcuuugcuguaugaccaguugcuguaguugucucaagggcuguuguucuuguggauccugcugcaaauuugaugaagacgacucugagccagugcucaaaggagucaaauuacauuacacauaaggacuagucccuguucccagagcccacuuuuuuuucuuuuuuugaaauaaaauagccugucuuucagaucucaaaggcucuuuucagagccaccaaaaaaaaaaaaaaaaaaaaaaaaaaaaaaaaaaaaaaaaaaaaaaaaaaaaaaaaaaaaaaaaaaaaaaaaaaaaaaaaaaaaaaaaaaaaaaaaaaaaa

SEQ ID NO: 12243 - RNA, 4094 nt, Artificial Sequence
  SARS-CoV-2/SARS-CoV-2/Yunnan-01/human/2020/CHN__MT049951.1 spike protein mRNA wt (1-1273)
aggagagucccgcagucggcguccagcggcucugcuuguucgugugugugucguugcaggccuuauucaagcuuaccauguuuguuuuucuuguuuuauugccacuagucucuagucaguguguuaaucuuacaaccagaacucaauuacccccugcaaacacuaauucuuucacacgugguguuuauuacccugacaaaguuuucagauccucaguuuuacauucaacucaggacuuguucuuaccuuucuuuuccaauguuacuugguuccaugcuauacaugucucugggaccaaugguacuaagagguuugauaacccuguccuaccauuuaaugaugguguuuauuuugcuuccacugagaagucuaacauaauaagaggcuggauuuuugguacuacuuuagauucgaagacccagucccuacuuauuguuaauaacgcuacuaauguuguuauuaaagucugugaauuucaauuuuguaaugauccauuuuuggguguuuauuaccacaaaaacaacaaaaguuggauggaaagugaguucagaguuuauucuagugcgaauaauugcacuuuugaauaugucucucagccuuuucuuauggaccuugaaggaaaacaggguaauuucaaaaaucuuagggaauuuguguuuaagaauauugaugguuauuuuaaaauauauucuaagcacacgccuauuaauuuagugcgugaucucccucaggguuuuucggcuuuagaaccauugguagauuugccaauagguauuaacaucacuagguuucaaacuuuacuugcuuuacauagaaguuauuugacuccuggugauucuucuucagguuggacagcuggugcugcagcuuauuauguggguuaucuucaaccuaggacuuuucuauuaaaauauaaugaaaauggaaccauuacagaugcuguagacugugcacuugacccucucucagaaacaaaguguacguugaaauccuucacuguagaaaaaggaaucuaucaaacuucuaacuuuagaguccaaccaacagaaucuauuguuagauuuccuaauauuacaaacuugugcccuuuuggugaaguuuuuaacgccaccagauuugcaucuguuuaugcuuggaacaggaagagaaucagcaacuguguugcugauuauucuguccuauauaauuccgcaucauuuuccacuuuuaaguguuauggagugucuccuacuaaauuaaaugaucucugcuuuacuaaugucuaugcagauucauuuguaauuagaggugaugaagucagacaaaucgcuccagggcaaacuggaaagauugcugauuauaauuauaaauuaccagaugauuuuacaggcugcguuauagcuuggaauucuaacaaucuugauucuaagguuggugguaauuauaauuaccuguauagauuguuuaggaagucuaaucucaaaccuuuugagagagauauuucaacugaaaucuaucaggccgguagcacaccuuguaaugguguugaagguuuuaauuguuacuuuccuuuacaaucauaugguuuccaacccacuaaugguguugguuaccaaccauacagaguaguaguacuuucuuuugaacuucuacaugcaccagcaacuguuuguggaccuaaaaagucuacuaauuugguuaaaaacaaaugugucaauuucaacuucaaugguuuaacaggcacagguguucuuacugagucuaacaaaaaguuucugccuuuccaacaauuuggcagagacauugcugacacuacugaugcuguccgugauccacagacacuugagauucuugacauuacaccauguucuuuugguggugucaguguuauaacaccaggaacaaauacuucuaaccagguugcuguucuuuaucaggauguuaacugcacagaagucccuguugcuauucaugcagaucaacuuacuccuacuuggcguguuuauucuacagguucuaauguuuuucaaacacgugcaggcuguuuaauaggggcugaacaugucaacaacucauaugagugugacauacccauuggugcagguauaugcgcuaguuaucagacucagacuaauucuccucggcgggcacguaguguagcuagucaauccaucauugccuacacuaugucacuuggugcagaaaauucaguugcuuacucuaauaacucuauugccauacccacaaauuuuacuauuaguguuaccacagaaauucuaccagugucuaugaccaagacaucaguagauuguacaauguacauuuguggugauucaacugaaugcagcaaucuuuuguugcaauauggcaguuuuuguacacaauuaaaccgugcuuuaacuggaauagcuguugaacaagacaaaaacacccaagaaguuuuugcacaagucaaacaaauuuacaaaacaccaccaauuaaagauuuuggugguuuuaauuuuucacaaauauuaccagauccaucaaaaccaagcaagaggucauuuauugaagaucuacuuuucaacaaagugacacuugcagaugcuggcuucaucaaacaauauggugauugccuuggugauauugcugcuagagaccucauuugugcacaaaaguuuaacggccuuacuguuuugccaccuuugcucacagaugaaaugauugcucaauacacuucugcacuguuagcggguacaaucacuucugguuggaccuuuggugcaggugcugcauuacaaauaccauuugcuaugcaaauggcuuauagguuuaaugguauuggaguuacacagaauguucucuaugagaaccaaaaauugauugccaaccaauuuaauagugcuauuggcaaaauucaagacucacuuucuuccacagcaagugcacuuggaaaacuucaagauguggucaaccaaaaugcacaagcuuuaaacacgcuuguuaaacaacuuagcuccaauuuuggugcaauuucaaguguuuuaaaugauauccuuucacgucuugacaaaguugaggcugaagugcaaauugauagguugaucacaggcagacuucaaaguuugcagacauaugugacucaacaauuaauuagagcugcagaaaucagagcuucugcuaaucuugcugcuacuaaaaugucagaguguguacuuggacaaucaaaaagaguugauuuuuguggaaagggcuaucaucuuauguccuucccucagucagcaccucaugguguagucuucuugcaugugacuuaugucccugcacaagaaaagaacuucacaacugcuccugccauuugucaugauggaaaagcacacuuuccucgugaaggugucuuuguuucaaauggcacacacugguuuguaacacaaaggaauuuuuaugaaccacaaaucauuacuacagacaacacauuugugucugguaacugugauguuguaauaggaauugucaacaacacaguuuaugauccuuugcaaccugaauuagacucauucaaggaggaguuagauaaauauuuuaagaaucauacaucaccagauguugauuuaggugacaucucuggcauuaaugcuucaguuguaaacauucaaaaagaaauugaccgccucaaugagguugccaagaauuuaaaugaaucucucaucgaucuccaagaacuuggaaaguaugagcaguauauaaaauggccaugguacauuuggcuagguuuuauagcuggcuugauugccauaguaauggugacaauuaugcuuugcuguaugaccaguugcuguaguugucucaagggcuguuguucuuguggauccugcugcaaauuugaugaagacgacucugagccagugcucaaaggagucaaauuacauuacacauaaggacuagucccuguucccagagcccacuuuuuuuucuuuuuuugaaauaaaauagccugucuuucagaucucaaaggcucuuuucagagccaccaaaaaaaaaaaaaaaaaaaaaaaaaaaaaaaaaaaaaaaaaaaaaaaaaaaaaaaaaaaaaaaaaaaaaaaaaaaaaaaaaaaaaaaaaaaaaaaaaaaaa

SEQ ID NO: 12244 - RNA, 4094 nt, Artificial Sequence
  SARS-CoV-2/USA/WA-UW292/2020__EPI_ISL_418077 spike protein mRNA wt (1-1273)
aggagagucccgcagucggcguccagcggcucugcuuguucgugugugugucguugcaggccuuauucaagcuuaccauguuuguuuuucuuguuuuauugccacuagucucuagucaguguguuaaucuuacaaccagaacucaauuacccccugcauacacuaauucuuucacacgugguguuuauuacccugacaaaguuuucagauccucaguuuuacauucaacucaggacuuguucuuaccuuucuuuuccaauguuacuugguuccaugcuauacaugucucugggaccaaugguacuaagagguuugauaacccuguccuaccauuuaaugaugguguuuauuuugcuuccacugagaagucuaacauaauaagaggcuggauuuuugguacuacuuuagauucgaagacccagucccuacuuauuguuaauaacgcuacuaauguuguuauuaaagucugugaauuucaauuuuguaaugauccauuuuuggguguuuauuaccacaaaaacaacaaaaguuggauggaaagugaguucagaguuuauucuagugcgaauaauugcacuuuugaauaugucucucagccuuuucuuauggaccuugaaggaaaacaggguaauuucaaaaaucuuagggaauuuguguuuaagaauauugaugguuauuuuaaaauauauucuaagcacacgccuauuaauuuagugcgugaucucccucaggguuuuucggcuuuagaaccauugguagauuugccaauagguauuaacaucacuagguuucaaacuuuacuugcuuuacauagaaguuauuugacuccuggugauucuucuucagguuggacagcuggugcugcagcuuauuauguggguuaucuucaaccuaggacuuuucuauuaaaauauaaugaaaauggaaccauuacagaugcuguagacugugcacuugacccucucucagaaacaaaguguacguugaaauccuucacuguagaaaaaggaaucuaucaaacuucuaacuuuagaguccaaccaacagaaucuauuguuagauuuccuaauauuacaaacuugugcccuuuuggugaaguuuuuaacgccaccagauuugcaucuguuuaugcuuggaacaggaagagaaucagcaacuguguugcugauuauucuguccuauauaauuccgcaucauuuuccacuuuuaaguguuauggagugucuccuacuaaauuaaaugaucucugcuuuacuaaugucuaugcagauucauuuguaauuagaggugaugaagucagacaaaucgcuccagggcaaacuggaaagauugcugauuauaauuauaaauuaccagaugauuuuacaggcugcguuauagcuuggaauucuaacaaucuugauucuaagguuggugguaauuauaauuaccuguauagauuguuuaggaagucuaaucucaaaccuuuugagagagauauuucaacugaaaucuaucaggccaguagcacaccuuguaaugguguugaagguuuuaauuguuacuuuccuuuacaaucauaugguuuccaacccacuaaugguguugguuaccaaccauacagaguaguaguacuuucuuuugaacuucuacaugcaccagcaacuguuuguggaccuaaaaagucuacuaauuugguuaaaaacaaaugugucaauuucaacuucaaugguuuaacaggcacagguguucuuacugagucuaacaaaaaguuucugccuuuccaacaauuuggcagagacauugcugacacuacugaugcuguccgugauccacagacacuugagauucuugacauuacaccauguucuuuugguggugucaguguuauaacaccaggaacaaauacuucuaaccagguugcuguucuuuaucaggauguuaacugcacagaagucccuguugcuauucaugcagaucaacuuacuccuacuuggcguguuuauucuacagguucuaauguuuuucaaacacgugcaggcuguuuaauaggggcugaacaugucaacaacucauaugagugugacauacccauuggugcagguauaugcgcuaguuaucagacucagacuaauucuccucggcgggcacguaguguagcuagucaauccaucauugccuacacuaugucacuuggugcagaaaauucaguugcuuacucuaauaacucuauugccauacccacaaauuuuacuauuaguguuaccacagaaauucuaccagugucuaugaccaagacaucaguagauuguacaauguacauuuguggugauucaacugaaugcagcaaucuuuuguugcaauauggcaguuuuuguacacaauuaaaccgugcuuuaacuggaauagcuguugaacaagacaaaaacacccaagaaguuuuugcacaagucaaacaaauuuacaaaacaccaccaauuaaagauuuuggugguuuuaauuuuucacaaauauuaccagauccaucaaaaccaagcaagaggucauuuauugaagaucuacuuuucaacaaagugacacuugcagaugcuggcuucaucaaacaauauggugauugccuuggugauauugcugcuagagaccucauuugugcacaaaaguuuaacggccuuacuguuuugccaccuuugcucacagaugaaaugauugcucaauacacuucugcacuguuagcggguacaaucacuucugguuggaccuuuggugcaggugcugcauuacaaauaccauuugcuaugcaaauggcuuauagguuuaaugguauuggaguuacacagaauguucucuaugagaaccaaaaauugauugccaaccaauuuaauagugcuauuggcaaaauucaagacucacuuucuuccacagcaagugcacuuggaaaacuucaagauguggucaaccaaaaugcacaagcuuuaaacacgcuuguuaaacaacuuagcuccaauuuuggugcaauuucaaguguuuuaaaugauauccuuucacgucuugacaaaguugaggcugaagugcaaauugauagguugaucacaggcagacuucaaaguuugcagacauaugugacucaacaauuaauuagagcugcagaaaucagagcuucugcuaaucuugcugcuacuaaaaugucagaguguguacuuggacaaucaaaaagaguugauuuuuguggaaagggcuaucaucuuauguccuucccucagucagcaccucaugguguagucuucuugcaugugacuuaugucccugcacaagaaaagaacuucacaacugcuccugccauuugucaugauggaaaagcacacuuuccucgugaaggugucuuuguuucaaauggcacacacugguuuguaacacaaaggaauuuuuaugaaccacaaaucauuacuacagacaacacauuugugucugguaacugugauguuguaauaggaauugucaacaacacaguuuaugauccuuugcaaccugaauuagacucauucaaggaggaguuagauaaauauuuuaagaaucauacaucaccagauguugauuuaggugacaucucuggcauuaaugcuucaguuguaaacauucaaaaagaaauugaccgccucaaugagguugccaagaauuuaaaugaaucucucaucgaucuccaagaacuuggaaaguaugagcaguauauaaaauggccaugguacauuuggcuagguuuuauagcuggcuugauugccauaguaauggugacaauuaugcuuugcuguaugaccaguugcuguaguugucucaagggcuguuguucuuguggauccugcugcaaauuugaugaagacgacucugagccagugcucaaaggagucaaauuacauuacacauaaggacuagucccuguucccagagcccacuuuuuuuucuuuuuuugaaauaaaauagccugucuuucagaucucaaaggcucuuuucagagccaccaaaaaaaaaaaaaaaaaaaaaaaaaaaaaaaaaaaaaaaaaaaaaaaaaaaaaaaaaaaaaaaaaaaaaaaaaaaaaaaaaaaaaaaaaaaaaaaaaaaaa

SEQ ID NO: 12245 - RNA, 4094 nt, Artificial Sequence
  SARS-CoV-2/Iceland/192/2020__EPI_ISL_417819 spike protein mRNA wt (1-1273)
aggagagucccgcagucggcguccagcggcucugcuuguucgugugugugucguugcaggccuuauucaagcuuaccauguuuguuuuuuuuguuuuauugccacuagucucuagucaguguguuaaucuuacaaccagaacucaauuacccccugcauacacuaauucuuucacacgugguguuuauuacccugacaaaguuuucagauccucaguuuuacauucaacucaggacuuguucuuaccuuucuuuuccaauguuacuugguuccaugcuauacaugucucugggaccaaugguacuaagagguuugauaacccuguccuaccauuuaaugaugguguuuauuuugcuuccacugagaagucuaacauaauaagaggcuggauuuuugguacuacuuuagauucgaagacccagucccuacuuauuguuaauaacgcuacuaauguuguuauuaaagucugugaauuucaauuuuguaaugauccauuuuuggguguuuauuaccacaaaaacaacaaaaguuggauggaaagugaguucagaguuuauucuagugcgaauaauugcacuuuugaauaugucucucagccuuuucuuauggaccuugaaggaaaacaggguaauuucaaaaaucuuagggaauuuguguuuaagaauauugaugguuauuuuaaaauauauucuaagcacacgccuauuaauuuagugcgugaucucccucaggguuuuucggcuuuagaaccauugguagauuugccaauagguauuaacaucacuagguuucaaacuuuacuugcuuuacauagaaguuauuugacuccuggugauucuucuucagguuggacagcuggugcugcagcuuauuauguggguuaucuucaaccuaggacuuuucuauuaaaauauaaugaaaauggaaccauuacagaugcuguagacugugcacuugacccucucucagaaacaaaguguacguugaaauccuucacuguagaaaaaggaaucuaucaaacuucuaacuuuagaguccaaccaacagaaucuauuguuagauuuccuaauauuacaaacuugugcccuuuuggugaaguuuuuaacgccaccagauuugcaucuguuuaugcuuggaacaggaagagaaucagcaacuguguugcugauuauucuguccuauauaauuccgcaucauuuuccacuuuuaaguguuauggagugucuccuacuaaauuaaaugaucucugcuuuacuaaugucuaugcagauucauuuguaauuagaggugaugaagucagacaaaucgcuccagggcaaacuggaaagauugcugauuauaauuauaaauuaccagaugauuuuacaggcugcguuauagcuuggaauucuaacaaucuugauucuaagguuggugguaauuauaauuaccuguauagauuguuuaggaagucuaaucucaaaccuuuugagagagauauuucaacugaaaucuaucaggccgguagcacaccuuguaaugguguugaagguuuuaauuguuacuuuccuuuacaaucauaugguuuccaacccacuaaugguguugguuaccaaccauacagaguaguaguacuuucuuuugaacuucuacaugcaccagcaacuguuuguggaccuaaaaagucuacuaauuugguuaaaaacaaaugugucaauuucaacuucaaugguuuaacaggcacagguguucuuacugagucuaacaaaaaguuucugccuuuccaacaauuuggcagagacauugcugacacuacugaugcuguccgugauccacagacacuugagauucuugacauuacaccauguucuuuugguggugucaguguuauaacaccaggaacaaauacuucuaaccagguugcuguucuuuaucaggguguuaacugcacagaagucccuguugcuauucaugcagaucaacuuacuccuacuuggcguguuuauucuacagguucuaauguuuuucaaacacgugcaggcuguuuaauaggggcugaacaugucaacaacucauaugagugugacauacccauuggugcagguauaugcgcuaguuaucagacucagacuaauucuccucggcgggcacguaguguagcuagucaauccaucauugccuacacuaugucacuuggugcagaaaauucaguugcuuacucuaauaacucuauugccauacccacaaauuuuacuauuaguguuaccacagaaauucuaccagugucuaugaccaagacaucaguagauuguacaauguacauuuguggugauucaacugaaugcagcaaucuuuuguugcaauauggcaguuuuuguacacaauuaaaccgugcuuuaacuggaauagcuguugaacaagacaaaaacacccaagaaguuuuugcacaagucaaacaaauuuacaaaacaccaccaauuaaagauuuuggugguuuuaauuuuucacaaauauuaccagauccaucaaaaccaagcaagaggucauuuauugaagaucuacuuuucaacaaagugacacuugcagaugcuggcuucaucaaacaauauggugauugccuuggugauauugcugcuagagaccucauuugugcacaaaaguuuaacggccuuacuguuuugccaccuuugcucacagaugaaaugauugcucaauacacuucugcacuguuagcggguacaaucacuucugguuggaccuuuggugcaggugcugcauuacaaauaccauuugcuaugcaaauggcuuauagguuuaaugguauuggaguuacacagaauguucucuaugagaaccaaaaauugauugccaaccaauuuaauagugcuauuggcaaaauucaagacucacuuucuuccacagcaagugcacuuggaaaacuucaagauguggucaaccaaaaugcacaagcuuuaaacacgcuuguuaaacaacuuagcuccaauuuuggugcaauuucaaguguuuuaaaugauauccuuucacgucuugacaaaguugaggcugaagugcaaauugauagguugaucacaggcagacuucaaaguuugcagacauaugugacucaacaauuaauuagagcugcagaaaucagagcuucugcuaaucuugcugcuacuaaaaugucagaguguguacuuggacaaucaaaaagaguugauuuuuguggaaagggcuaucaucuuauguccuucccucagucagcaccucaugguguagucuucuugcaugugacuuaugucccugcacaagaaaagaacuucacaacugcuccugccauuugucaugauggaaaagcacacuuuccucgugaaggugucuuuguuucaaauggcacacacugguuuguaacacaaaggaauuuuuaugaaccacaaaucauuacuacagacaacacauuugugucugguaacugugauguuguaauaggaauugucaacaacacaguuuaugauccuuugcaaccugaauuagacucauucaaggaggaguuagauaaauauuuuaagaaucauacaucaccagauguugauuuaggugacaucucuggcauuaaugcuucaguuguaaacauucaaaaagaaauugaccgccucaaugagguugccaagaauuuaaaugaaucucucaucgaucuccaagaacuuggaaaguaugagcaguauauaaaauggccaugguacauuuggcuagguuuuauagcuggcuugauugccauaguaauggugacaauuaugcuuugcuguaugaccaguugcuguaguugucucaagggcuguuguucuuguggauccugcugcaaauuugaugaagacgacucugagccagugcucaaaggagucaaauuacauuacacauaaggacuagucccuguucccagagcccacuuuuuuuucuuuuuuugaaauaaaauagccugucuuucagaucucaaaggcucuuuucagagccaccaaaaaaaaaaaaaaaaaaaaaaaaaaaaaaaaaaaaaaaaaaaaaaaaaaaaaaaaaaaaaaaaaaaaaaaaaaaaaaaaaaaaaaaaaaaaaaaaaaaaa

SEQ ID NO: 12246 - RNA, 4094 nt, Artificial Sequence
  SARS-CoV-2/Belgium/ULG-6939/2020__EPI_ISL_417020 spike protein mRNA wt (1-1273)
aggagagucccgcagucggcguccagcggcucugcuuguucgugugugugucguugcaggccuuauucaagcuuaccauguuuguuuuucuuguuuuauugccacuagucucuagucaguguguuaaucuuacaaccagaacucaauuacccccugcauacacuaauucuuucacacgugguguuuauuacccugacaaaguuuucagauccucaguuuuacauucaacucaggacuuguucuuaccuuucuuuuccaauguuacuugguuccaugcuauacaugucucugggaccaaugguacuaagagguuugauaacccuguccuaccauuuaaugaugguguuuauuuugcuuccacugagaagucuaacauaauaagaggcuggauuuuugguacuacuuuagauucgaagacccagucccuacuuauuguuaauaacgcuacuaauguuguuauuaaagucugugaauuucaauuuuguaaugauccauuuuuggguguuuauuaccacaaaaacaacaaaaguuggauggaaagugaguucagaguuuauucuagugcgaauaauugcacuuuugaauaugucucucagccuuuucuuauggaccuugaaggaaaacaggguaauuucaaaaaucuuagggaauuuguguuuaagaauauugaugguuauuuuaaaauauauucuaagcacacgccuauuaauuuagugcgugaucucccucaggguuuuucggcuuuagaaccauugguagauuugccaauagguauuaacaucacuagguuucaaacuuuacuugcuuuacauagaaguuauuugacuccuggugauucuucuucagguuggacagcuggugcugcagcuuauuauguggguuaucuucaaccuaggacuuuucuauuaaaauauaaugaaaauggaaccauuacagaugcuguagacugugcacuugacccucucucagaaacaaaguguacguugaaauccuucacuguagaaaaaggaaucuaucaaacuucuaacuuuagaguccaaccaacagaaucuauuguuagauuuccuaauauuacaaacuugugcccuuuuggugaaguuuuuaacgccaccagauuugcaucuguuuaugcuuggaacaggaagagaaucagcaacuguguugcugauuauucuguccuauauaauuccgcaucauuuuccacuuuuaaguguuauggagugucuccuacuaaauuaaaugaucucugcuuuacuaaugucuaugcagauucauuuguaauuagaggugaugaagucagacaaaucgcuccagggcaaacuggaaagauugcugauuauaauuauaaauuaccagaugauuuuacaggcugcguuauagcuuggaauucuaacaaucuugauucuaagguuggugguaauuauaauuaccuguauagauuguuuaggaagucuaaucucaaaccuuuugagagagauauuucaacugaaaucuaucaggccgguagcacaccuuguaaugguguugaagguuuuaauuguuacuuuccuuuacaaucauaugguuuccaacccacuaaugguguugguuaccaaccauacagaguaguaguacuuucuuuugaacuucuacaugcaccagcaacuguuuguggaccuaaaaagucuacuaauuugguuaaaaacaaaugugucaauuucaacuucaaugguuuaacaggcacagguguucuuacugagucuaacaaaaaguuucugccuuuccaacaauuuggcagagacauugcugacacuacugaugcuguccgugauccacagacacuugagauucuugacauuacaccauguucuuuugguggugucaguguuauaacaccaggaacaaauacuucuaaccagguugcuguucuuuaucaggguguuaacugcacagaagucccuguugcuauucaugcagaucaacuuacuccuacuuggcguguuuauucuacagguucuaauguuuuucaaacacgugcaggcuguuuaauaggggcugaacaugucaacaacucauaugagugugacauacccauuggugcagguauaugcgcuaguuaucagacucagacuaauucuccucggcgggcacguaguguagcuagucaauccaucauugccuacacuaugucacuuggugcagaaaauucaguuguuuacucuaauaacucuauugccauacccacaaauuuuacuauuaguguuaccacagaaauucuaccagugucuaugaccaagacaucaguagauuguacaauguacauuuguggugauucaacugaaugcagcaaucuuuuguugcaauauggcaguuuuuguacacaauuaaaccgugcuuuaacuggaauagcuguugaacaagacaaaaacacccaagaaguuuuugcacaagucaaacaaauuuacaaaacaccaccaauuaaagauuuuggugguuuuaauuuuucacaaauauuaccagauccaucaaaaccaagcaagaggucauuuauugaagaucuacuuuucaacaaagugacacuugcagaugcuggcuucaucaaacaauauggugauugccuuggugauauugcugcuagagaccucauuugugcacaaaaguuuaacggccuuacuguuuugccaccuuugcucacagaugaaaugauugcucaauacacuucugcacuguuagcggguacaaucacuucugguuggaccuuuggugcaggugcugcauuacaaauaccauuugcuaugcaaauggcuuauagguuuaaugguauuggaguuacacagaauguucucuaugagaaccaaaaauugauugccaaccaauuuaauagugcuauuggcaaaauucaagacucacuuucuuccacagcaagugcacuuggaaaacuucaagauguggucaaccaaaaugcacaagcuuuaaacacgcuuguuaaacaacuuagcuccaauuuuggugcaauuucaaguguuuuaaaugauauccuuucacgucuugacaaaguugaggcugaagugcaaauugauagguugaucacaggcagacuucaaaguuugcagacauaugugacucaacaauuaauuagagcugcagaaaucagagcuucugcuaaucuugcugcuacuaaaaugucagaguguguacuuggacaaucaaaaagaguugauuuuuguggaaagggcuaucaucuuauguccuucccucagucagcaccucaugguguagucuucuugcaugugacuuaugucccugcacaagaaaagaacuucacaacugcuccugccauuugucaugauggaaaagcacacuuuccucgugaaggugucuuuguuucaaauggcacacacugguuuguaacacaaaggaauuuuuaugaaccacaaaucauuacuacagacaacacauuugugucugguaacugugauguuguaauaggaauugucaacaacacaguuuaugauccuuugcaaccugaauuagacucauucaaggaggaguuagauaaauauuuuaagaaucauacaucaccagauguugauuuaggugacaucucuggcauuaaugcuucaguuguaaacauucaaaaagaaauugaccgccucaaugagguugccaagaauuuaaaugaaucucucaucgaucuccaagaacuuggaaaguaugagcaguauauaaaauggccaugguacauuuggcuagguuuuauagcuggcuugauugccauaguaauggugacaauuaugcuuugcuguaugaccaguugcuguaguugucucaagggcuguuguucuuguggauccugcugcaaauuugaugaagacgacucugagccagugcucaaaggagucaaauuacauuacacauaaggacuagucccuguucccagagcccacuuuuuuuucuuuuuuugaaauaaaauagccugucuuucagaucucaaaggcucuuuucagagccaccaaaaaaaaaaaaaaaaaaaaaaaaaaaaaaaaaaaaaaaaaaaaaaaaaaaaaaaaaaaaaaaaaaaaaaaaaaaaaaaaaaaaaaaaaaaaaaaaaaaaa

SEQ ID NO: 12247 - RNA, 4094 nt, Artificial Sequence
  SARS-CoV-2/France/HF2496/2020__EPI_ISL_418231 spike protein mRNA wt (1-1273)
aggagagucccgcagucggcguccagcggcucugcuuguucgugugugugucguugcaggccuuauucaagcuuaccauguuuguuuuucuuguuuuauugccacuagucucuagucaguguguuaaucuuacaaccagaacucaauuacccccugcauacacuaauucuuucacacgugguguuuauuacccugacaaaguuuucagauccucaguuuuacauucaacucaggacuuguucuuaccuuucuuuuccaauguuacuugguuccaugcuauacaugucucugggaccaaugguacuaagagguuugauaacccuguccuaccauuuaaugaugguguuuauuuugcuuccacugagaagucuaacauaauaagaggcuggauuuuugguacuacuuuagauucgaagacccagucccuacuuauuguuaauaacgcuacuaauguuguuauuaaagucugugaauuucaauuuuguaaugauccauuuuuggguguuuauuaccacaaaaacaacaaaaguuggauggaaagugaguucagaguuuauucuagugcgaauaauugcacuuuugaauaugucucucagccuuuucuuauggaccuugaaggaaaacaggguaauuucaaaaaucuuagggaauuuguguuuaagaauauugaugguuauuuuaaaauauauucuaagcacacgccuauuaauuuagugcgugaucucccucaggguuuuucggcuuuagaaccauugguagauuugccaauagguauuaacaucacuagguuucaaacuuuacuugcuuuacauagaaguuauuugacuccuggugauucuucuucagguuggacagcuggugcugcagcuuauuauguggguuaucuucaaccuaggacuuuucuauuaaaauauaaugaaaauggaaccauuacagaugcuguagacugugcacuugacccucucucagaaacaaaguguacguugaaauccuucacuguagaaaaaggaaucuaucaaacuucuaacuuuagaguccaaccaacagaaucuauuguuagauuuccuaauauuacaaacuugugcccuuuuggugaaguuuuuaacgccaccagauuugcaucuguuuaugcuuggaacaggaagagaaucagcaacuguguugcugauuauucuguccuauauaauuccgcaucauuuuccacuuuuaaguguuauggagugucuccuacuaaauuaaaugaucucugcuuuacuaaugucuaugcagauucauuuguaauuagaggugaugaagucagacaaaucgcuccagggcaaacuggaaagauugcugauuauaauuauaaauuaccagaugauuuuacaggcugcguuauagcuuggaauucuaacaaucuugauucuaagguuggugguaauuauaauuaccuguauagauuguuuaggaagucuaaucucaaaccuuuugagagagauauuucaacugaaaucuaucaggccgguagcacaccuuguaaugguguugaagguuuuaauuguuacuuuccuuuacaaucauaugguuuccaacccacuaaugguguugguuaccaaccauacagaguaguaguacuuucuuuugaacuucuacaugcaccagcaacuguuuguggaccuaaaaagucuacuaauuugguuaaaaacaaaugugucaauuucaacuucaaugguuuaacaggcacagguguucuuacugagucuaacaaaaaguuucugccuuuccaacaauuuggcagagacauugcugacacuacugaugcuguccgugauccacagacacuugagauucuugacauuacaccauguucuuuugguggugucaguguuauaacaccaggaacaaauacuucuaaccagguugcuguucuuuaucaggguguuaacugcacagaagucccuguugcuauucaugcagaucaacuuacuccuacuuggcguguuuauucuacagguucuaauguuuuucaaacacgugcaggcuguuuaauaggggcugaacaugucaacaacucauaugagugugacauacccauuggugcagguauaugcgcuaguuaucagacucagacuaauucuccucggcgggcacguaguguagcuagucaauccaucauugccuacacuaugucacuuggugcagaaaauucaguugcuuacucuaauaacucuauugccauacccacaaauuuuacuauuaguguuaccacagaaauucuaccagugucuaugaccaagacaucaguagauuguacaauguacauuuguggugauucaacugaaugcagcaaucuuuuguugcaauauggcaguuuuuguacacaauuaaaccgugcuuuaacuggaauagcuguugaacaagacaaaaacacccaagaaguuuuugcacaagucaaacaaauuuacaaaacaccaccaauuaaagauuuuggugguuuuaauuuuucacaaauauuaccagauccaucaaaaccaagcaagaggucauuuauugaagaucuacuuuucaacaaagugacacuugcagaugcuggcuucaucaaacaauauggugauugccuuggugauauuguugcuagagaccucauuugugcacaaaaguuuaacggccuuacuguuuugccaccuuugcucacagaugaaaugauugcucaauacacuucugcacuguuagcggguacaaucacuucugguuggaccuuuggugcaggugcugcauuacaaauaccauuugcuaugcaaauggcuuauagguuuaaugguauuggaguuacacagaauguucucuaugagaaccaaaaauugauugccaaccaauuuaauagugcuauuggcaaaauucaagacucacuuucuuccacagcaagugcacuuggaaaacuucaagauguggucaaccaaaaugcacaagcuuuaaacacgcuuguuaaacaacuuagcuccaauuuuggugcaauuucaaguguuuuaaaugauauccuuucacgucuugacaaaguugaggcugaagugcaaauugauagguugaucacaggcagacuucaaaguuugcagacauaugugacucaacaauuaauuagagcugcagaaaucagagcuucugcuaaucuugcugcuacuaaaaugucagaguguguacuuggacaaucaaaaagaguugauuuuuguggaaagggcuaucaucuuauguccuucccucagucagcaccucaugguguagucuucuugcaugugacuuaugucccugcacaagaaaagaacuucacaacugcuccugccauuugucaugauggaaaagcacacuuuccucgugaaggugucuuuguuucaaauggcacacacugguuuguaacacaaaggaauuuuuaugaaccacaaaucauuacuacagacaacacauuugugucugguaacugugauguuguaauaggaauugucaacaacacaguuuaugauccuuugcaaccugaauuagacucauucaaggaggaguuagauaaauauuuuaagaaucauacaucaccagauguugauuuaggugacaucucuggcauuaaugcuucaguuguaaacauucaaaaagaaauugaccgccucaaugagguugccaagaauuuaaaugaaucucucaucgaucuccaagaacuuggaaaguaugagcaguauauaaaauggccaugguacauuuggcuagguuuuauagcuggcuugauugccauaguaauggugacaauuaugcuuugcuguaugaccaguugcuguaguugucucaagggcuguuguucuuguggauccugcugcaaauuugaugaagacgacucugagccagugcucaaaggagucaaauuacauuacacauaaggacuagucccuguucccagagcccacuuuuuuuucuuuuuuugaaauaaaauagccugucuuucagaucucaaaggcucuuuucagagccaccaaaaaaaaaaaaaaaaaaaaaaaaaaaaaaaaaaaaaaaaaaaaaaaaaaaaaaaaaaaaaaaaaaaaaaaaaaaaaaaaaaaaaaaaaaaaaaaaaaaaa

SEQ ID NO: 12248 - RNA, 4094 nt, Artificial Sequence
  SARS-CoV-2/USA/WA-UW291/2020__EPI_ISL_418076 spike protein mRNA wt (1-1273)
aggagagucccgcagucggcguccagcggcucugcuuguucgugugugugucguugcaggccuuauucaagcuuaccauguuuguuuuucuuguuuuauugccacuagucucuagucaguguguuaaucuuacaaccagaacucaauuacccccugcauacacuaauucuuucacacgugguguuuauuacccugacaaaguuuucagauccucaguuuuacauucaacucaggacuuguucuuaccuuucuuuuccaauguuacuugguuccaugcuauacaugucucugggaccaaugguacuaagagguuugauaacccuguccuaccauuuaaugaugguguuuauuuugcuuccacugagaagucuaacauaauaagaggcuggauuuuugguacuacuuuagauucgaagacccagucccuacuuauuguuaauaacgcuacuaauguuguuauuaaagucugugaauuucaauuuuguaaugauccauuuuuggguguuuauuaccacaaaaacaacaaaaguuggauggaaagugaguucagaguuuauucuagugcgaauaauugcacuuuugaauaugucucucagccuuuucuuauggaccuugaaggaaaacaggguaauuucaaaaaucuuagggaauuuguguuuaagaauauugaugguuauuuuaaaauauauucuaagcacacgccuauuaauuuagugcgugaucucccucaggguuuuucggcuuuagaaccauugguagauuugccaauagguauuaacaucacuagguuucaaacuuuacuugcuuuacauagaaguuauuugacuccuggugauucuucuucagguuggacagcuggugcugcagcuuauuauguggguuaucuucaaccuaggacuuuucuauuaaaauauaaugaaaauggaaccauuacagaugcuguagacugugcacuugacccucucucagaaacaaaguguacguugaaauccuucacuguagaaaaaggaaucuaucaaacuucuaacuuuagaguccaaccaacagaaucuauuguuagauuuccuaauauuacaaacuugugcccuuuuggugaaguuuuuaacgccaccagauuugcaucuguuuaugcuuggaacaggaagagaaucagcaacuguguugcugauuauucuguccuauauaauuccgcaucauuuuccacuuuuaaguguuauggagugucuccuacuaaauuaaaugaucucugcuuuacuaaugucuaugcagauucauuuguaauuagaggugaugaagucagacaaaucgcuccagggcaaacuggaaagauugcugauuauaauuauaaauuaccagaugauuuuacaggcugcguuauagcuuggaauucuaacaaucuugauucuaagguuggugguaauuauaauuaccuguauagauuguuuaggaagucuaaucucaaaccuuuugagagagauauuucaacugaaaucuaucaggccgguagcacaccuuguaaugguguugaagguuuuaauuguuacuuuccuuuacaaucauaugguuuccaacccacuaaugguguugguuaccaaccauacagaguaguaguacuuucuuuugaacuucuacaugcaccagcaacuguuuguggaccuaaaaagucuacuaauuugguuaaaaacaaaugugucaauuucaacuucaaugguuuaacaggcacagguguucuuacugagucuaacaaaaaguuucugccuuuccaacaauuuggcagagacauugcugacacuacugaugcuguccgugauccacagacacuugagauucuugacauuacaccauguucuuuugguggugucaguguuauaacaccaggaacaaauacuucuaaccagguugcuguucuuuaucaggguguuaacugcacagaagucccuguugcuauucaugcagaucaacuuacuccuacuuggcguguuuauucuacagguucuaauguuuuucaaacacgugcaggcuguuuaauaggggcugaacaugucaacaacucauaugagugugacauacccauuggugcagguauaugcgcuaguuaucagacucagacuaauucuccucggcgggcacguaguguagcuagucaauccaucauugccuacacuaugucacuuggugcagaaaauucaguugcuuacucuaauaacucuauugccauacccacaaauuuuacuauuaguguuaccacagaaauucuaccagugucuaugaccaagacaucaguagauuguacaauguacauuuguggugauucaacugaaugcagcaaucuuuuguugcaauauggcaguuuuuguacacaauuaaaccgugcuuuaacuggaauagcuguugaacaagacaaaaacacccaagaaguuuuugcacaagucaaacaaauuuacaaaacaccaccaauuaaagauuuuggugguuuuaauuuuucacaaauauuaccagauccaucaaaaccaagcaagaggucauuuauugaagaucuacuuuucaacaaagugacacuugcagaugcuggcuucaucaaacaauauggugauugccuuggugauauugcugcuagagaccucauuugugcacaaaaguuuaacggccuuacuguuuugccaccuuugcucacagaugaaaugauugcucaauacacuucugcacuguuagcggguacaaucacuucugguuggaccuuuggugcaggugcugcauuacaaauaccauuugcuaugcaaauggcuuauagguuuaaugguauuggaguuacacagaauguucucuaugagaaccaaaaauugauugccaaccaauuuaauagugcuauuggcaaaauucaauacucacuuucuuccacagcaagugcacuuggaaaacuucaagauguggucaaccaaaaugcacaagcuuuaaacacgcuuguuaaacaacuuagcuccaauuuuggugcaauuucaaguguuuuaaaugauauccuuucacgucuugacaaaguugaggcugaagugcaaauugauagguugaucacaggcagacuucaaaguuugcagacauaugugacucaacaauuaauuagagcugcagaaaucagagcuucugcuaaucuugcugcuacuaaaaugucagaguguguacuuggacaaucaaaaagaguugauuuuuguggaaagggcuaucaucuuauguccuucccucagucagcaccucaugguguagucuucuugcaugugacuuaugucccugcacaagaaaagaacuucacaacugcuccugccauuugucaugauggaaaagcacacuuuccucgugaaggugucuuuguuucaaauggcacacacugguuuguaacacaaaggaauuuuuaugaaccacaaaucauuacuacagacaacacauuugugucugguaacugugauguuguaauaggaauugucaacaacacaguuuaugauccuuugcaaccugaauuagacucauucaaggaggaguuagauaaauauuuuaagaaucauacaucaccagauguugauuuaggugacaucucuggcauuaaugcuucaguuguaaacauucaaaaagaaauugaccgccucaaugagguugccaagaauuuaaaugaaucucucaucgaucuccaagaacuuggaaaguaugagcaguauauaaaauggccaugguacauuuggcuagguuuuauagcuggcuugauugccauaguaauggugacaauuaugcuuugcuguaugaccaguugcuguaguugucucaagggcuguuguucuuguggauccugcugcaaauuugaugaagacgacucugagccagugcucaaaggagucaaauuacauuacacauaaggacuagucccuguucccagagcccacuuuuuuuucuuuuuuugaaauaaaauagccugucuuucagaucucaaaggcucuuuucagagccaccaaaaaaaaaaaaaaaaaaaaaaaaaaaaaaaaaaaaaaaaaaaaaaaaaaaaaaaaaaaaaaaaaaaaaaaaaaaaaaaaaaaaaaaaaaaaaaaaaaaaa

SEQ ID NO: 12249 - RNA, 4094 nt, Artificial Sequence
  SARS-CoV-2/Portugal/PT0034/2020__EPI_ISL_418019 spike protein mRNA wt (1-1273)
aggagagucccgcagucggcguccagcggcucugcuuguucgugugugugucguugcaggccuuauucaagcuuaccauguuuguuuuucuuguuuuauugccacuagucucuagucaguguguuaaucuuacaaccagaacucaauuacccccugcauacacuaauucuuucacacgugguguuuauuacccugacaaaguuuucagauccucaguuuuacauucaacucaggacuuguucuuaccuuucuuuuccaauguuacuugguuccaugcuauacaugucucugggaccaaugguacuaagagguuugauaacccuguccuaccauuuaaugaugguguuuauuuugcuuccacugagaagucuaacauaauaagaggcuggauuuuugguacuacuuuagauucgaagacccagucccuacuuauuguuaauaacgcuacuaauguuguuauuaaagucugugaauuucaauuuuguaaugauccauuuuuggguguuuauuaccacaaaaacaacaaaaguuggauggaaagugaguucagaguuuauucuagugcgaauaauugcacuuuugaauaugucucucagccuuuucuuauggaccuugaaggaaaacaggguaauuucaaaaaucuuagggaauuuguguuuaagaauauugaugguuauuuuaaaauauauucuaagcacacgccuauuaauuuagugcgugaucucccucaggguuuuucggcuuuagaaccauugguagauuugccaauagguauuaacaucacuagguuucaaacuuuacuugcuuuacauagaaguuauuugacuccuggugauucuucuucagguuggacagcuggugcugcagcuuauuauguggguuaucuucaaccuaggacuuuucuauuaaaauauaaugaaaauggaaccauuacagaugcuguagacugugcacuugacccucucucagaaacaaaguguacguugaaauccuucacuguagaaaaaggaaucuaucaaacuucuaacuuuagaguccaaccaacagaaucuauuguuagauuuccuaauauuacaaacuugugcccuuuuggugaaguuuuuaacgccaccagauuugcaucuguuuaugcuuggaacaggaagagaaucagcaacuguguugcugauuauucuguccuauauaauuccgcaucauuuuccacuuuuaaguguuauggagugucuccuacuaaauuaaaugaucucugcuuuacuaaugucuaugcagauucauuuguaauuagaggugaugaagucagacaaaucgcuccagggcaaacuggaaagauugcugauuauaauuauaaauuaccagaugauuuuacaggcugcguuauagcuuggaauucuaacaaucuugauucuaagguuggugguaauuauaauuaccuguauagauuguuuaggaagucuaaucucaaaccuuuugagagagauauuucaacugaaaucuaucaggccgguagcacaccuuguaaugguguugaagguuuuaauuguuacuuuccuuuacaaucauaugguuuccaacccacuaaugguguugguuaccaaccauacagaguaguaguacuuucuuuugaacuucuacaugcaccagcaacuguuuguggaccuaaaaagucuacuaauuugguuaaaaacaaaugugucaauuucaacuucaaugguuuaacaggcacagguguucuuacugagucuaacaaaaaguuucugccuuuccaacaauuuggcagagacauugcugacacuacugaugcuguccgugauccacagacacuugagauucuugacauuacaccauguucuuuugguggugucaguguuauaacaccaggaacaaauacuucuaaccagguugcuguucuuuaucaggguguuaacugcacagaagucccuguugcuauucaugcagaucaacuuacuccuacuuggcguguuuauucuacagguucuaauguuuuucaaacacgugcaggcuguuuaauaggggcugaacaugucaacaacucauaugagugugacauacccauuggugcagguauaugcgcuaguuaucagacucagacuaauucuccucggcgggcacguaguguagcuagucaauccaucauugccuacacuaugucacuuggugcagaaaauucaguugcuuacucuaauaacucuauugccauacccacaaauuuuacuauuaguguuaccacagaaauucuaccagugucuaugaccaagacaucaguagauuguacaauguacauuuguggugauucaacugaaugcagcaaucuuuuguugcaauauggcaguuuuuguacacaauuaaaccgugcuuuaacuggaauagcuguugaacaagacaaaaacacccaagaaguuuuugcacaagucaaacaaauuuacaaaacaccaccaauuaaagauuuuggugguuuuaauuuuucacaaauauuaccagauccaucaaaaccaagcaagaggucauuuauugaagaucuacuuuucaacaaagugacacuugcagaugcuggcuucaucaaacaauauggugauugccuuggugauauugcugcuagagaccucauuugugcacaaaaguuuaacggccuuacuguuuugccaccuuugcucacagaugaaaugauugcucaauacacuucugcacuguuagcggguacaaucacuucugguuggaccuuuggugcaggugcugcauuacaaauaccauuugcuaugcaaauggcuuauagguuuaaugguauuggaguuacacagaauguucucuaugagaaccaaaaauugauugccaaccaauuuaauagugcuauuggcaaaauucaagacucacuuucuuccacagcaagugcacuuggaaaacuucaagauguggucaaccaaaaugcacaagcuuuaaacacgcuuguuaaacaacuuagcuccaauuuuggugcaauuucaaguguuuuaaaugauauccuuucacgucuugacaaaguugaggcugaagugcaaauugauagguugaucacaggcagacuucaaaguuugcagacauaugugacucaacaauuaauuagagcugcagaaaucagagcuucugcuaaucuugcugcuacuaaaaugucagaguguguacuuggacaaucaaaaagaguugauuuuuguggaaagggcuaucaucuuauguccuucccucagucagcaccucaugguguagucuucuugcaugugacuuaugucccugcacaagaaaagaacuucacaacugcuccugccauuugucaugauggaaaagcacacuuuccucgugaaggugucuuuguuucaaauggcacacacugguuuguaacacaaaggaauuuuuaugaaccacaaaucauuacuacagacaacacauuugugucugguaacugugauguuguaauaggaauugucaacaacacaguuuaugauccuuugcaaccugaauuagacucauucaaggaggaguuagauaaauauuuuaagaaucauacaucaccagauguugauuuaggugacaucucuggcauuaaugcuucaguuguaaacauucaaaaagaaauugaccgccucaaugagguugccaagaauuuaaaugaaucucucaucgaucuccaagaacuuggaaaguaugagcaguauauaaaauggccaugguacauuuggcuagguuuuauagcuggcuugauugccauaguaauggugacaauuaugcuuugcuguauuaccaguugcuguaguugucucaagggcuguuguucuuguggauccugcugcaaauuugaugaagacgacucugagccagugcucaaaggagucaaauuacauuacacauaaggacuagucccuguucccagagcccacuuuuuuuucuuuuuuugaaauaaaauagccugucuuucagaucucaaaggcucuuuucagagccaccaaaaaaaaaaaaaaaaaaaaaaaaaaaaaaaaaaaaaaaaaaaaaaaaaaaaaaaaaaaaaaaaaaaaaaaaaaaaaaaaaaaaaaaaaaaaaaaaaaaaa

SEQ ID NO: 12250 - RNA, 4094 nt, Artificial Sequence
  SARS-CoV-2/Iceland/202/2020__EPI_ISL_417750 spike protein mRNA wt (1-1273)
aggagagucccgcagucggcguccagcggcucugcuuguucgugugugugucguugcaggccuuauucaagcuuaccauguuuguuuuucuuguuuuauugccacuagucucuagucaguguguuaaucuuacaaccagaacucaauuacccccugcauacacuaauucuuucacacgugguguuuauuacccugacaaaguuuucagauccucaguuuuacauucaacucaggacuuguucuuaccuuucuuuuccaauguuacuugguuccaugcuauacaugucucugggaccaaugguacuaagagguuugauaacccuguccuaccauuuaaugaugguguuuauuuugcuuccacugagaagucuaacauaauaagaggcuggauuuuugguacuacuuuagauucgaagacccagucccuacuuauuguuaauaacgcuacuaauguuguuauuaaagucugugaauuucaauuuuguaaugauccauuuuuggguguuuauuaccacaaaaacaacaaaaguuggauggaaagugaguucagaguuuauucuagugcgaauaauugcacuuuugaauaugucucucagccuuuucuuauggaccuugaaggaaaacaggguaauuucaaaaaucuuagggaauuuguguuuaagaauauugaugguuauuuuaaaauauauucuaagcacacgccuauuaauuuagugcgugaucucccucaggguuuuucggcuuuagaaccauugguagauuugccaauagguauuaacaucacuagguuucaaacuuuacuugcuuuacauagaaguuauuugacuccuggugauucuucuucagguuggacagcuggugcugcagcuuauuauguggguuaucuucaaccuaggacuuuucuauuaaaauauaaugaaaauggaaccauuacagaugcuguagacugugcacuugacccucucucagaaacaaaguguacguugaaauccuucacuguagaaaaaggaaucuaucaaacuucuaacuuuagaguccaaccaacagaaucuauuguuagauuuccuaauauuacaaacuugugcccuuuuggugaaguuuuuaacgccaccagauuugcaucuguuuaugcuuggaacaggaagagaaucagcaacuguguugcugauuauucuguccuauauaauuccgcaucauuuuccacuuuuaaguguuauggagugucuccuacuaaauuaaaugaucucugcuuuacuaaugucuaugcagauucauuuguaauuagaggugaugaagucagacaaaucgcuccagggcaaacuggaaagauugcugauuauaauuauaaauuaccagaugauuuuacaggcugcguuauagcuuggaauucuaacaaucuugauucuaagguuggugguaauuauaauuaccuguauagauuguuuaggaagucuaaucucaaaccuuuugagagagauauuucaacugaaaucuaucaggccgguagcacaccuuguaaugguguugaagguuuuaauuguuacuuuccuuuacaaucauaugguuuccaacccacuaaugguguugguuaccaaccauacagaguaguaguacuuucuuuugaacuucuacaugcaccagcaacuguuuguggaccuaaaaagucuacuaauuugguuaaaaacaaaugugucaauuucaacuucaaugguuuaacaggcacagguguucuuacugagucuaacaaaaaguuucugccuuuccaacaauuuggcagagacauugcugacacuacugaugcuguccgugauccacagacacuugagauucuugacauuacaccauguucuuuugguggugucaguguuauaacaccaggaacaaauacuucuaaccagguugcuguucuuuaucaggauguuaacugcacagaagucccuguugcuauucaugcagaucaacuuacuccuacuuggcguguuuauucuacagguucuaauguuuuucaaacacgugcaggcuguuuaauaggggcugaacaugucaacaacucauaugagugugacauacccauuggugcagguauaugcgcuaguuaucagacucagacuaauucuccucggcgggcacguaguguagcuagucaauccaucauugccuacacuaugucacuuggugcagaaaauucaguugcuuacucuaauaacucuauugccauacccacaaauuuuacuauuaguguuaccacagaaauucuaccagugucuaugaccaagacaucaguagauuguacaauguacauuuguggugauucaacugaaugcagcaaucuuuuguugcaauauggcaguuuuuguacacaauuaaaccgugcuuuaacuggaauagcuguugaacaagacaaaaacacccaagaaguuuuugcacaagucaaacaaauuuacaaaacaccaccaauuaaagauuuuggugguuuuaauuuuucacaaauauuaccagauccaucaaaaccaagcaagaggucauuuauugaagaucuacuuuucaacaaagugacacuugcagaugcuggcuucaucaaacaauauggugauugccuuggugauauugcugcuagagaccucauuugugcacaaaaguuuaacggccuuacuguuuugccaccuuugcucacagaugaaaugauugcucaauacacuucugcacuguuagcggguacaaucacuucugguuggaccuuuggugcaggugcugcauuacaaauaccauuugcuaugcaaauggcuuauagguuuaaugguauuggaguuacacagaauguucucuaugagaaccaaaaauugauugccaaccaauuuaauagugcuauuggcaaaauucaagacucacuuucuuccacagcaagugcacuuggaaaacuucaagauguggucaaccaaaaugcacaagcuuuaaacacgcuuguuaaacaacuuagcuccaauuuuggugcaauuucaaguguuuuaaaugauauccuuucacgucuugacaaaguugaggcugaagugcaaauugauagguugaucacaggcagacuucaaaguuugcagacauaugugacucaacaauuaauuagagcugcagaaaucagagcuucugcuaaucuugcugcuacuaaaaugucagaguguguacuuggacaaucaaaaagaguugauuuuuguggaaagggcuaucaucuuauguccuucccucagucagcaccucaugguguagucuucuugcaugugacuuaugucccugcacaagaaaagaacuucacaacugcuccugccauuugucaugauggaaaagcacacuuuccucgugaaggugucuuuguuucaaauggcacacacugguuuguaacacaaaggaauuuuuaugaaccacaaaucauuacuacagacaacacauuugugucugguaacugugauguuguaauaggaauugucaacaacacaguuuaugauccuuugcaaccugaauuagacucauucaaggaggaguuagauaaauauuuuaagaaucauacaucaccagauguugauuuaggugacaucccuggcauuaaugcuucaguuguaaacauucaaaaagaaauugaccgccucaaugagguugccaagaauuuaaaugaaucucucaucgaucuccaagaacuuggaaaguaugagcaguauauaaaauggccaugguacauuuggcuagguuuuauagcuggcuugauugccauaguaauggugacaauuaugcuuugcuguaugaccaguugcuguaguugucucaagggcuguuguucuuguggauccugcugcaaauuugaugaagacgacucugagccagugcucaaaggagucaaauuacauuacacauaaggacuagucccuguucccagagcccacuuuuuuuucuuuuuuugaaauaaaauagccugucuuucagaucucaaaggcucuuuucagagccaccaaaaaaaaaaaaaaaaaaaaaaaaaaaaaaaaaaaaaaaaaaaaaaaaaaaaaaaaaaaaaaaaaaaaaaaaaaaaaaaaaaaaaaaaaaaaaaaaaaaaa

SEQ ID NO: 12251 - RNA, 4094 nt, Artificial Sequence
  SARS-CoV-2/USA/WA-UW261/2020__EPI_ISL_418046 spike protein mRNA wt (1-1273)
aggagagucccgcagucggcguccagcggcucugcuuguucgugugugugucguugcaggccuuauucaagcuuaccauguuuguuuuucuuguuuuauugccacuagucucuagucaguguguuaaucuuacaaccagaacucaauuacccccugcauacacuaauucuuucacacgugguguuuauuacccugacaaaguuuucagauccucaguuuuacauucaacucaggacuuguucuuaccuuucuuuuccaauguuacuugguuccaugcuauacaugucucugggaccaaugguacuaagagguuugauaacccuguccuaccauuuaaugaugguguuuauuuugcuuccacugagaagucuaacauaauaagaggcuggauuuuugguacuacuuuagauucgaagacccagucccuacuuauuguuaauaacgcuacuaauguuguuauuaaagucugugaauuucaauuuuguaaugauccauuuuuggguguuuauuaccacaaaaacaacaaaaguuggauggaaagugaguucagaguuuauucuagugcgaauaauugcacuuuugaauaugucucucagccuuuucuuauggaccuugaaggaaaacaggguaauuucaaaaaucuuagggaauuuguguuuaagaauauugaugguuauuuuaaaauauauucuaagcacacgccuauuaauuuagugcgugaucucccucaggguuuuucggcuuuagaaccauugguagauuugccaauagguauuaacaucacuagguuucaaacuuuacuugcuuuacauagaaguuauuugacuccuggugauucuucuucagguuggacagcuggugcugcagcuuauuauguggguuaucuucaaccuaggacuuuucuauuaaaauauaaugaaaauggaaccauuacagaugcuguagacugugcacuugacccucucucagaaacaaaguguacguugaaauccuucacuguagaaaaaggaaucuaucaaacuucuaacuuuagaguccaaccaacagaaucuauuguuagauuuccuaauauuacaaacuugugcccuuuuggugaaguuuuuaacgccaccagauuuacaucuguuuaugcuuggaacaggaagagaaucagcaacuguguugcugauuauucuguccuauauaauuccgcaucauuuuccacuuuuaaguguuauggagugucuccuacuaaauuaaaugaucucugcuuuacuaaugucuaugcagauucauuuguaauuagaggugaugaagucagacaaaucgcuccagggcaaacuggaaagauugcugauuauaauuauaaauuaccagaugauuuuacaggcugcguuauagcuuggaauucuaacaaucuugauucuaagguuggugguaauuauaauuaccuguauagauuguuuaggaagucuaaucucaaaccuuuugagagagauauuucaacugaaaucuaucaggccgguagcacaccuuguaaugguguugaagguuuuaauuguuacuuuccuuuacaaucauaugguuuccaacccacuaaugguguugguuaccaaccauacagaguaguaguacuuucuuuugaacuucuacaugcaccagcaacuguuuguggaccuaaaaagucuacuaauuugguuaaaaacaaaugugucaauuucaacuucaaugguuuaacaggcacagguguucuuacugagucuaacaaaaaguuucugccuuuccaacaauuuggcagagacauugcugacacuacugaugcuguccgugauccacagacacuugagauucuugacauuacaccauguucuuuugguggugucaguguuauaacaccaggaacaaauacuucuaaccagguugcuguucuuuaucaggauguuaacugcacagaagucccuguugcuauucaugcagaucaacuuacuccuacuuggcguguuuauucuacagguucuaauguuuuucaaacacgugcaggcuguuuaauaggggcugaacaugucaacaacucauaugagugugacauacccauuggugcagguauaugcgcuaguuaucagacucagacuaauucuccucggcgggcacguaguguagcuagucaauccaucauugccuacacuaugucacuuggugcagaaaauucaguugcuuacucuaauaacucuauugccauacccacaaauuuuacuauuaguguuaccacagaaauucuaccagugucuaugaccaagacaucaguagauuguacaauguacauuuguggugauucaacugaaugcagcaaucuuuuguugcaauauggcaguuuuuguacacaauuaaaccgugcuuuaacuggaauagcuguugaacaagacaaaaacacccaagaaguuuuugcacaagucaaacaaauuuacaaaacaccaccaauuaaagauuuuggugguuuuaauuuuucacaaauauuaccagauccaucaaaaccaagcaagaggucauuuauugaagaucuacuuuucaacaaagugacacuugcagaugcuggcuucaucaaacaauauggugauugccuuggugauauugcugcuagagaccucauuugugcacaaaaguuuaacggccuuacuguuuugccaccuuugcucacagaugaaaugauugcucaauacacuucugcacuguuagcggguacaaucacuucugguuggaccuuuggugcaggugcugcauuacaaauaccauuugcuaugcaaauggcuuauagguuuaaugguauuggaguuacacagaauguucucuaugagaaccaaaaauugauugccaaccaauuuaauagugcuauuggcaaaauucaagacucacuuucuuccacagcaagugcacuuggaaaacuucaagauguggucaaccaaaaugcacaagcuuuaaacacgcuuguuaaacaacuuagcuccaauuuuggugcaauuucaaguguuuuaaaugauauccuuucacgucuugacaaaguugaggcugaagugcaaauugauagguugaucacaggcagacuucaaaguuugcagacauaugugacucaacaauuaauuagagcugcagaaaucagagcuucugcuaaucuugcugcuacuaaaaugucagaguguguacuuggacaaucaaaaagaguugauuuuuguggaaagggcuaucaucuuauguccuucccucagucagcaccucaugguguagucuucuugcaugugacuuaugucccugcacaagaaaagaacuucacaacugcuccugccauuugucaugauggaaaagcacacuuuccucgugaaggugucuuuguuucaaauggcacacacugguuuguaacacaaaggaauuuuuaugaaccacaaaucauuacuacagacaacacauuugugucugguaacugugauguuguaauaggaauugucaacaacacaguuuaugauccuuugcaaccugaauuagacucauucaaggaggaguuagauaaauauuuuaagaaucauacaucaccagauguugauuuaggugacaucucuggcauuaaugcuucaguuguaaacauucaaaaagaaauugaccgccucaaugagguugccaagaauuuaaaugaaucucucaucgaucuccaagaacuuggaaaguaugagcaguauauaaaauggccaugguacauuuggcuagguuuuauagcuggcuugauugccauaguaauggugacaauuaugcuuugcuguaugaccaguugcuguaguugucucaagggcuguuguucuuguggauccugcugcaaauuugaugaagacgacucugagccagugcucaaaggagucaaauuacauuacacauaaggacuagucccuguucccagagcccacuuuuuuuucuuuuuuugaaauaaaauagccugucuuucagaucucaaaggcucuuuucagagccaccaaaaaaaaaaaaaaaaaaaaaaaaaaaaaaaaaaaaaaaaaaaaaaaaaaaaaaaaaaaaaaaaaaaaaaaaaaaaaaaaaaaaaaaaaaaaaaaaaaaaa

SEQ ID NO: 12252 - RNA, 4094 nt, Artificial Sequence
  SARS-CoV-2/Portugal/PT0035/2020__EPI_ISL_418020 spike protein mRNA wt (1-1273)
aggagagucccgcagucggcguccagcggcucugcuuguucgugugugugucguugcaggccuuauucaagcuuaccauguuuguuuuucuuguuuuauugccacuagucucuagucaguguguuaaucuuacaaccagaacucaauuacccccugcauacacuaauucuuucacacgugguguuuauuacccugacaaaguuuucagauccucaguuuuacauucaacucaggacuuguucuuaccuuucuuuuccaauguuacuugguuccaugcuauacaugucucugggaccaaugguacuaagagguuugauaacccuguccuaccauuuaaugaugguguuuauuuugcuuccacugagaagucuaacauaauaagaggcuggauuuuugguacuacuuuagauucgaagacccagucccuacuuauuguuaauaacgcuacuaauguuguuauuaaagucugugaauuucaauuuuguaaugauccauuuuuggguguuuauuaccacaaaaacaacaaaaguuggauggaaagugaguucagaguuuauucuagugcgaauaauugcacuuuugaauaugucucucagccuuuucuuauggaccuugaaggaaaacaggguaauuucaaaaaucuuagggaauuuguguuuaagaauauugaugguuauuuuaaaauauauucuaagcacacgccuauuaauuuagugcgugaucucccucaggguuuuucggcuuuagaaccauugguagauuugccaauagguauuaacaucacuagguuucaaacuuuacuugcuuuacauagaaguuauuugacuccuggugauucuucuucagguuggacagcuggugcugcagcuuauuauguggguuaucuucaaccuaggacuuuucuauuaaaauauaaugaaaauggaaccauuacagaugcuguagacugugcacuugacccucucucagaaacaaaguguacguugaaauccuucacuguagaaaaaggaaucuaucaaacuucuaacuuuagaguccaaccaacagaaucuauuguuagauuuccuaauauuacaaacuugugcccuuuuggugaaguuuuuaacgccaccagauuugcaucuguuuaugcuuggaacaggaagagaaucagcaacuguguugcugauuauucuguccuauauaauuccgcaucauuuuccacuuuuaaguguuauggagugucuccuacuaaauuaaaugaucucugcuuuacuaaugucuaugcagauucauuuguaauuagaggugaugaagucagacaaaucgcuccagggcaaacuggaaagauugcugauuauaauuauaaauuaccagaugauuuuacaggcugcguuauagcuuggaauucuaacaaucuugauucuaagguuggugguaauuauaauuaccuguauagauuguuuaggaagucuaaucucaaaccuuuugagagagauauuucaacugaaaucuaucaggccgguagcacaccuuguaaugguguugaagguuuuaauuguuacuuuccuuuacaaucauaugguuuccaacccacuaaugguguugguuaccaaccauacagaguaguaguacuuucuuuugaacuucuacaugcaccagcaacuguuuguggaccuaaaaagucuacuaauuugguuaaaaacaaaugugucaauuucaacuucaaugguuuaacaggcacagguguucuuacugagucuaacaaaaaguuucugccuuuccaacaauuuggcagagacauugcugacacuacugaugcuguccgugauccacagacacuugagauucuugacauuacaccauguucuuuugguggugucaguguuauaacaccaggaacaaauacuucuaaccagguugcuguucuuuaucaggauguuaacugcacagaagucccuguugcuauucaugcagaucaacuuacuccuacuuggcguguuuauucuacagguucuaauguuuuucaaacacgugcaggcuguuuaauaggggcugaacaugucaacaacucauaugagugugacauacccauuggugcagguauaugcgcuaguuaucagacucagacuaauucuccucggcgggcacguaguguagcuagucaauccaucauugccuacacuaugucacuuggugcagaaaauucaguugcuuacucuaauaacucuauugccauacccacaaauuuuacuauuaguguuaccacagaaauucuaccagugucuaugaccaagacaucaguagauuguacaauguacauuuguggugauucaacugaaugcagcaaucuuuuguugcaauauggcaguuuuuguacacaauuaaaccgugcuuuaacuggaauagcuguugaacaagacaaaaacacccaagaaguuuuugcacaagucaaacaaauuuacaaaacaccaccaauuaaagauuuuggugguuuuaauuuuucacaaauauuaccagauccaucaaaaccaagcaagaggucauuuauugaagaucuacuuuucaacaaagugacacuugcagaugcuggcuucaucaaacaauauggugauugccuuggugauauuucugcuagagaccucauuugugcacaaaaguuuaacggccuuacuguuuugccaccuuugcucacagaugaaaugauugcucaauacacuucugcacuguuagcggguacaaucacuucugguuggaccuuuggugcaggugcugcauuacaaauaccauuugcuaugcaaauggcuuauagguuuaaugguauuggaguuacacagaauguucucuaugagaaccaaaaauugauugccaaccaauuuaauagugcuauuggcaaaauucaagacucacuuucuuccacagcaagugcacuuggaaaacuucaagauguggucaaccaaaaugcacaagcuuuaaacacgcuuguuaaacaacuuagcuccaauuuuggugcaauuucaaguguuuuaaaugauauccuuucacgucuugacaaaguugaggcugaagugcaaauugauagguugaucacaggcagacuucaaaguuugcagacauaugugacucaacaauuaauuagagcugcagaaaucagagcuucugcuaaucuugcugcuacuaaaaugucagaguguguacuuggacaaucaaaaagaguugauuuuuguggaaagggcuaucaucuuauguccuucccucagucagcaccucaugguguagucuucuugcaugugacuuaugucccugcacaagaaaagaacuucacaacugcuccugccauuugucaugauggaaaagcacacuuuccucgugaaggugucuuuguuucaaauggcacacacugguuuguaacacaaaggaauuuuuaugaaccacaaaucauuacuacagacaacacauuugugucugguaacugugauguuguaauaggaauugucaacaacacaguuuaugauccuuugcaaccugaauuagacucauucaaggaggaguuagauaaauauuuuaagaaucauacaucaccagauguugauuuaggugacaucucuggcauuaaugcuucaguuguaaacauucaaaaagaaauugaccgccucaaugagguugccaagaauuuaaaugaaucucucaucgaucuccaagaacuuggaaaguaugagcaguauauaaaauggccaugguacauuuggcuagguuuuauagcuggcuugauugccauaguaauggugacaauuaugcuuugcuguaugaccaguugcuguaguugucucaagggcuguuguucuuguggauccugcugcaaauuugaugaagacgacucugagccagugcucaaaggagucaaauuacauuacacauaaggacuagucccuguucccagagcccacuuuuuuuucuuuuuuugaaauaaaauagccugucuuucagaucucaaaggcucuuuucagagccaccaaaaaaaaaaaaaaaaaaaaaaaaaaaaaaaaaaaaaaaaaaaaaaaaaaaaaaaaaaaaaaaaaaaaaaaaaaaaaaaaaaaaaaaaaaaaaaaaaaaaa

SEQ ID NO: 12253 - RNA, 4094 nt, Artificial Sequence
  SARS-CoV-2/USA/NY-NYUMC7/2020__EPI_ISL_418192 spike protein mRNA wt (1-1273)
aggagagucccgcagucggcguccagcggcucugcuuguucgugugugugucguugcaggccuuauucaagcuuaccauguuuguuuuucuuguuuuauugccacuagucucuagucaguguguuaaucuuacaaccagaacucaauuacccccugcauacacuaauucuuucacacgugguguuuauuacccugacaaaguuuucagauccucaguuuuacauucaacucaggacuuguucuuaccuuucuuuuccaauguuacuugguuccaugcuauacaugucucugggaccaaugguacuaagagguuugauaacccuguccuaccauuuaaugaugguguuuauuuugcuuccacugagaagucuaacauaauaagaggcuggauuuuugguacuacuuuagauucgaagacccagucccuacuuauuguuaauaacgcuacuaauguuguuauuaaagucugugaauuucaauuuuguaaugauccauuuuuggguguuuaucaccacaaaaacaacaaaaguuggauggaaagugaguucagaguuuauucuagugcgaauaauugcacuuuugaauaugucucucagccuuuucuuauggaccuugaaggaaaacaggguaauuucaaaaaucuuagggaauuuguguuuaagaauauugaugguuauuuuaaaauauauucuaagcacacgccuauuaauuuagugcgugaucucccucaggguuuuucggcuuuagaaccauugguagauuugccaauagguauuaacaucacuagguuucaaacuuuacuugcuuuacauagaaguuauuugacuccuggugauucuucuucagguuggacagcuggugcugcagcuuauuauguggguuaucuucaaccuaggacuuuucuauuaaaauauaaugaaaauggaaccauuacagaugcuguagacugugcacuugacccucucucagaaacaaaguguacguugaaauccuucacuguagaaaaaggaaucuaucaaacuucuaacuuuagaguccaaccaacagaaucuauuguuagauuuccuaauauuacaaacuugugcccuuuuggugaaguuuuuaacgccaccagauuugcaucuguuuaugcuuggaacaggaagagaaucagcaacuguguugcugauuauucuguccuauauaauuccgcaucauuuuccacuuuuaaguguuauggagugucuccuacuaaauuaaaugaucucugcuuuacuaaugucuaugcagauucauuuguaauuagaggugaugaagucagacaaaucgcuccagggcaaacuggaaagauugcugauuauaauuauaaauuaccagaugauuuuacaggcugcguuauagcuuggaauucuaacaaucuugauucuaagguuggugguaauuauaauuaccuguauagauuguuuaggaagucuaaucucaaaccuuuugagagagauauuucaacugaaaucuaucaggccgguagcacaccuuguaaugguguugaagguuuuaauuguuacuuuccuuuacaaucauaugguuuccaacccacuaaugguguugguuaccaaccauacagaguaguaguacuuucuuuugaacuucuacaugcaccagcaacuguuuguggaccuaaaaagucuacuaauuugguuaaaaacaaaugugucaauuucaacuucaaugguuuaacaggcacagguguucuuacugagucuaacaaaaaguuucugccuuuccaacaauuuggcagagacauugcugacacuacugaugcuguccgugauccacagacacuugagauucuugacauuacaccauguucuuuugguggugucaguguuauaacaccaggaacaaauacuucuaaccagguugcuguucuuuaucaggguguuaacugcacagaagucccuguugcuauucaugcagaucaacuuacuccuacuuggcguguuuauucuacagguucuaauguuuuucaaacacgugcaggcuguuuaauaggggcugaacaugucaacaacucauaugagugugacauacccauuggugcagguauaugcgcuaguuaucagacucagacuaauucuccucggcgggcacguaguguagcuagucaauccaucauugccuacacuaugucacuuggugcagaaaauucaguugcuuacucuaauaacucuauugccauacccacaaauuuuacuauuaguguuaccacagaaauucuaccagugucuaugaccaagacaucaguagauuguacaauguacauuuguggugauucaacugaaugcagcaaucuuuuguugcaauauggcaguuuuuguacacaauuaaaccgugcuuuaacuggaauagcuguugaacaagacaaaaacacccaagaaguuuuugcacaagucaaacaaauuuacaaaacaccaccaauuaaagauuuuggugguuuuaauuuuucacaaauauuaccagauccaucaaaaccaagcaagaggucauuuauugaagaucuacuuuucaacaaagugacacuugcagaugcuggcuucaucaaacaauauggugauugccuuggugauauugcugcuagagaccucauuugugcacaaaaguuuaacggccuuacuguuuugccaccuuugcucacagaugaaaugauugcucaauacacuucugcacuguuagcggguacaaucacuucugguuggaccuuuggugcaggugcugcauuacaaauaccauuugcuaugcaaauggcuuauagguuuaaugguauuggaguuacacagaauguucucuaugagaaccaaaaauugauugccaaccaauuuaauagugcuauuggcaaaauucaagacucacuuucuuccacagcaagugcacuuggaaaacuucaagauguggucaaccaaaaugcacaagcuuuaaacacgcuuguuaaacaacuuagcuccaauuuuggugcaauuucaaguguuuuaaaugauauccuuucacgucuugacaaaguugaggcugaagugcaaauugauagguugaucacaggcagacuucaaaguuugcagacauaugugacucaacaauuaauuagagcugcagaaaucagagcuucugcuaaucuugcugcuacuaaaaugucagaguguguacuuggacaaucaaaaagaguugauuuuuguggaaagggcuaucaucuuauguccuucccucagucagcaccucaugguguagucuucuugcaugugacuuaugucccugcacaagaaaagaacuucacaacugcuccugccauuugucaugauggaaaagcacacuuuccucgugaaggugucuuuguuucaaauggcacacacugguuuguaacacaaaggaauuuuuaugaaccacaaaucauuacuacagacaacacauuugugucugguaacugugauguuguaauaggaauugucaacaacacaguuuaugauccuuugcaaccugaauuagacucauucaaggaggaguuagauaaauauuuuaagaaucauacaucaccagauguugauuuaggugacaucucuggcauuaaugcuucaguuguaaacauucaaaaagaaauugaccgccucaaugagguugccaagaauuuaaaugaaucucucaucgaucuccaagaacuuggaaaguaugagcaguauauaaaauggccaugguacauuuggcuagguuuuauagcuggcuugauugccauaguaauggugacaauuaugcuuugcuguaugaccaguugcuguaguugucucaagggcuguuguucuuguggauccugcugcaaauuugaugaagacgacucugagccagugcucaaaggagucaaauuacauuacacauaaggacuagucccuguucccagagcccacuuuuuuuucuuuuuuugaaauaaaauagccugucuuucagaucucaaaggcucuuuucagagccaccaaaaaaaaaaaaaaaaaaaaaaaaaaaaaaaaaaaaaaaaaaaaaaaaaaaaaaaaaaaaaaaaaaaaaaaaaaaaaaaaaaaaaaaaaaaaaaaaaaaaa

SEQ ID NO: 12254 - RNA, 4094 nt, Artificial Sequence
  SARS-CoV-2/Iceland/189/2020__EPI_ISL_417709 spike protein mRNA wt (1-1273)
aggagagucccgcagucggcguccagcggcucugcuuguucgugugugugucguugcaggccuuauucaagcuuaccauguuuguuuuucuuguuuuauugccacuagucucuagucaguguguuaaucuuacaaccagaacucaauuacccccugcauacacuaauucuuucacacgugguguuuauuacccugacaaaguuuucagauccucaguuuuacauucaacucaggacuuguucuuaccuuucuuuuccaauguuacuugguuccaugcuauacaugucucugggaccaaugguacuaagagguuugauaacccuguccuaccauuuaaugaugguguuuauuuugcuuccacugagaagucuaacauaauaagaggcuggauuuuugguacuacuuuagauucgaagacccagucccuacuuauuguuaauaacgcuacuaauguuguuauuaaagucugugaauuucaauuuuguaaugauccauuuuuggguguuuauuaccacaaaaacaacaaaaguuggauggaaagugaguucagaguuuauucuagugcgaauaauugcacuuuugaauaugucucucagccuuuucuuauggaccuugaaggaaaacaggguaauuucaaaaaucuuagggaauuuguguuuaagaauauugaugguuauuuuaaaauauauucuaagcacacgccuauuaauuuagugcgugaucucccucaggguuuuucggcuuuagaaccauugguagauuugccaauagguauuaacaucacuagguuucaaacuuuacuugcuuuacauagaaguuauuugacuccuggugauucuucuucagguuggacagcuggugcugcagcuuauuauguggguuaucuucaaccuaggacuuuucuauuaaaauauaaugaaaauggaaccauuacagaugcuguagacugugcacuugacccucucucagaaacaaaguguacguugaaauccuucacuguagaaaaaggaaucuaucaaacuucuaacuuuagaguccaaccaacagaaucuauuguuagauuuccuaauauuacaaacuugugcccuuuuggugaaguuuuuaacgccaccagauuugcaucuguuuaugcuuggaacaggaagagaaucagcaacuguguugcugauuauucuguccuauauaauuccgcaucauuuuccacuuuuaaguguuauggagugucuccuacuaaauuaaaugaucucugcuuuacuaaugucuaugcagauucauuuguaauuagaggugaugaagucagacaaaucgcuccagggcaaacuggaaagauugcugauuauaauuauaaauuaccagaugauuuuacaggcugcguuauagcuuggaauucuaacaaucuugauucuaagguuggugguaauuauaauuaccuguauagauuguuuaggaagucuaaucucaaaccuuuugagagagauauuucaacugaaaucuaucaggccgguagcacaccuuguaaugguguugaagguuuuaauuguuacuuuccuuuacaaucauaugguuuccaacccacuaaugguguugguuaccaaccauacagaguaguaguacuuucuuuugaacuucuacaugcaccagcaacuguuuguggaccuaaaaagucuacuaauuugguuaaaaacaaaugugucaauuucaacuucaaugguuuaacaggcacagguguucuuacugagucuaacaaaaaguuucugccuuuccaacaauuuggcagagacauugcugacacuacugaugcuguccgugauccacagacacuugagauucuugacauuacaccauguucuuuugguggugucaguguuauaacaccaggaacaaauacuucuaaccagguugcuguucuuuaucaggguguuaacugcacagaagucccuguugcuauucaugcagaucaacuuacuccuacuuggcguguuuauucuacagguucuaauguuuuucaaacacgugcaggcuguuuaauaggggcugaacaugucaacaacucauaugagugugacauacccauuggugcagguauaugcgcuaguuaucagacucagacuaauucuccucggcgggcacguaguguagcuagucaauccaucauugccuacacuaugucacuuggugcagaaaauucaguugcuuacucuaauaacucuauugccauacccacaaauuuuacuauuaguguuaccacagaaauucuaccagugucuaugaccaagacaucaguagauuguacaauguacauuuguggugauucaacugaaugcagcaaucuuuuguugcaauauggcaguuuuuguacacaauuaaaccgugcuuuaacuggaauagcuguugaacaagacaaaaacacccaagaaguuuuugcacaagucaaacaaauuuacaaaacaccaccaauuaaagauuuuggugguuuuaauuuuucacaaauauuaccagauccaucaaaaccaagcaagaggucauuuauugaagaucuacuuuucaacaaagugacacuugcagaugcuggcuucaccaaacaauauggugauugccuuggugauauugcugcuagagaccucauuugugcacaaaaguuuaacggccuuacuguuuugccaccuuugcucacagaugaaaugauugcucaauacacuucugcacuguuagcggguacaaucacuucugguuggaccuuuggugcaggugcugcauuacaaauaccauuugcuaugcaaauggcuuauagguuuaaugguauuggaguuacacagaauguucucuaugagaaccaaaaauugauugccaaccaauuuaauagugcuauuggcaaaauucaagacucacuuucuuccacagcaagugcacuuggaaaacuucaagauguggucaaccaaaaugcacaagcuuuaaacacgcuuguuaaacaacuuagcuccaauuuuggugcaauuucaaguguuuuaaaugauauccuuucacgucuugacaaaguugaggcugaagugcaaauugauagguugaucacaggcagacuucaaaguuugcagacauaugugacucaacaauuaauuagagcugcagaaaucagagcuucugcuaaucuugcugcuacuaaaaugucagaguguguacuuggacaaucaaaaagaguugauuuuuguggaaagggcuaucaucuuauguccuucccucagucagcaccucaugguguagucuucuugcaugugacuuaugucccugcacaagaaaagaacuucacaacugcuccugccauuugucaugauggaaaagcacacuuuccucgugaaggugucuuuguuucaaauggcacacacugguuuguaacacaaaggaauuuuuaugaaccacaaaucauuacuacagacaacacauuugugucugguaacugugauguuguaauaggaauugucaacaacacaguuuaugauccuuugcaaccugaauuagacucauucaaggaggaguuagauaaauauuuuaagaaucauacaucaccagauguugauuuaggugacaucucuggcauuaaugcuucaguuguaaacauucaaaaagaaauugaccgccucaaugagguugccaagaauuuaaaugaaucucucaucgaucuccaagaacuuggaaaguaugagcaguauauaaaauggccaugguacauuuggcuagguuuuauagcuggcuugauugccauaguaauggugacaauuaugcuuugcuguaugaccaguugcuguaguugucucaagggcuguuguucuuguggauccugcugcaaauuugaugaagacgacucugagccagugcucaaaggagucaaauuacauuacacauaaggacuagucccuguucccagagcccacuuuuuuuucuuuuuuugaaauaaaauagccugucuuucagaucucaaaggcucuuuucagagccaccaaaaaaaaaaaaaaaaaaaaaaaaaaaaaaaaaaaaaaaaaaaaaaaaaaaaaaaaaaaaaaaaaaaaaaaaaaaaaaaaaaaaaaaaaaaaaaaaaaaaa

SEQ ID NO: 12255 - RNA, 4094 nt, Artificial Sequence
  SARS-CoV-2/Australia/NSW56/2020__EPI_ISL_417408 spike protein mRNA wt (1-1273)
aggagagucccgcagucggcguccagcggcucugcuuguucgugugugugucguugcaggccuuauucaagcuuaccauguuuguuuuucuuguuuuauugccacuagucucuagucaguguguuaaucuuacaaccagaacucaauuacccccugcauacacuaauucuuucacacgugguguuuauuacccugacaaaguuuucagauccucaguuuuacauucaacucaggacuuguucuuaccuuucuuuuccaauguuacuugguuccaugcuauacaugucucugggaccaaugguacuaagagguuugauaacccuguccuaccauuuaaugaugguguuuauuuugcuuccacugagaagucuaacauaauaagaggcuggauuuuugguacuacuuuagauucgaagacccagucccuacuuauuguuaauaacgcuacuaauguuguuauuaaagucugugaauuucaauuuuguaaugauccauuuuuggguguuuauuaccacaaaaacaacaaaaguuggauggaaagugaguucagaguuuauucuagugcgaauaauugcacuuuugaauaugucucucagccuuuucuuauggaccuugaaggaaaacaggguaauuucaaaaaucuuagggaauuuguguuuaagaauauugaugguuauuuuaaaauauauucuaagcacacgccuauuaauuuagugcgugaucucccucaggguuuuucggcuuuagaaccauugguagauuugccaauagguauuaacaucacuagguuucaaacuuuacuugcuuuacauagaaguuauuugacuccuggugauucuucuucagguuggacagcuggugcugcagcuuauuauguggguuaucuucaaccuaggacuuuucuauuaaaauauaaugaaaauggaaccauuacagaugcuguagacugugcacuugacccucucucagaaacaaaguguacguugaaauccuucacuguagaaaaaggaaucuaucaaacuucuaacuuuagaguccaaccaacagaaucuauuguuagauuuccuaauauuacaaacuugugcccuuuuggugaaguuuuuaacgccaccagauuugcaucuguuuaugcuuggaacaggaagagaaucagcaacuguguugcugauuauucuguccuauauaauuccgcaucauuuuccacuuuuaaguguuauggagugucuccuacuaaauuaaaugaucucugcuuuacuaaugucuaugcagauucauuuguaauuagaggugaugaagucagacaaaucgcuccagggcaaacuggaaagauugcugauuauaauuauaaauuaccagaugauuuuacaggcugcguuauagcuuggaauucuaacaaucuugauucuaagguuggugguaauuauaauuaccuguauagauuguuuaggaagucuaaucucaaaccuuuugagagagauauuucaacugaaaucuaucaggccgguagcacaccuuguaaugguguugaagguuuuaauuguuacuuuccuuuacaaucauaugguuuccaacccacuaaugguguugguuaccaaccauacagaguaguaguacuuucuuuugaacuucuacaugcaccagcaacuguuuguggaccuaaaaagucuacuaauuugguuaaaaacaaaugugucaauuucaacuucaaugguuuaacaggcacagguguucuuacugagucuaacaaaaaguuucugccuuuccaacaauuuggcagagacauugcugacacuacugaugcuguccgugauccacagacacuugagauucuugacauuacaccauguucuuuugguggugucaguguuauaacaccaggaacaaauacuucuaaccagguugcuguucuuuaucaggauguuaacugcacagaagucccuguugcuauucaugcagaucaacuuacuccuacuuggcguguuuauucuacagguucuaauguuuuucaaacacgugcaggcuguuuaauaggggcugaacaugucaacaacucauaugagugugacauacccauuggugcagguauaugcgcuaguuaucagacucagacuaauucuccucggcgggcacguaguguagcuagucaauccaucauugccuacacuaugucacuuggugcagaaaauucaguugcuuacucuaauaacucuauugccauacccacaaauuuuacuauuaguguuaccacagaaauucuaccagugucuaugaccaagacaucaguagauuguacaauguacauuuguggugauucaacugaaugcagcaaucuuuuguugcaauauggcaguuuuuguacacaauuaaaccgugcuuuaacuggaauagcuguugaacaagacaaaaacacccaagaaguuuuugcacaagucaaacaaauuuacaaaacaccaccaauuaaagauuuuggugguuuuaauuuuucacaaauauuaccagauucaucaaaaccaagcaagaggucauuuauugaagaucuacuuuucaacaaagugacacuugcagaugcuggcuucaucaaacaauauggugauugccuuggugauauugcugcuagagaccucauuugugcacaaaaguuuaacggccuuacuguuuugccaccuuugcucacagaugaaaugauugcucaauacacuucugcacuguuagcggguacaaucacuucugguuggaccuuuggugcaggugcugcauuacaaauaccauuugcuaugcaaauggcuuauagguuuaaugguauuggaguuacacagaauguucucuaugagaaccaaaaauugauugccaaccaauuuaauagugcuauuggcaaaauucaagacucacuuucuuccacagcaagugcacuuggaaaacuucaagauguggucaaccaaaaugcacaagcuuuaaacacgcuuguuaaacaacuuagcuccaauuuuggugcaauuucaaguguuuuaaaugauauccuuucacgucuugacaaaguugaggcugaagugcaaauugauagguugaucacaggcagacuucaaaguuugcagacauaugugacucaacaauuaauuagagcugcagaaaucagagcuucugcuaaucuugcugcuacuaaaaugucagaguguguacuuggacaaucaaaaagaguugauuuuuguggaaagggcuaucaucuuauguccuucccucagucagcaccucaugguguagucuucuugcaugugacuuaugucccugcacaagaaaagaacuucacaacugcuccugccauuugucaugauggaaaagcacacuuuccucgugaaggugucuuuguuucaaauggcacacacugguuuguaacacaaaggaauuuuuaugaaccacaaaucauuacuacagacaacacauuugugucugguaacugugauguuguaauaggaauugucaacaacacaguuuaugauccuuugcaaccugaauuagacucauucaaggaggaguuagauaaauauuuuaagaaucauacaucaccagauguugauuuaggugacaucucuggcauuaaugcuucaguuguaaacauucaaaaagaaauugaccgccucaaugagguugccaagaauuuaaaugaaucucucaucgaucuccaagaacuuggaaaguaugagcaguauauaaaauggccaugguacauuuggcuagguuuuauagcuggcuugauugccauaguaauggugacaauuaugcuuugcuguaugaccaguugcuguaguugucucaagggcuguuguucuuguggauccugcugcaaauuugaugaagacgacucugagccagugcucaaaggagucaaauuacauuacacauaaggacuagucccuguucccagagcccacuuuuuuuucuuuuuuugaaauaaaauagccugucuuucagaucucaaaggcucuuuucagagccaccaaaaaaaaaaaaaaaaaaaaaaaaaaaaaaaaaaaaaaaaaaaaaaaaaaaaaaaaaaaaaaaaaaaaaaaaaaaaaaaaaaaaaaaaaaaaaaaaaaaaa

SEQ ID NO: 12256 - RNA, 4094 nt, Artificial Sequence
  SARS-CoV-2/Iceland/280/2020__EPI_ISL_417608 spike protein mRNA wt (1-1273)
aggagagucccgcagucggcguccagcggcucugcuuguucgugugugugucguugcaggccuuauucaagcuuaccauguuuguuuuucuuguuuuauugccacuagucucuagucaguguguuaaucuuacaaccagaacucaauuacccccugcauacacuaauucuuucacacgugguguuuauuacccugacaaaguuuucagauccucaguuuuacauucaacucaggacuuguucuuaccuuucuuuuccaauguuacuugguuccaugcuauacaugucucugggaccaaugguacuaagagguuugauaacccuguccuaccauuuaaugaugguguuuauuuugcuuccacugagaagucuaacauaauaagaggcuggauuuuugguacuacuuuagauucgaagacccagucccuacuuauuguuaauaacgcuacuaauguuguuauuaaagucugugaauuucaauuuuguaaugauccauuuuuggguguuuauuaccacaaaaacaacaaaaguuggauggaaagugaguucagaguuuauucuagugcgaauaauugcacuuuugaauaugucucucagccuuuucuuauggaccuugaaggaaaacaggguaauuucaaaaaucuuagggaauuuguguuuaagaauauugaugguuauuuuaaaauauauucuaagcacacgccuauuaauuuagugcgugaucucccucaggguuuuucggcuuuagaaccauugguagauuugccaauagguauuaacaucacuagguuucaaacuuuacuugcuuuacauagaaguuauuugacuccuggugauucuucuucagguuggacagcuggugcugcagcuuauuauguggguuaucuucaaccuaggacuuuucuauuaaaauauaaugaaaauggaaccauuacagaugcuguagacugugcacuugacccucucucagaaacaaaguguacguugaaauccuucacuguagaaaaaggaaucuaucaaacuucuaacuuuagaguccaaccaacagaaucuauuguuagauuuccuaauauuacaaacuugugcccuuuuggugaaguuuuuaacgccaccagauuugcaucuguuuaugcuuggaacaggaagagaaucagcaacuguguugcugauuauucuguccuauauaauuccgcaucauuuuccacuuuuaaguguuauggagugucuccuacuaaauuaaaugaucucugcuuuacuaaugucuaugcagauucauuuguaauuagaggugaugaagucagacaaaucgcuccagggcaaacuggaaagauugcugauuauaauuauaaauuaccagaugauuuuacaggcugcguuauagcuuggaauucuaacaaucuugauucuaagguuggugguaauuauaauuaccuguauagauuguuuaggaagucuaaucucaaaccuuuugagagagauauuucaacugaaaucuaucaggccgguagcacaccuuguaaugguguugaagguuuuaauuguuacuuuccuuuacaaucauaugguuuccaacccacuaaugguguugguuaccaaccauacagaguaguaguacuuucuuuugaacuucuacaugcaccagcaacuguuuguggaccuaaaaagucuacuaauuugguuaaaaacaaaugugucaauuucaacuucaaugguuuaacaggcacagguguucuuacugagucuaacaaaaaguuucugccuuuccaacaauuuggcagagacauugcugacacuacugaugcuguccgugauccacagacacuugagauucuugacauuacaccauguucuuuugguggugucaguguuauaacaccaggaacaaauacuucuaaccagguugcuguucuuuaucaggguguuaacugcacagaagucccuguugcuauucaugcagaucaacuuacuccuacuuggcguguuuauucuacagguucuaauguuuuucaaacacgugcaggcuguuuaauaggggcugaacaugucaacaacucauaugagugugacauacccauuggugcagguauaugcgcuaguuaucauacucagacuaauucuccucggcgggcacguaguguagcuagucaauccaucauugccuacacuaugucacuuggugcagaaaauucaguugcuuacucuaauaacucuauugccauacccacaaauuuuacuauuaguguuaccacagaaauucuaccagugucuaugaccaagacaucaguagauuguacaauguacauuuguggugauucaacugaaugcagcaaucuuuuguugcaauauggcaguuuuuguacacaauuaaaccgugcuuuaacuggaauagcuguugaacaagacaaaaacacccaagaaguuuuugcacaagucaaacaaauuuacaaaacaccaccaauuaaagauuuuggugguuuuaauuuuucacaaauauuaccagauccaucaaaaccaagcaagaggucauuuauugaagaucuacuuuucaacaaagugacacuugcagaugcuggcuucaucaaacaauauggugauugccuuggugauauugcugcuagagaccucauuugugcacaaaaguuuaacggccuuacuguuuugccaccuuugcucacagaugaaaugauugcucaauacacuucugcacuguuagcggguacaaucacuucugguuggaccuuuggugcaggugcugcauuacaaauaccauuugcuaugcaaauggcuuauagguuuaaugguauuggaguuacacagaauguucucuaugagaaccaaaaauugauugccaaccaauuuaauagugcuauuggcaaaauucaagacucacuuucuuccacagcaagugcacuuggaaaacuucaagauguggucaaccaaaaugcacaagcuuuaaacacgcuuguuaaacaacuuagcuccaauuuuggugcaauuucaaguguuuuaaaugauauccuuucacgucuugacaaaguugaggcugaagugcaaauugauagguugaucacaggcagacuucaaaguuugcagacauaugugacucaacaauuaauuagagcugcagaaaucagagcuucugcuaaucuugcugcuacuaaaaugucagaguguguacuuggacaaucaaaaagaguugauuuuuguggaaagggcuaucaucuuauguccuucccucagucagcaccucaugguguagucuucuugcaugugacuuaugucccugcacaagaaaagaacuucacaacugcuccugccauuugucaugauggaaaagcacacuuuccucgugaaggugucuuuguuucaaauggcacacacugguuuguaacacaaaggaauuuuuaugaaccacaaaucauuacuacagacaacacauuugugucugguaacugugauguuguaauaggaauugucaacaacacaguuuaugauccuuugcaaccugaauuagacucauucaaggaggaguuagauaaauauuuuaagaaucauacaucaccagauguugauuuaggugacaucucuggcauuaaugcuucaguuguaaacauucaaaaagaaauugaccgccucaaugagguugccaagaauuuaaaugaaucucucaucgaucuccaagaacuuggaaaguaugagcaguauauaaaauggccaugguacauuuggcuagguuuuauagcuggcuugauugccauaguaauggugacaauuaugcuuugcuguaugaccaguugcuguaguugucucaagggcuguuguucuuguggauccugcugcaaauuugaugaagacgacucugagccagugcucaaaggagucaaauuacauuacacauaaggacuagucccuguucccagagcccacuuuuuuuucuuuuuuugaaauaaaauagccugucuuucagaucucaaaggcucuuuucagagccaccaaaaaaaaaaaaaaaaaaaaaaaaaaaaaaaaaaaaaaaaaaaaaaaaaaaaaaaaaaaaaaaaaaaaaaaaaaaaaaaaaaaaaaaaaaaaaaaaaaaaa

SEQ ID NO: 12257 - RNA, 4094 nt, Artificial Sequence
  SARS-CoV-2/Iceland/247/2020__EPI_ISL_417575 spike protein mRNA wt (1-1273)
aggagagucccgcagucggcguccagcggcucugcuuguucgugugugugucguugcaggccuuauucaagcuuaccauguuuguuuuucuuguuuuauugccacuagucucuagucaguguguuaaucuuacaaccagaacucaauuacccccugcauacacuaauucuuucacacgugguguuuauuacccugacaaaguuuucagauccucaguuuuacauucaacucaggacuuguucuuaccuuucuuuuccaauguuacuugguuccaugcuauacaugucucugggaccaaugguacuaagagguuugauaacccuguccuaccauuuaaugaugguguuuauuuugcuuccacugagaagucuaacauaauaagaggcuggauuuuugguacuacuuuagauucgaagacccagucccuacuuauuguuaauaacgcuacuaauguuguuauuaaagucugugaauuucaauuuuguaaugauccauuuuuggguguuuauuaccacaaaaacaacaaaaguuggauggaaagugaguucagaguuuauucuagugcgaauaauugcacuuuugaauaugucucucagccuuuucuuauggaccuugaaggaaaacaggguaauuucaaaaaucuuagggaauuuguguuuaagaauauugaugguuauuuuaaaauauauucuaagcacacgccuauuaauuuagugcgugaucucccucaggguuuuucggcuuuagaaccauugguagauuugccaauagguauuaacaucacuagguuucaaacuuuacuugcuuuacauagaaguuauuugacuccuggugauucuucuucagguuggacagcuggugcugcagcuuauuauguggguuaucuucaaccuaggacuuuucuauuaaaauauaaugaaaauggaaccauuacagaugcuguagacugugcacuugacccucucucagaaacaaaguguacguugaaauccuucacuguagaaaaaggaaucuaucaaacuucuaacuuuagaguccaaccaacagaaucuauuguuagauuuccuaauauuacaaacuugugcccuuuuggugaaguuuuuaacgccaccagauuugcaucuguuuaugcuuggaacaggaagagaaucagcaacuguguugcugauuauucuguccuauauaauuccgcaucauuuuccacuuuuaaguguuauggagugucuccuacuaaauuaaaugaucucugcuuuacuaaugucuaugcagauucauuuguaauuagaggugaugaagucagacaaaucgcuccagggcaaacuggaaagauugcugauuauaauuauaaauuaccagaugauuuuacaggcugcguuauagcuuggaauucuaacaaucuugauucuaagguuggugguaauuauaauuaccuguauagauuguuuaggaagucuaaucucaaaccuuuugagagagauauuucaacugaaaucuaucaggccgguagcacaccuuguaaugguguugaagguuuuaauuguuacuuuccuuuacaaucauaugguuuccaacccacuaaugguguugguuaccaaccauacagaguaguaguacuuucuuuugaacuucuacaugcaccagcaacuguuuguggaccuaaaaagucuacuaauuugguuaaaaacaaaugugucaauuucaacuucaaugguuuaacaggcacagguguucuuacugagucuaacaaaaaguuucugccuuuccaacaauuuggcagagacauugcugacacuacugaugcuguccgugauccacagacacuugagauucuugacauuacaccauguucuuuugguggugucaguguuauaacaccaggaacaaauacuucuaaccagguugcuguucuuuaucaggguguuaacugcacagaagucccuguugcuauucaugcagaucaacuuacuccuacuuggcguguuuauucuacagguucuaauguuuuucaaacacgugcaggcuguuuaauaggggcugaacaugucaacaacucauaugagugugacauacccauuggugcagguauaugcgcuaguuaucagacucagacuaauucuccucggcgggcacguaguguagcuagucaauccaucauugccuacacuaugucacuuggugcagaaaauucaguugcuuacucuaauaacucuauugccauacccacaaauuuuacuauuaguguuaccacagaaauucuaccagugucuaugaccaagacaucaguagauuguacaauguacauuuguggugauucaacugaaugcagcaaucuuuuguugcaauauggcaguuuuuguacacaauuaaaccgugcuuuaacuggaauagcuguugaacaagacaaaaacacccaagaaguuuuugcacaagucaaacaaauuuacaaaacaccaccaauuaaagauuuuggugguuuuaauuuuucacaaauauuaccagauccaucaaaaccaagcaagaggucauuuauugaagaucuacuuuucaacaaagugacacuugcagaugcuggcuucaucaaacaauauggugauugccuuggugauauugcugcuagagaccucauuugugcacaaaaguuuaacggccuuacuguuuugccaccuuugcucacagaugaaaugauugcucaauacacuucugcacuguuagcggguacaaucacuucugguuggaccuuuggugcaggugcugcauuacaaauaccauuugcuaugcaaauggcuuauagguuuaaugguauuggaguuacacagaauguucucuaugagaaccaaaaauugauugccaaccaauuuaauagugcuauuggcaaaauucaagacucacuuucuuccacagcaagugcacuuggaaaacuucaagauguggucaaccaaaaugcacaagcuuuaaacacgcuuguuaaacaacuuagcuccaauuuuggugcaauuucaaguguuuuaaaugauauccuuucacgucuugacaaaguugaggcugaagugcaaauugauagguugaucacaggcagacuucaaaguuugcagacauaugugacucaacaauuaauuagagcugcagaaaucagagcuucugcuaaucuugcugcuacuaaaaugucagaguguguacuuggacaaucaaaaagaguugauuuuuguggaaagggcuaucaucuuauguccuucccucagucagcaccucaugguguagucuucuugcaugugacuuaugucccugcacaagaaaagaacuucacaacugcuccugccauuugucaugauggaaaagcacacuuuccucgugaaggugucuuuguuucaaauggcacacacugguuuguaacacaaaggaauuuuuaugaaccacaaaucauuacuacagacaacacauuugugucugguaacugugauguuguaauaggaauugucaacaacacaguuuaugauccuuugcaaccugaauuagacucauucaaggaggaguuagauaaauauuuuaagaaucauacaucaccagauguugauuuaggugacaucucuggcauuaaugcuucaguuguaaacauucaaaaagaaauugaccgccucaaugagguugccaagaauuuaaaugaaucucucaucgaucuccaagaacuuggaaaguaugagcaguauauaaaauggccaugguacauuuggcuagguuuuauagcuggcuugauugccauaguaauugugacaauuaugcuuugcuguaugaccaguugcuguaguugucucaagggcuguuguucuuguggauccugcugcaaauuugaugaagacgacucugagccagugcucaaaggagucaaauuacauuacacauaaggacuagucccuguucccagagcccacuuuuuuuucuuuuuuugaaauaaaauagccugucuuucagaucucaaaggcucuuuucagagccaccaaaaaaaaaaaaaaaaaaaaaaaaaaaaaaaaaaaaaaaaaaaaaaaaaaaaaaaaaaaaaaaaaaaaaaaaaaaaaaaaaaaaaaaaaaaaaaaaaaaaa

SEQ ID NO: 12258 - RNA, 4094 nt, Artificial Sequence
  SARS-CoV-2/Iceland/238/2020__EPI_ISL_417566 spike protein mRNA wt (1-1273)
aggagagucccgcagucggcguccagcggcucugcuuguucgugugugugucguugcaggccuuauucaagcuuaccauguuuguuuuucuuguuuuauugccacuagucucuagucaguguguuaaucuuacaaccagaacucaauuacccccugcauacacuaauucuuucacacgugguguuuauuacccugacaaaguuuucagauccucaguuuuacauucaacucaggacuuguucuuaccuuucuuuuccaauguuacuugguuccaugcuauacaugucucugggaccaaugguacuaagagguuugauaacccuguccuaccauuuaaugaugguguuuauuuugcuuccacugagaagucuaacauaauaagaggcuggauuuuugguacuacuuuagauucgaagacccagucccuacuuauuguuaauaacgcuacuaauguuguuauuaaagucugugaauuucaauuuuguaaugauccauuuuuggguguuuauuaccacaaaaacaacaaaaguuggauggaaagugaguucagaguuuauucuagugcgaauaauugcacuuuugaauaugucucucagccuuuucuuauggaccuugaaggaaaacaggguaauuucaaaaaucuuagggaauuuguguuuaagaauauugaugguuauuuuaaaauauauucuaagcacacgccuauuaauuuagugcgugaucucccucaggguuuuucggcuuuagaaccauugguagauuugccaauagguauuaacaucacuagguuucaaacuuuacuugcuuuacauagaaguuauuugacuccuggugauucuucuucagguuggacagcuggugcugcagcuuauuauguggguuaucuucaaccuaggacuuuucuauuaaaauauaaugaaaauggaaccauuacagaugcuguagacugugcacuugacccucucucagaaacaaaguguacguugaaauccuucacuguagaaaaaggaaucuaucaaacuucuaacuuuagaguccaaccaacagaaucuauuguuagauuuccuaauauuacaaacuugugcccuuuuggugaaguuuuuaacgccaccagauuugcaucuguuuaugcuuggaacaggaagagaaucagcaacuguguugcugauuauucuguccuauauaauuccgcaucauuuuccacuuuuaaguguuauggagugucuccuacuaaauuaaaugaucucugcuuuacuaaugucuaugcagauucauuuguaauuagaggugaugaagucagacaaaucgcuccagggcaaacuggaaagauugcugauuauaauuauaaauuaccagaugauuuuacaggcugcguuauagcuuggaauucuaacaaucuugauucuaagguuggugguaauuauaauuaccuguauagauuguuuaggaagucuaaucucaaaccuuuugagagagauauuucaacugaaaucuaucaggccgguagcacaccuuguaaugguguugaagguuuuaauuguuacuuuccuuuacaaucauaugguuuccaacccacuaaugguguugguuaccaaccauacagaguaguaguacuuucuuuugaacuucuacaugcaccagcaacuguuuguggaccuaaaaagucuacuaauuugguuaaaaacaaaugugucaauuucaacuucaaugguuuaacaggcacagguguucuuacugagucuaacaaaaaguuucugccuuuccaacaauuuggcagagacauugcugacacuacugaugcuguccgugauccacagacacuugagauucuugacauuacaccauguucuuuugguggugucaguguuauaacaccaggaacaaauacuucuaaccagguugcuguucuuuaucaggguguuaacugcacagaagucccuguugcuauucaugcagaucaacuuacuccuacuuggcguguuuauucuacagguucuaauguuuuucaaacacgugcaggcuguuuaauaggggcugaacaugucaacaacucauaugagugugacauacccauuggugcagguauaugcgcuaguuaucagacucagacuaauucuccucggcgggcacguaguguagcuagucaauccaucauugccuacacuaugucacuuggugcagaaaauucaguugcuuacucuaauaacucuauugccauacccacaaauuuuacuauuaguguuaccacagaaauucuaccagugucuaugaccaagacaucaguagauuguacaauguacauuuguggugauucaacugaaugcagcaaucuuuuguugcaauauggcaguuuuuguacacaauuaaaccgugcuuuaacuggaauagcuguugaacaagacaaaaacacccaagaaguuuuugcacaagucaaacaaauuuacaaaacaccaccaauuaaagauuuuggugguuuuaauuuuucacaaauauuaccagauccaucaaaaccaagcaagaggucauuuauugaagaucuacuuuucaacaaagugacacuugcagauguuggcuucaucaaacaauauggugauugccuuggugauauugcugcuagagaccucauuugugcacaaaaguuuaacggccuuacuguuuugccaccuuugcucacagaugaaaugauugcucaauacacuucugcacuguuagcggguacaaucacuucugguuggaccuuuggugcaggugcugcauuacaaauaccauuugcuaugcaaauggcuuauagguuuaaugguauuggaguuacacagaauguucucuaugagaaccaaaaauugauugccaaccaauuuaauagugcuauuggcaaaauucaagacucacuuucuuccacagcaagugcacuuggaaaacuucaagauguggucaaccaaaaugcacaagcuuuaaacacgcuuguuaaacaacuuagcuccaauuuuggugcaauuucaaguguuuuaaaugauauccuuucacgucuugacaaaguugaggcugaagugcaaauugauagguugaucacaggcagacuucaaaguuugcagacauaugugacucaacaauuaauuagagcugcagaaaucagagcuucugcuaaucuugcugcuacuaaaaugucagaguguguacuuggacaaucaaaaagaguugauuuuuguggaaagggcuaucaucuuauguccuucccucagucagcaccucaugguguagucuucuugcaugugacuuaugucccugcacaagaaaagaacuucacaacugcuccugccauuugucaugauggaaaagcacacuuuccucgugaaggugucuuuguuucaaauggcacacacugguuuguaacacaaaggaauuuuuaugaaccacaaaucauuacuacagacaacacauuugugucugguaacugugauguuguaauaggaauugucaacaacacaguuuaugauccuuugcaaccugaauuagacucauucaaggaggaguuagauaaauauuuuaagaaucauacaucaccagauguugauuuaggugacaucucuggcauuaaugcuucaguuguaaacauucaaaaagaaauugaccgccucaaugagguugccaagaauuuaaaugaaucucucaucgaucuccaagaacuuggaaaguaugagcaguauauaaaauggccaugguacauuuggcuagguuuuauagcuggcuugauugccauaguaauggugacaauuaugcuuugcuguaugaccaguugcuguaguugucucaagggcuguuguucuuguggauccugcugcaaauuugaugaagacgacucugagccagugcucaaaggagucaaauuacauuacacauaaggacuagucccuguucccagagcccacuuuuuuuucuuuuuuugaaauaaaauagccugucuuucagaucucaaaggcucuuuucagagccaccaaaaaaaaaaaaaaaaaaaaaaaaaaaaaaaaaaaaaaaaaaaaaaaaaaaaaaaaaaaaaaaaaaaaaaaaaaaaaaaaaaaaaaaaaaaaaaaaaaaaa

SEQ ID NO: 12259 - RNA, 4094 nt, Artificial Sequence
  SARS-CoV-2/Greece/16/2020__EPI_ISL_418265 spike protein mRNA wt (1-1273)
aggagagucccgcagucggcguccagcggcucugcuuguucgugugugugucguugcaggccuuauucaagcuuaccauguuuguuuuucuuguuuuauugccacuagucucuagucaguguguuaaucuuacaaccagaacucaauuacccccugcauacacuaauucuuucacacgugguguuuauuacccugacaaaguuuucagauccucaguuuuacauucaacucaggacuuguucuuaccuuucuuuuccaauguuacuugguuccaugcuauacaugucucugggaccaaugguacuaagagguuugauaacccuguccuaccauuuaaugaugguguuuauuuugcuuccacugagaagucuaacauaauaagaggcuggauuuuugguacuacuuuagauucgaagacccagucccuacuuauuguuaauaacgcuacuaauguuguuauuaaagucugugaauuucaauuuuguaaugauccauuuuuggguguuuauuaccacaaaaacaacaaaaguuggauggaaagugaguucagaguuuauucuagugcgaauaauugcacuuuugaauaugucucucagccuuuucuuauggaccuugaaggaaaacaggguaauuucaaaaaucuuagggaauuuguguuuaagaauguugaugguuauuuuaaaauauauucuaagcacacgccuauuaauuuagugcgugaucucccucaggguuuuucggcuuuagaaccauugguagauuugccaauagguauuaacaucacuagguuucaaacuuuacuugcuuuacauagaaguuauuugacuccuggugauucuucuucagguuggacagcuggugcugcagcuuauuauguggguuaucuucaaccuaggacuuuucuauuaaaauauaaugaaaauggaaccauuacagaugcuguagacugugcacuugacccucucucagaaacaaaguguacguugaaauccuucacuguagaaaaaggaaucuaucaaacuucuaacuuuagaguccaaccaacagaaucuauuguuagauuuccuaauauuacaaacuugugcccuuuuggugaaguuuuuaacgccaccagauuugcaucuguuuaugcuuggaacaggaagagaaucagcaacuguguugcugauuauucuguccuauauaauuccgcaucauuuuccacuuuuaaguguuauggagugucuccuacuaaauuaaaugaucucugcuuuacuaaugucuaugcagauucauuuguaauuagaggugaugaagucagacaaaucgcuccagggcaaacuggaaagauugcugauuauaauuauaaauuaccagaugauuuuacaggcugcguuauagcuuggaauucuaacaaucuugauucuaagguuggugguaauuauaauuaccuguauagauuguuuaggaagucuaaucucaaaccuuuugagagagauauuucaacugaaaucuaucaggccgguagcacaccuuguaaugguguugaagguuuuaauuguuacuuuccuuuacaaucauaugguuuccaacccacuaaugguguugguuaccaaccauacagaguaguaguacuuucuuuugaacuucuacaugcaccagcaacuguuuguggaccuaaaaagucuacuaauuugguuaaaaacaaaugugucaauuucaacuucaaugguuuaacaggcacagguguucuuacugagucuaacaaaaaguuucugccuuuccaacaauuuggcagagacauugcugacacuacugaugcuguccgugauccacagacacuugagauucuugacauuacaccauguucuuuugguggugucaguguuauaacaccaggaacaaauacuucuaaccagguugcuguucuuuaucaggauguuaacugcacagaagucccuguugcuauucaugcagaucaacuuacuccuacuuggcguguuuauucuacagguucuaauguuuuucaaacacgugcaggcuguuuaauaggggcugaacaugucaacaacucauaugagugugacauacccauuggugcagguauaugcgcuaguuaucagacucagacuaauucuccucggcgggcacguaguguagcuagucaauccaucauugccuacacuaugucacuuggugcagaaaauucaguugcuuacucuaauaacucuauugccauacccacaaauuuuacuauuaguguuaccacagaaauucuaccagugucuaugaccaagacaucaguagauuguacaauguacauuuguggugauucaacugaaugcagcaaucuuuuguugcaauauggcaguuuuuguacacaauuaaaccgugcuuuaacuggaauagcuguugaacaagacaaaaacacccaagaaguuuuugcacaagucaaacaaauuuacaaaacaccaccaauuaaagauuuuggugguuuuaauuuuucacaaauauuaccagauccaucaaaaccaagcaagaggucauuuauugaagaucuacuuuucaacaaagugacacuugcagaugcuggcuucaucaaacaauauggugauugccuuggugauauugcugcuagagaccucauuugugcacaaaaguuuaacggccuuacuguuuugccaccuuugcucacagaugaaaugauugcucaauacacuucugcacuguuagcggguacaaucacuucugguuggaccuuuggugcaggugcugcauuacaaauaccauuugcuaugcaaauggcuuauagguuuaaugguauuggaguuacacagaauguucucuaugagaaccaaaaauugauugccaaccaauuuaauagugcuauuggcaaaauucaagacucacuuucuuccacagcaagugcacuuggaaaacuucaagauguggucaaccaaaaugcacaagcuuuaaacacgcuuguuaaacaacuuagcuccaauuuuggugcaauuucaaguguuuuaaaugauauccuuucacgucuugacaaaguugaggcugaagugcaaauugauagguugaucacaggcagacuucaaaguuugcagacauaugugacucaacaauuaauuagagcugcagaaaucagagcuucugcuaaucuugcugcuacuaaaaugucagaguguguacuuggacaaucaaaaagaguugauuuuuguggaaagggcuaucaucuuauguccuucccucagucagcaccucaugguguagucuucuugcaugugacuuaugucccugcacaagaaaagaacuucacaacugcuccugccauuugucaugauggaaaagcacacuuuccucgugaaggugucuuuguuucaaauggcacacacugguuuguaacacaaaggaauuuuuaugaaccacaaaucauuacuacagacaacacauuugugucugguaacugugauguuguaauaggaauugucaacaacacaguuuaugauccuuugcaaccugaauuagacucauucaaggaggaguuagauaaauauuuuaagaaucauacaucaccagauguugauuuaggugacaucucuggcauuaaugcuucaguuguaaacauucaaaaagaaauugaccgccucaaugagguugccaagaauuuaaaugaaucucucaucgaucuccaagaacuuggaaaguaugagcaguauauaaaauggccaugguacauuuggcuagguuuuauagcuggcuugauugccauaguaauggugacaauuaugcuuugcuguaugaccaguugcuguaguugucucaagggcuguuguucuuguggauccugcugcaaauuugaugaagacgacucugagccagugcucaaaggagucaaauuacauuacacauaaggacuagucccuguucccagagcccacuuuuuuuucuuuuuuugaaauaaaauagccugucuuucagaucucaaaggcucuuuucagagccaccaaaaaaaaaaaaaaaaaaaaaaaaaaaaaaaaaaaaaaaaaaaaaaaaaaaaaaaaaaaaaaaaaaaaaaaaaaaaaaaaaaaaaaaaaaaaaaaaaaaaa

SEQ ID NO: 12260 - RNA, 4094 nt, Artificial Sequence
  SARS-CoV-2/Iceland/319/2020__EPI_ISL_417648 spike protein mRNA wt (1-1273)
aggagagucccgcagucggcguccagcggcucugcuuguucgugugugugucguugcaggccuuauucaagcuuaccauguuuguuuuucuuguuuuauugccacuagucucuagucaguguguuaaucuuacaaccagaacucaauuacccccugcauacacuaauucuuucacacgugguguuuauuacccugacaaaguuuucagauccucaguuuuacauucaacucaggacuuguucuuaccuuucuuuuccaauguuacuugguuccaugcuauacaugucucugggaccaaugguacuaagagguuugauaacccuguccuaccauuuaaugaugguguuuauuuugcuuccacugagaagucuaacauaauaagaggcuggauuuuugguacuacuuuagauucgaagacccagucccuacuuauuguuaauaacgcuacuaauguuguuauuaaagucugugaauuucaauuuuguaaugauccauuuuuggguguuuauuaccacaaaaacaacaaaaguuggauggaaagugaguucagaguuuauucuagugcgaauaauugcacuuuugaauaugucucucagccuuuucuuauagaccuugaaggaaaacaggguaauuucaaaaaucuuagggaauuuguguuuaagaauauugaugguuauuuuaaaauauauucuaagcacacgccuauuaauuuagugcgugaucucccucaggguuuuucggcuuuagaaccauugguagauuugccaauagguauuaacaucacuagguuucaaacuuuacuugcuuuacauagaaguuauuugacuccuggugauucuucuucagguuggacagcuggugcugcagcuuauuauguggguuaucuucaaccuaggacuuuucuauuaaaauauaaugaaaauggaaccauuacagaugcuguagacugugcacuugacccucucucagaaacaaaguguacguugaaauccuucacuguagaaaaaggaaucuaucaaacuucuaacuuuagaguccaaccaacagaaucuauuguuagauuuccuaauauuacaaacuugugcccuuuuggugaaguuuuuaacgccaccagauuugcaucuguuuaugcuuggaacaggaagagaaucagcaacuguguugcugauuauucuguccuauauaauuccgcaucauuuuccacuuuuaaguguuauggagugucuccuacuaaauuaaaugaucucugcuuuacuaaugucuaugcagauucauuuguaauuagaggugaugaagucagacaaaucgcuccagggcaaacuggaaagauugcugauuauaauuauaaauuaccagaugauuuuacaggcugcguuauagcuuggaauucuaacaaucuugauucuaagguuggugguaauuauaauuaccuguauagauuguuuaggaagucuaaucucaaaccuuuugagagagauauuucaacugaaaucuaucaggccgguagcacaccuuguaaugguguugaagguuuuaauuguuacuuuccuuuacaaucauaugguuuccaacccacuaaugguguugguuaccaaccauacagaguaguaguacuuucuuuugaacuucuacaugcaccagcaacuguuuguggaccuaaaaagucuacuaauuugguuaaaaacaaaugugucaauuucaacuucaaugguuuaacaggcacagguguucuuacugagucuaacaaaaaguuucugccuuuccaacaauuuggcagagacauugcugacacuacugaugcuguccgugauccacagacacuugagauucuugacauuacaccauguucuuuugguggugucaguguuauaacaccaggaacaaauacuucuaaccagguugcuguucuuuaucaggguguuaacugcacagaagucccuguugcuauucaugcagaucaacuuacuccuacuuggcguguuuauucuacagguucuaauguuuuucaaacacgugcaggcuguuuaauaggggcugaacaugucaacaacucauaugagugugacauacccauuggugcagguauaugcgcuaguuaucagacucagacuaauucuccucggcgggcacguaguguagcuagucaauccaucauugccuacacuaugucacuuggugcagaaaauucaguugcuuacucuaauaacucuauugccauacccacaaauuuuacuauuaguguuaccacagaaauucuaccagugucuaugaccaagacaucaguagauuguacaauguacauuuguggugauucaacugaaugcagcaaucuuuuguugcaauauggcaguuuuuguacacaauuaaaccgugcuuuaacuggaauagcuguugaacaagacaaaaacacccaagaaguuuuugcacaagucaaacaaauuuacaaaacaccaccaauuaaagauuuuggugguuuuaauuuuucacaaauauuaccagauccaucaaaaccaagcaagaggucauuuauugaagaucuacuuuucaacaaagugacacuugcagaugcuggcuucaucaaacaauauggugauugccuuggugauauugcugcuagagaccucauuugugcacaaaaguuuaacggccuuacuguuuugccaccuuugcucacagaugaaaugauugcucaauacacuucugcacuguuagcggguacaaucacuucugguuggaccuuuggugcaggugcugcauuacaaauaccauuugcuaugcaaauggcuuauagguuuaaugguauuggaguuacacagaauguucucuaugagaaccaaaaauugauugccaaccaauuuaauagugcuauuggcaaaauucaagacucacuuucuuccacagcaagugcacuuggaaaacuucaagauguggucaaccaaaaugcacaagcuuuaaacacgcuuguuaaacaacuuagcuccaauuuuggugcaauuucaaguguuuuaaaugauauccuuucacgucuugacaaaguugaggcugaagugcaaauugauagguugaucacaggcagacuucaaaguuugcagacauaugugacucaacaauuaauuagagcugcagaaaucagagcuucugcuaaucuugcugcuacuaaaaugucagaguguguacuuggacaaucaaaaagaguugauuuuuguggaaagggcuaucaucuuauguccuucccucagucagcaccucaugguguagucuucuugcaugugacuuaugucccugcacaagaaaagaacuucacaacugcuccugccauuugucaugauggaaaagcacacuuuccucgugaaggugucuuuguuucaaauggcacacacugguuuguaacacaaaggaauuuuuaugaaccacaaaucauuacuacagacaacacauuugugucugguaacugugauguuguaauaggaauugucaacaacacaguuuaugauccuuugcaaccugaauuagacucauucaaggaggaguuagauaaauauuuuaagaaucauacaucaccagauguugauuuaggugacaucucuggcauuaaugcuucaguuguaaacauucaaaaagaaauugaccgccucaaugagguugccaagaauuuaaaugaaucucucaucgaucuccaagaacuuggaaaguaugagcaguauauaaaauggccaugguacauuuggcuagguuuuauagcuggcuugauugccauaguaauggugacaauuaugcuuugcuguaugaccaguugcuguaguugucucaagggcuguuguucuuguggauccugcugcaaauuugaugaagacgacucugagccagugcucaaaggagucaaauuacauuacacauaaggacuagucccuguucccagagcccacuuuuuuuucuuuuuuugaaauaaaauagccugucuuucagaucucaaaggcucuuuucagagccaccaaaaaaaaaaaaaaaaaaaaaaaaaaaaaaaaaaaaaaaaaaaaaaaaaaaaaaaaaaaaaaaaaaaaaaaaaaaaaaaaaaaaaaaaaaaaaaaaaaaaa

SEQ ID NO: 12261 - RNA, 4094 nt, Artificial Sequence
  SARS-CoV-2/Congo/94/2020__EPI_ISL_417947 spike protein mRNA wt (1-1273)
aggagagucccgcagucggcguccagcggcucugcuuguucgugugugugucguugcaggccuuauucaagcuuaccauguuuguuuuucuuguuuuauugccacuagucucuagucaguguguuaaucuuacaaccagaacucaauuacccccugcauacacuaauucuuucacacgugguguuuauuacccugacaaaguuuucagauccucaguuuuacauucaacucaggacuuguucuuaccuuucuuuuccaauguuacuugguuccaugcuauacaugucucugggaccaaugguacuaagagguuugauaacccuguccuaccauuuaaugaugguguuuauuuugcuuccacugagaagucuaacauaauaagaggcuggauuuuugguacuacuuuagauucgaagacccagucccuacuuauuguuaauaacgcuacuaauguuguuauuaaagucugugaauuucaauuuuguaaugauccauuuuuggguguuuauuaccacaaaaacaacaaaaguuggauggaaagugaguucagaguuuauucuagugcgaauaauugcacuuuugaauaugucucucagccuuuucuuauggaccuugaaggaaaacaggguaauuucaaaaaucuuagggaauuuguguuuaagaauauugaugguuauuuuaaaauauauucuaagcacacgccuauuaauuuagugcgugaucucccucaggguuuuucggcuuuagaaccauugguagauuugccaauagguauuaacaucacuagguuucaaacuuuacuugcuuuacauagaaguuauuugacuccuggugauucuucuucagguuggacagcuggugcugcagcuuauuauguggguuaucuucaaccuaggacuuuucuauuaaaauauaaugaaaauggaaccauuacagaugcuguagacugugcacuugacccucucucagaaacaaaguguacguugaaauccuucacuguagaaaaaggaaucuaucaaacuucuaacuuuagaguccaaccaacagaaucuauuguuagauuuccuaauauuacaaacuugugcccuuuuggugaaguuuuuaacgccaccagauuugcaucuguuuaugcuuggaacaggaagagaaucagcaacuguguugcugauuauucuguccuauauaauuccgcaucauuuuccacuuuuaaguguuauggagugucuccuacuaaauuaaaugaucucugcuuuacuaaugucuaugcagauucauuuguaauuagaggugaugaagucagacaaaucgcuccagggcaaacuggaaagauugcugauuauaauuauaaauuaccagaugauuuuacaggcugcguuauagcuuggaauucuaacaaucuugauucuaagguuggugguaauuauaauuaccuguauagauuguuuaggaagucuaaucucaaaccuuuugagagagauauuucaacugaaaucuaucaggccgguagcacaccuuguaaugguguugaagguuuuaauuguuacuuuccuuuacaaucauaugguuuccaacccacuaaugguguugguuaccaaccauacagaguaguaguacuuucuuuugaacuucuacaugcaccagcaacuguuuguggaccuaaaaagucuacuaauuugguuaaaaacaaaugugucaauuucaacuucaaugguuuaacaggcacagguguucuuacugagucuaacaaaaaguuucugccuuuccaacaauuuggcagagacauugcugacacuacugaugcuguccgugauccacagacacuugagauucuugacauuacaccauguucuuuugguggugucaguguuauaacaccaggaacaaauacuucuaaccagguugcuguucuuuaucaggguguuaacugcacagaagucccuguugcuauucaugcagaucaacuuacuccuacuuggcguguuuauucuacagguucuaauguuuuucaaacacgugcaggcuguuuaauaggggcugaacaugucaacaacucauaugagugugacauacccauuggugcagguauaugcgcuaguuaucagacucagacuaauucuccucggcgggcacguaguguagcuagucaauccaucauugccuacacuaugucacuuggugcagaaaauucaguugcuuacucuaauaacucuauugccauacccacaaauuuuacuauuaguguuaccacagaaauucuaccagugucuaugaccaagacaucaguagauuguacaauguacauuuguggugauucaacugaaugcagcaaucuuuuguugcaauauggcaguuuuuguacacaauuaaaccgugcuuuaacuggaauagcuguugaacaagacaaaaacacccaagaaguuuuugcacaagucaaacaaauuuacaaaacaccaccaauuaaagauuuuggugguuuuaauuuuucacaaauauuaccagauccaucaaaaccaagcaagaggucauuuauugaagauauacuuuucaacaaagugacacuugcagaugcuggcuucaucaaacaauauggugauugccuuggugauauugcugcuagagaccucauuugugcacaaaaguuuaacggccuuacuguuuugccaccuuugcucacagaugaaaugauugcucaauacacuucugcacuguuagcggguacaaucacuucugguuggaccuuuggugcaggugcugcauuacaaauaccauuugcuaugcaaauggcuuauagguuuaaugguauuggaguuacacagaauguucucuaugagaaccaaaaauugauugccaaccaauuuaauagugcuauuggcaaaauucaagacucacuuucuuccacagcaagugcacuuggaaaacuucaagauguggucaaccaaaaugcacaagcuuuaaacacgcuuguuaaacaacuuagcuccaauuuuggugcaauuucaaguguuuuaaaugauauccuuucacgucuugacaaaguugaggcugaagugcaaauugauagguugaucacaggcagacuucaaaguuugcagacauaugugacucaacaauuaauuagagcugcagaaaucagagcuucugcuaaucuugcugcuacuaaaaugucagaguguguacuuggacaaucaaaaagaguugauuuuuguggaaagggcuaucaucuuauguccuucccucagucagcaccucaugguguagucuucuugcaugugacuuaugucccugcacaagaaaagaacuucacaacugcuccugccauuugucaugauggaaaagcacacuuuccucgugaaggugucuuuguuucaaauggcacacacugguuuguaacacaaaggaauuuuuaugaaccacaaaucauuacuacagacaacacauuugugucugguaacugugauguuguaauaggaauugucaacaacacaguuuaugauccuuugcaaccugaauuagacucauucaaggaggaguuagauaaauauuuuaagaaucauacaucaccagauguugauuuaggugacaucucuggcauuaaugcuucaguuguaaacauucaaaaagaaauugaccgccucaaugagguugccaagaauuuaaaugaaucucucaucgaucuccaagaacuuggaaaguaugagcaguauauaaaauggccaugguacauuuggcuagguuuuauagcuggcuugauugccauaguaauggugacaauuaugcuuugcuguaugaccaguugcuguaguugucucaagggcuguuguucuuguggauccugcugcaaauuugaugaagacgacucugagccagugcucaaaggagucaaauuacauuacacauaaggacuagucccuguucccagagcccacuuuuuuuucuuuuuuugaaauaaaauagccugucuuucagaucucaaaggcucuuuucagagccaccaaaaaaaaaaaaaaaaaaaaaaaaaaaaaaaaaaaaaaaaaaaaaaaaaaaaaaaaaaaaaaaaaaaaaaaaaaaaaaaaaaaaaaaaaaaaaaaaaaaaa

SEQ ID NO: 12262 - RNA, 4094 nt, Artificial Sequence
  SARS-CoV-2/Congo/158/2020__EPI_ISL_417950 spike protein mRNA wt (1-1273)
aggagagucccgcagucggcguccagcggcucugcuuguucgugugugugucguugcaggccuuauucaagcuuaccauguuuguuuuucuuguuuuauugccacuagucucuagucaguguguuaaucuuacaaccagaacucaauuacccccugcauacacuaauucuuucacacgugguguuuauuacccugacaaaguuuucagauccucaguuuuacauucaacucaggacuuguucuuaccuuucuuuuccaauguuacuugguuccaugcuauacaugucucugggaccaaugguacuaagagguuugauaacccuguccuaccauuuaaugaugguguuuauuuugcuuccacugagaagucuaacauaauaagaggcuggauuuuugguacuacuuuagauucgaagacccagucccuacuuauuguuaauaacgcuacuaauguuguuauuaaagucugugaauuucaauuuuguaaugauccauuuuuggguguuuauuaccacaaaaacaacaaaaguuggauggaaagugaguucagaguuuauucuagugcgaauaauugcacuuuugaauaugucucucagccuuuucuuauggaccuugaaggaaaacaggguaauuucaaaaaucuuagggaauuuguguuuaagaauauugaugguuauuuuaaaauauauucuaagcacacgccuauuaauuuagugcgugaucucccucaggguuuuucggcuuuagaaccauugguagauuugccaauagguauuaacaucacuagguuucaaacuuuacuugcuuuacauagaaguuauuugacuccuggugauucuucuucagguuggacagcuggugcugcagcuuauuauguggguuaucuucaaccuaggacuuuucuauuaaaauauaaugaaaauggaaccauuacagaugcuguagacugugcacuugacccucucucagaaacaaaguguacguugaaauccuucacuguagaaaaaggaaucuaucaaacuucuaacuuuagaguccaaccaacagaaucuauuguuagauuuccuaauauuacaaacuugugcccuuuuggugaaguuuuuaacgccaccagauuugcaucuguuuaugcuuggaacaggaagagaaucagcaacuguguugcugauuauucuguccuauauaauuccgcaucauuuuccacuuuuaaguguuauggagugucuccuacuaaauuaaaugaucucugcuuuacuaaugucuaugcagauucauuuguaauuagaggugaugaagucagacaaaucgcuccagggcaaacuggaaagauugcugauuauaauuauaaauuaccagaugauuuuacaggcugcguuauagcuuggaauucuaacaaucuugauucuaagguuggugguaauuauaauuaccuguauagauuguuuaggaagucuaaucucaaaccuuuugagagagauauuucaacugaaaucuaucaggccgguagcacaccuuguaaugguguugaagguuuuaauuguuacuuuccuuuacaaucauaugguuuccaacccacuaaugguguugguuaccaaccauacagaguaguaguacuuucuuuugaacuucuacaugcaccagcaacuguuuguggaccuaaaaagucuacuaauuugguuaaaaacaaaugugucaauuucaacuucaaugguuuaacaggcacagguguucuuacugagucuaacaaaaaguuucugccuuuccaacaauuuggcagagacauugcugacacuacugaugcuguccgugauccacagacacuugagauucuugacauuacaccauguucuuuugguggugucaguguuauaacaccaggaacaaauacuucuaaccagguugcuguucuuuaucaggauguuaacugcacagaagucccuguugcuauucaugcagaucaacuuacuccuacuuggcguguuuauucuacagguucuaauguuuuucaaacacgugcaggcuguuuaauaggggcugaacaugucaacaacucauaugagugugacauacccauuggugcagguauaugcgcuaguuaucagacucagacuaauucuccucggcgggcacguaguguagcuagucaauccaucauugccuacacuaugucacuuggugcagaaaauucaguugcuuacucuaauaacucuauugccauacccacaaauuuuacuauuaguguuaccacagaaauucuaccagugucuaugaccaagacaucaguagauuguacaauguacauuuguggugauucaacugaaugcagcaaucuuuuguugcaauauggcaguuuuuguacacaauuaaaccgugcuuuaacuggaauagcuguugaacaagacaaaaacacccaagaaguuuuugcacaagucaaacaaauuuacaaaacaccaccaauuaaagauuuuggugguuuuaauuuuucacaaauauuaccagauccaucaaaaccaagcaagaggucauuuauugaagaucuacuuuucaacaaagugacacuugcagaugcuggcuucaucaaacaauauggugauugccuuggugauauugcugcuagagaccucauuugugcacaaaaguuuaacggccuuacuguuuugccaccuuugcucacagaugaaaugauugcucaauacacuucugcacuguuagcggguacaaucacuucugguuggaccuuuggugcaggugcugcauuacaaauaccauuugcuaugcaaauggcuuauagguuuaaugguauuggaguuacacagaauguucucuaugagaaccaaaaauugauugccaaccaauuuaauagugcuauuggcaaaauucaagacucacuuucuuccacagcaagugcacuuggaaaacuucaagauguggucaaccaaaaugcacaagcuuuaaacacgcuuguuaaacaacuuagcuccaauuuuggugcaauuucaaguguuuuaaaugauauccuuucacgucuugacaaaguugaggcugaagugcaaauugauagguugaucacaggcagacuucaaaguuugcagacauaugugacucaacaauuaauuagagcugcagaaaucagagcuucugcuaaucuugcugcuacuaaaaugucagaguguguacuuggacaaucaaaaagaguugauuuuuguggaaagggcuaucaucuuauguccuucccucagucagcaccucaugguguagucuucuugcaugugacuuaugucccugcacaagaaaagaacuucacaacugcuccugccauuugucaugauggaaaagcacacuuuccucgugaaggugucuuuguuucaaauggcacacacugguuuguaacacaaaggaauuuuuaugaaccacaaaucauuacuacagacaacacauuuuugucugguaacugugauguuguaauaggaauugucaacaacacaguuuaugauccuuugcaaccugaauuagacucauucaaggaggaguuagauaaauauuuuaagaaucauacaucaccagauguugauuuaggugacaucucuggcauuaaugcuucaguuguaaacauucaaaaagaaauugaccgccucaaugagguugccaagaauuuaaaugaaucucucaucgaucuccaagaacuuggaaaguaugagcaguauauaaaauggccaugguacauuuggcuagguuuuauagcuggcuugauugccauaguaauggugacaauuaugcuuugcuguaugaccaguugcuguaguugucucaagggcuguuguucuuguggauccugcugcaaauuugaugaagacgacucugagccagugcucaaaggagucaaauuacauuacacauaaggacuagucccuguucccagagcccacuuuuuuuucuuuuuuugaaauaaaauagccugucuuucagaucucaaaggcucuuuucagagccaccaaaaaaaaaaaaaaaaaaaaaaaaaaaaaaaaaaaaaaaaaaaaaaaaaaaaaaaaaaaaaaaaaaaaaaaaaaaaaaaaaaaaaaaaaaaaaaaaaaaaa

SEQ ID NO: 12263 - RNA, 4094 nt, Artificial Sequence
  SARS-CoV-2/USA/UT-00034/2020__EPI_ISL_417977 spike protein mRNA wt (1-1273)
aggagagucccgcagucggcguccagcggcucugcuuguucgugugugugucguugcaggccuuauucaagcuuaccauguuuguuuuucuuguuuuauugccacuagucucuagucaguguguuaaucuuacaaccagaacucaauuacccccugcauacacuaauucuuucacacgugguguuuauuacccugacaaaguuuucagauccucaguuuuacauucaacucaggacuuguucuuaccuuucuuuuccaauguuacuugguuccaugcuauacaugucucugggaccaaugguacuaagagguuugauaacccuguccuaccauuuaaugaugguguuuauuuugcuuccacugagaagucuaacauaauaagaggcuggauuuuugguacuacuuuagauucgaagacccagucccuacuuauuguuaauaacgcuacuaauguuguuauuaaagucugugaauuucaauuuuguaaugauccauuuuuggguguuuauuacuacaaaaacaacaaaaguuggauggaaagugaguucagaguuuauucuagugcgaauaauugcacuuuugaauaugucucucagccuuuucuuauggaccuugaaggaaaacaggguaauuucaaaaaucuuagggaauuuguguuuaagaauauugaugguuauuuuaaaauauauucuaagcacacgccuauuaauuuagugcgugaucucccucaggguuuuucggcuuuagaaccauugguagauuugccaauagguauuaacaucacuagguuucaaacuuuacuugcuuuacauagaaguuauuugacuccuggugauucuucuucagguuggacagcuggugcugcagcuuauuauguggguuaucuucaaccuaggacuuuucuauuaaaauauaaugaaaauggaaccauuacagaugcuguagacugugcacuugacccucucucagaaacaaaguguacguugaaauccuucacuguagaaaaaggaaucuaucaaacuucuaacuuuagaguccaaccaacagaaucuauuguuagauuuccuaauauuacaaacuugugcccuuuuggugaaguuuuuaacgccaccagauuugcaucuguuuaugcuuggaacaggaagagaaucagcaacuguguugcugauuauucuguccuauauaauuccgcaucauuuuccacuuuuaaguguuauggagugucuccuacuaaauuaaaugaucucugcuuuacuaaugucuaugcagauucauuuguaauuagaggugaugaagucagacaaaucgcuccagggcaaacuggaaagauugcugauuauaauuauaaauuaccagaugauuuuacaggcugcguuauagcuuggaauucuaacaaucuugauucuaagguuggugguaauuauaauuaccuguauagauuguuuaggaagucuaaucucaaaccuuuugagagagauauuucaacugaaaucuaucaggccgguagcacaccuuguaaugguguugaagguuuuaauuguuacuuuccuuuacaaucauaugguuuccaacccacuaaugguguugguuaccaaccauacagaguaguaguacuuucuuuugaacuucuacaugcaccagcaacuguuuguggaccuaaaaagucuacuaauuugguuaaaaacaaaugugucaauuucaacuucaaugguuuaacaggcacagguguucuuacugagucuaacaaaaaguuucugccuuuccaacaauuuggcagagacauugcugacacuacugaugcuguccgugauccacagacacuugagauucuugacauuacaccauguucuuuugguggugucaguguuauaacaccaggaacaaauacuucuaaccagguugcuguucuuuaucaggguguuaacugcacagaagucccuguugcuauucaugcagaucaacuuacuccuacuuggcguguuuauucuacagguucuaauguuuuucaaacacgugcaggcuguuuaauaggggcugaacaugucaacaacucauaugagugugacauacccauuggugcagguauaugcgcuaguuaucagacucagacuaauucuccucggcgggcacguaguguagcuagucaauccaucauugccuacacuaugucacuuggugcagaaaauucaguugcuuacucuaauaacucuauugccauacccacaaauuuuacuauuaguguuaccacagaaauucuaccagugucuaugaccaagacaucaguagauuguacaauguacauuuguggugauucaacugaaugcagcaaucuuuuguugcaauauggcaguuuuuguacacaauuaaaccgugcuuuaacuggaauagcuguugaacaagacaaaaacacccaagaaguuuuugcacaagucaaacaaauuuacaaaacaccaccaauuaaagauuuuggugguuuuaauuuuucacaaauauuaccagauccaucaaaaccaagcaagaggucauuuauugaagaucuacuuuucaacaaagugacacuugcagaugcuggcuucaucaaacaauauggugauugccuuggugauauugcugcuagagaccucauuugugcacaaaaguuuaacggccuuacuguuuugccaccuuugcucacagaugaaaugauugcucaauacacuucugcacuguuagcggguacaaucacuucugguuggaccuuuggugcaggugcugcauuacaaauaccauuugcuaugcaaauggcuuauagguuuaaugguauuggaguuacacagaauguucucuaugagaaccaaaaauugauugccaaccaauuuaauagugcuauuggcaaaauucaagacucacuuucuuccacagcaagugcacuuggaaaacuucaagauguggucaaccaaaaugcacaagcuuuaaacacgcuuguuaaacaacuuagcuccaauuuuggugcaauuucaaguguuuuaaaugauauccuuucacgucuugacaaaguugaggcugaagugcaaauugauagguugaucacaggcagacuucaaaguuugcagacauaugugacucaacaauuaauuagagcugcagaaaucagagcuucugcuaaucuugcugcuacuaaaaugucagaguguguacuuggacaaucaaaaagaguugauuuuuguggaaagggcuaucaucuuauguccuucccucagucagcaccucaugguguagucuucuugcaugugacuuaugucccugcacaagaaaagaacuucacaacugcuccugccauuugucaugauggaaaagcacacuuuccucgugaaggugucuuuguuucaaauggcacacacugguuuguaacacaaaggaauuuuuaugaaccacaaaucauuacuacagacaacacauuugugucugguaacugugauguuguaauaggaauugucaacaacacaguuuaugauccuuugcaaccugaauuagacucauucaaggaggaguuagauaaauauuuuaagaaucauacaucaccagauguugauuuaggugacaucucuggcauuaaugcuucaguuguaaacauucaaaaagaaauugaccgccucaaugagguugccaagaauuuaaaugaaucucucaucgaucuccaagaacuuggaaaguaugagcaguauauaaaauggccaugguacauuuggcuagguuuuauagcuggcuugauugccauaguaauggugacaauuaugcuuugcuguaugaccaguugcuguaguugucucaagggcuguuguucuuguggauccugcugcaaauuugaugaagacgacucugagccagugcucaaaggagucaaauuacauuacacauaaggacuagucccuguucccagagcccacuuuuuuuucuuuuuuugaaauaaaauagccugucuuucagaucucaaaggcucuuuucagagccaccaaaaaaaaaaaaaaaaaaaaaaaaaaaaaaaaaaaaaaaaaaaaaaaaaaaaaaaaaaaaaaaaaaaaaaaaaaaaaaaaaaaaaaaaaaaaaaaaaaaaa

SEQ ID NO: 12264 - RNA, 4094 nt, Artificial Sequence
  SARS-CoV-2/USA/UT-00033/2020__EPI_ISL_417976 spike protein mRNA wt (1-1273)
aggagagucccgcagucggcguccagcggcucugcuuguucgugugugugucguugcaggccuuauucaagcuuaccauguuuguuuuucuuguuuuauugccacuagucucuagucaguguguuaaucuuacaaccagaacucaauuacccccugcauacacuaauucuuucacacgugguguuuauuacccugacaaaguuuucagauccucaguuuuacauucaacucaggacuuguucuuaccuuucuuuuccaauguuacuugguuccaugcuauacaugucucugggaccaaugguacuaagagguuugauaacccuguccuaccauuuaaugaugguguuuauuuugcuuccacugagaagucuaacauaauaagaggcuggauuuuugguacuacuuuagauucgaagacccagucccuacuuauuguuaauaacgcuacuaauguuguuauuaaagucugugaauuucaauuuuguaaugauccauuuuuggguguuuauuaccacaaaaacaacaaaaguuggauggaaagugaguucagaguuuauucuagugcgaauaauugcacuuuugaauaugucucucagccuuuucuuauggaccuugaaggaaaacaggguaauuucaaaaaucuuagggaauuuguguuuaagaauauugaugguuauuuuaaaauauauucuaagcacacgccuauuaauuuagugcgugaucucccucaggguuuuucggcuuuagaaccauugguagauuugccaauagguauuaacaucacuagguuucaaacuuuacuugcuuuacauagaaguuauuugacuccuggugauucuucuucagguuugacagcuggugcugcagcuuauuauguggguuaucuucaaccuaggacuuuucuauuaaaauauaaugaaaauggaaccauuacagaugcuguagacugugcacuugacccucucucagaaacaaaguguacguugaaauccuucacuguagaaaaaggaaucuaucaaacuucuaacuuuagaguccaaccaacagaaucuauuguuagauuuccuaauauuacaaacuugugcccuuuuggugaaguuuuuaacgccaccagauuugcaucuguuuaugcuuggaacaggaagagaaucagcaacuguguugcugauuauucuguccuauauaauuccgcaucauuuuccacuuuuaaguguuauggagugucuccuacuaaauuaaaugaucucugcuuuacuaaugucuaugcagauucauuuguaauuagaggugaugaagucagacaaaucgcuccagggcaaacuggaaagauugcugauuauaauuauaaauuaccagaugauuuuacaggcugcguuauagcuuggaauucuaacaaucuugauucuaagguuggugguaauuauaauuaccuguauagauuguuuaggaagucuaaucucaaaccuuuugagagagauauuucaacugaaaucuaucaggccgguagcacaccuuguaaugguguugaagguuuuaauuguuacuuuccuuuacaaucauaugguuuccaacccacuaaugguguugguuaccaaccauacagaguaguaguacuuucuuuugaacuucuacaugcaccagcaacuguuuguggaccuaaaaagucuacuaauuugguuaaaaacaaaugugucaauuucaacuucaaugguuuaacaggcacagguguucuuacugagucuaacaaaaaguuucugccuuuccaacaauuuggcagagacauugcugacacuacugaugcuguccgugauccacagacacuugagauucuugacauuacaccauguucuuuugguggugucaguguuauaacaccaggaacaaauacuucuaaccagguugcuguucuuuaucaggguguuaacugcacagaagucccuguugcuauucaugcagaucaacuuacuccuacuuggcguguuuauucuacagguucuaauguuuuucaaacacgugcaggcuguuuaauaggggcugaacaugucaacaacucauaugagugugacauacccauuggugcagguauaugcgcuaguuaucagacucagacuaauucuccucggcgggcacguaguguagcuagucaauccaucauugccuacacuaugucacuuggugcagaaaauucaguugcuuacucuaauaacucuauugccauacccacaaauuuuacuauuaguguuaccacagaaauucuaccagugucuaugaccaagacaucaguagauuguacaauguacauuuguggugauucaacugaaugcagcaaucuuuuguugcaauauggcaguuuuuguacacaauuaaaccgugcuuuaacuggaauagcuguugaacaagacaaaaacacccaagaaguuuuugcacaagucaaacaaauuuacaaaacaccaccaauuaaagauuuuggugguuuuaauuuuucacaaauauuaccagauccaucaaaaccaagcaagaggucauuuauugaagaucuacuuuucaacaaagugacacuugcagaugcuggcuucaucaaacaauauggugauugccuuggugauauugcugcuagagaccucauuugugcacaaaaguuuaacggccuuacuguuuugccaccuuugcucacagaugaaaugauugcucaauacacuucugcacuguuagcggguacaaucacuucugguuggaccuuuggugcaggugcugcauuacaaauaccauuugcuaugcaaauggcuuauagguuuaaugguauuggaguuacacagaauguucucuaugagaaccaaaaauugauugccaaccaauuuaauagugcuauuggcaaaauucaagacucacuuucuuccacagcaagugcacuuggaaaacuucaagauguggucaaccaaaaugcacaagcuuuaaacacgcuuguuaaacaacuuagcuccaauuuuggugcaauuucaaguguuuuaaaugauauccuuucacgucuugacaaaguugaggcugaagugcaaauugauagguugaucacaggcagacuucaaaguuugcagacauaugugacucaacaauuaauuagagcugcagaaaucagagcuucugcuaaucuugcugcuacuaaaaugucagaguguguacuuggacaaucaaaaagaguugauuuuuguggaaagggcuaucaucuuauguccuucccucagucagcaccucaugguguagucuucuugcaugugacuuaugucccugcacaagaaaagaacuucacaacugcuccugccauuugucaugauggaaaagcacacuuuccucgugaaggugucuuuguuucaaauggcacacacugguuuguaacacaaaggaauuuuuaugaaccacaaaucauuacuacagacaacacauuugugucugguaacugugauguuguaauaggaauugucaacaacacaguuuaugauccuuugcaaccugaauuagacucauucaaggaggaguuagauaaauauuuuaagaaucauacaucaccagauguugauuuaggugacaucucuggcauuaaugcuucaguuguaaacauucaaaaagaaauugaccgccucaaugagguugccaagaauuuaaaugaaucucucaucgaucuccaagaacuuggaaaguaugagcaguauauaaaauggccaugguacauuuggcuagguuuuauagcuggcuugauugccauaguaauggugacaauuaugcuuugcuguaugaccaguugcuguaguugucucaagggcuguuguucuuguggauccugcugcaaauuugaugaagacgacucugagccagugcucaaaggagucaaauuacauuacacauaaggacuagucccuguucccagagcccacuuuuuuuucuuuuuuugaaauaaaauagccugucuuucagaucucaaaggcucuuuucagagccaccaaaaaaaaaaaaaaaaaaaaaaaaaaaaaaaaaaaaaaaaaaaaaaaaaaaaaaaaaaaaaaaaaaaaaaaaaaaaaaaaaaaaaaaaaaaaaaaaaaaaa

SEQ ID NO: 12265 - RNA, 4094 nt, Artificial Sequence
  SARS-CoV-2/USA/WI-13/2020__EPI_ISL_417516 spike protein mRNA wt (1-1273)
aggagagucccgcagucggcguccagcggcucugcuuguucgugugugugucguugcaggccuuauucaagcuuaccauguuuguuuuucuuguuuuauugccacuagucucuagucaguguguuaaucuuacaaccagaacucaauuacccccugcauacacuaauucuuucacacgugguguuuauuacccugacaaaguuuucagauccucaguuuuacauucaacucaggacuuguucuuaccuuucuuuuccaauguuacuugguuccaugcuauacaugucucugggaccaaugguacuaagagguuugauaacccuguccuaccauuuaaugaugguguuuauuuugcuuccacugagaagucuaacauaauaagaggcuggauuuuugguacuacuuuagauucgaagacccagucccuacuuauuguuaauaacgcuacuaauguuguuauuaaagucugugaauuucaauuuuguaaugauccauuuuuggguguuuauuaccacaaaaacaacaaaaguuggauggaaagugaguucagaguuuauucuagugcgaauaauugcacuuuugaauaugucucucagccuuuucuuauggaccuugaaggaaaacaggguaauuucaaaaaucuuagggaauuuguguuuaagaauauugaugguuauuuuaaaauauauucuaagcacacgccuauuaauuuagugcgugaucucccucaggguuuuucggcuuuagaaccauugguagauuugccaauagguauuaacaucacuagguuucaaacuuuacuugcuuuacauagaaguuauuugacuccuggugauucuucuucagguuggacagcuggugcugcagcuuauuauguggguuaucuucaaccuaggacuuuucuauuaaaauauaaugaaaauggaaccauuacagaugcuguagacugugcacuugacccucucucagaaacaaaguguacguugaaauccuucacuguagaaaaaggaaucuaucaaacuucuaacuuuagaguccuaccaacagaaucuauuguuagauuuccuaauauuacaaacuugugcccuuuuggugaaguuuuuaacgccaccagauuugcaucuguuuaugcuuggaacaggaagagaaucagcaacuguguugcugauuauucuguccuauauaauuccgcaucauuuuccacuuuuaaguguuauggagugucuccuacuaaauuaaaugaucucugcuuuacuaaugucuaugcagauucauuuguaauuagaggugaugaagucagacaaaucgcuccagggcaaacuggaaagauugcugauuauaauuauaaauuaccagaugauuuuacaggcugcguuauagcuuggaauucuaacaaucuugauucuaagguuggugguaauuauaauuaccuguauagauuguuuaggaagucuaaucucaaaccuuuugagagagauauuucaacugaaaucuaucaggccgguagcacaccuuguaaugguguugaagguuuuaauuguuacuuuccuuuacaaucauaugguuuccaacccacuaaugguguugguuaccaaccauacagaguaguaguacuuucuuuugaacuucuacaugcaccagcaacuguuuguggaccuaaaaagucuacuaauuugguuaaaaacaaaugugucaauuucaacuucaaugguuuaacaggcacagguguucuuacugagucuaacaaaaaguuucugccuuuccaacaauuuggcagagacauugcugacacuacugaugcuguccgugauccacagacacuugagauucuugacauuacaccauguucuuuugguggugucaguguuauaacaccaggaacaaauacuucuaaccagguugcuguucuuuaucaggguguuaacugcacagaagucccuguugcuauucaugcagaucaacuuacuccuacuuggcguguuuauucuacagguucuaauguuuuucaaacacgugcaggcuguuuaauaggggcugaacaugucaacaacucauaugagugugacauacccauuggugcagguauaugcgcuaguuaucagacucagacuaauucuccucggcgggcacguaguguagcuagucaauccaucauugccuacacuaugucacuuggugcagaaaauucaguugcuuacucuaauaacucuauugccauacccacaaauuuuacuauuaguguuaccacagaaauucuaccagugucuaugaccaagacaucaguagauuguacaauguacauuuguggugauucaacugaaugcagcaaucuuuuguugcaauauggcaguuuuuguacacaauuaaaccgugcuuuaacuggaauagcuguugaacaagacaaaaacacccaagaaguuuuugcacaagucaaacaaauuuacaaaacaccaccaauuaaagauuuuggugguuuuaauuuuucacaaauauuaccagauccaucaaaaccaagcaagaggucauuuauugaagaucuacuuuucaacaaagugacacuugcagaugcuggcuucaucaaacaauauggugauugccuuggugauauugcugcuagagaccucauuugugcacaaaaguuuaacggccuuacuguuuugccaccuuugcucacagaugaaaugauugcucaauacacuucugcacuguuagcggguacaaucacuucugguuggaccuuuggugcaggugcugcauuacaaauaccauuugcuaugcaaauggcuuauagguuuaaugguauuggaguuacacagaauguucucuaugagaaccaaaaauugauugccaaccaauuuaauagugcuauuggcaaaauucaagacucacuuucuuccacagcaagugcacuuggaaaacuucaagauguggucaaccaaaaugcacaagcuuuaaacacgcuuguuaaacaacuuagcuccaauuuuggugcaauuucaaguguuuuaaaugauauccuuucacgucuugacaaaguugaggcugaagugcaaauugauagguugaucacaggcagacuucaaaguuugcagacauaugugacucaacaauuaauuagagcugcagaaaucagagcuucugcuaaucuugcugcuacuaaaaugucagaguguguacuuggacaaucaaaaagaguugauuuuuguggaaagggcuaucaucuuauguccuucccucagucagcaccucaugguguagucuucuugcaugugacuuaugucccugcacaagaaaagaacuucacaacugcuccugccauuugucaugauggaaaagcacacuuuccucgugaaggugucuuuguuucaaauggcacacacugguuuguaacacaaaggaauuuuuaugaaccacaaaucauuacuacagacaacacauuugugucugguaacugugauguuguaauaggaauugucaacaacacaguuuaugauccuuugcaaccugaauuagacucauucaaggaggaguuagauaaauauuuuaagaaucauacaucaccagauguugauuuaggugacaucucuggcauuaaugcuucaguuguaaacauucaaaaagaaauugaccgccucaaugagguugccaagaauuuaaaugaaucucucaucgaucuccaagaacuuggaaaguaugagcaguauauaaaauggccaugguacauuuggcuagguuuuauagcuggcuugauugccauaguaauggugacaauuaugcuuugcuguaugaccaguugcuguaguugucucaagggcuguuguucuuguggauccugcugcaaauuugaugaagacgacucugagccagugcucaaaggagucaaauuacauuacacauaaggacuagucccuguucccagagcccacuuuuuuuucuuuuuuugaaauaaaauagccugucuuucagaucucaaaggcucuuuucagagccaccaaaaaaaaaaaaaaaaaaaaaaaaaaaaaaaaaaaaaaaaaaaaaaaaaaaaaaaaaaaaaaaaaaaaaaaaaaaaaaaaaaaaaaaaaaaaaaaaaaaaa

SEQ ID NO: 12266 - RNA, 4091 nt, Artificial Sequence
  SARS-CoV-2/India/1-27/2020__EPI_ISL_413522 spike protein mRNA wt (1-1272)
aggagagucccgcagucggcguccagcggcucugcuuguucgugugugugucguugcaggccuuauucaagcuuaccauguuuguuuuucuuguuuuauugccacuagucucuagucaguguguuaaucuuacaaccagaacucaauuacccccugcauacacuaauucuuucacacgugguguuuauuacccugacaaaguuuucagauccucaguuuuacauucaacucaggacuuguucuuaccuuucuuuuccaauguuacuugguuccaugcuauacaugucucugggaccaaugguacuaagagguuugauaacccuguccuaccauuuaaugaugguguuuauuuugcuuccacugagaagucuaacauaauaagaggcuggauuuuugguacuacuuuagauucgaagacccagucccuacuuauuguuaauaacgcuacuaauguuguuauuaaagucugugaauuucaauuuuguaaugauccauuuuuggguguuuaccacaaaaacaacaaaaguuggauggaaagugaguucagaguuuauucuagugcgaauaauugcacuuuugaauaugucucucagccuuuucuuauggaccuugaaggaaaacaggguaauuucaaaaaucuuagggaauuuguguuuaagaauauugaugguuauuuuaaaauauauucuaagcacacgccuauuaauuuagugcgugaucucccucaggguuuuucggcuuuagaaccauugguagauuugccaauagguauuaacaucacuagguuucaaacuuuacuugcuuuacauagaaguuauuugacuccuggugauucuucuucagguuggacagcuggugcugcagcuuauuauguggguuaucuucaaccuaggacuuuucuauuaaaauauaaugaaaauggaaccauuacagaugcuguagacugugcacuugacccucucucagaaacaaaguguacguugaaauccuucacuguagaaaaaggaaucuaucaaacuucuaacuuuagaguccaaccaacagaaucuauuguuagauuuccuaauauuacaaacuugugcccuuuuggugaaguuuuuaacgccaccagauuugcaucuguuuaugcuuggaacaggaagagaaucagcaacuguguugcugauuauucuguccuauauaauuccgcaucauuuuccacuuuuaaguguuauggagugucuccuacuaaauuaaaugaucucugcuuuacuaaugucuaugcagauucauuuguaauuagaggugaugaagucauacaaaucgcuccagggcaaacuggaaagauugcugauuauaauuauaaauuaccagaugauuuuacaggcugcguuauagcuuggaauucuaacaaucuugauucuaagguuggugguaauuauaauuaccuguauagauuguuuaggaagucuaaucucaaaccuuuugagagagauauuucaacugaaaucuaucaggccgguagcacaccuuguaaugguguugaagguuuuaauuguuacuuuccuuuacaaucauaugguuuccaacccacuaaugguguugguuaccaaccauacagaguaguaguacuuucuuuugaacuucuacaugcaccagcaacuguuuguggaccuaaaaagucuacuaauuugguuaaaaacaaaugugucaauuucaacuucaaugguuuaacaggcacagguguucuuacugagucuaacaaaaaguuucugccuuuccaacaauuuggcagagacauugcugacacuacugaugcuguccgugauccacagacacuugagauucuugacauuacaccauguucuuuugguggugucaguguuauaacaccaggaacaaauacuucuaaccagguugcuguucuuuaucaggauguuaacugcacagaagucccuguugcuauucaugcagaucaacuuacuccuacuuggcguguuuauucuacagguucuaauguuuuucaaacacgugcaggcuguuuaauaggggcugaacaugucaacaacucauaugagugugacauacccauuggugcagguauaugcgcuaguuaucagacucagacuaauucuccucggcgggcacguaguguagcuagucaauccaucauugccuacacuaugucacuuggugcagaaaauucaguugcuuacucuaauaacucuauugccauacccacaaauuuuacuauuaguguuaccacagaaauucuaccagugucuaugaccaagacaucaguagauuguacaauguacauuuguggugauucaacugaaugcagcaaucuuuuguugcaauauggcaguuuuuguacacaauuaaaccgugcuuuaacuggaauagcuguugaacaagacaaaaacacccaagaaguuuuugcacaagucaaacaaauuuacaaaacaccaccaauuaaagauuuuggugguuuuaauuuuucacaaauauuaccagauccaucaaaaccaagcaagaggucauuuauugaagaucuacuuuucaacaaagugacacuugcagaugcuggcuucaucaaacaauauggugauugccuuggugauauugcugcuagagaccucauuugugcacaaaaguuuaacggccuuacuguuuugccaccuuugcucacagaugaaaugauugcucaauacacuucugcacuguuagcggguacaaucacuucugguuggaccuuuggugcaggugcugcauuacaaauaccauuugcuaugcaaauggcuuauagguuuaaugguauuggaguuacacagaauguucucuaugagaaccaaaaauugauugccaaccaauuuaauagugcuauuggcaaaauucaagacucacuuucuuccacagcaagugcacuuggaaaacuucaagauguggucaaccaaaaugcacaagcuuuaaacacgcuuguuaaacaacuuagcuccaauuuuggugcaauuucaaguguuuuaaaugauauccuuucacgucuugacaaaguugaggcugaagugcaaauugauagguugaucacaggcagacuucaaaguuugcagacauaugugacucaacaauuaauuagagcugcagaaaucagagcuucugcuaaucuugcugcuacuaaaaugucagaguguguacuuggacaaucaaaaagaguugauuuuuguggaaagggcuaucaucuuauguccuucccucagucagcaccucaugguguagucuucuugcaugugacuuaugucccugcacaagaaaagaacuucacaacugcuccugccauuugucaugauggaaaagcacacuuuccucgugaaggugucuuuguuucaaauggcacacacugguuuguaacacaaaggaauuuuuaugaaccacaaaucauuacuacagacaacacauuugugucugguaacugugauguuguaauaggaauugucaacaacacaguuuaugauccuuugcaaccugaauuagacucauucaaggaggaguuagauaaauauuuuaagaaucauacaucaccagauguugauuuaggugacaucucuggcauuaaugcuucaguuguaaacauucaaaaagaaauugaccgccucaaugagguugccaagaauuuaaaugaaucucucaucgaucuccaagaacuuggaaaguaugagcaguauauaaaauggccaugguacauuuggcuagguuuuauagcuggcuugauugccauaguaauggugacaauuaugcuuugcuguaugaccaguugcuguaguugucucaagggcuguuguucuuguggauccugcugcaaauuugaugaagacgacucugagccagugcucaaaggagucaaauuacauuacacauaaggacuagucccuguucccagagcccacuuuuuuuucuuuuuuugaaauaaaauagccugucuuucagaucucaaaggcucuuuucagagccaccaaaaaaaaaaaaaaaaaaaaaaaaaaaaaaaaaaaaaaaaaaaaaaaaaaaaaaaaaaaaaaaaaaaaaaaaaaaaaaaaaaaaaaaaaaaaaaaaaaaaa

SEQ ID NO: 12267 - RNA, 4076 nt, Artificial Sequence
  SARS-CoV-2/pangolin/Guangxi/P4L/2017__EPI_ISL_410538 spike protein mRNA wt (1-1267)
aggagagucccgcagucggcguccagcggcucugcuuguucgugugugugucguugcaggccuuauucaagcuuaccauguuuguuuuucuuuuugucuugccuuugguuuccagucaaugugucaauuugaccacaagaacuggaauaccgccagguuauaccaauucaucuacuagaggugucuauuauccagacaaaguuuuuaggucuucaauuuuacaucuuacacaagaccuuuucuuaccuuucuuuucuaauguuacuugguuuaacaccauaaauuaucaaggaggcuuuaagaaguuugacaauccuguuuuaccauuuaaugaugguguuuacuuugccuccacggaaaaguccaauauuauacgcgguuggauuuuuggaacaacacuugaugccagaacucaaucucuucuaauaguuaacaacgcaaccaauguuguuaucaaaguaugugaguuucaguuuugcacugauccauuuuuagguguuuacuaucauaacaacaauaaaacauggguugaaaaugaguuuagaguuuauucaagugccaacaauugcacuuucgaauacauuucucaaccuuuucuuauggaccuugaaggaaagcaagguaauuuuaagaaccuuagagaguuuguguuuaaaaauguugaugguuauuucaagauuuacucuaaacacacaccuauugauuuagugcgcgaccuccccagagguuuugcugcauuggaaccacugguggaccucccuauagguauuaauauuaccagauuccaaacauugcuugcuuuacauagaaguuaucuuacaccugguaaucuagaaaguggcuggacaacuggagcugcugcuuacuauguagguuaccuacaacagaggacuuuucucuuaaguuacaaucaaaauggaaccauuacagaugcuguugauuguucacuagacccucuuucagagacaaagugcacauuaaaaucccuaacaguugaaaaaggaauuuaccagacuucuaacuucagaguucaaccaacaaucaguauaguuagauuuccuaauauuacaaacuuauguccauuuggagaaguguuuaacgcauccaaauuugcaucaguuuaugcuuggaacaggaagagaauuagcaauuguguugcugauuacucuguacuuuauaacucuacaucauuuuccacuuuuaaauguuauggaguuucaccuacaaaacucaaugaccuuugcuucaccaauguguaugcagacucauuuguuguuaaaggugacgagguuagacaaauagcacccggacaaacugguguuauugcugauuauaacuauaagcugccagaugauuuuacugguuguguuauugcuuggaacucaguuaagcaagaugcuuugacuggugguaauuaugguuauuuguauagauuauuuagaaagucuaagcuuaaaccauuugagagagauauuuccacugaaauauaccaagccggcagcacacccuguaacggucaaguuggucuaaauuguuauuauccucuugaaagguaugguuuucacccaacuacagguguuaacuaccaaccuuuuagagugguuguuuuaucauuugaguuacuuaauggaccagcuacuguuuguggacccaaauugucuacaacacuaguuaaagacaaaugugucaauuucaacuuuaacgguuuaacuggcacagguguucuuacaacaucuaagaaacaguuucugccuuuucaacaauuugguagagacaucucugacacuacugaugcuguccgugacccacagacacuugaaauacuugacauuaccccuugcucuuuuggaggaguuagugugauaacaccagguacaaacacuucuaaucaaguggcuguacuuuaccaagauguuaacuguacugaagugccuauggccauucaugcagaacaacuuacaccugccuggcguguuuacucugcaggagcaaauguguuucaaacaagagcaggcuguuuaguaggugcugagcaugucaacaauucuuaugaaugugacauuccagucggugcuggcauaugugcaaguuaccauuccaugucaucauugcguagugucaaccagcguucaaucauugcuuacacuaugucuuuaggugcagaaaauucaguugcuuauucuaauaauucaauugccauaccuacuaauuuuacaauaaguguuaccacagaaauucuaccagugucaaugacuaagacuucuguagauuguacuauguacaucuguggagauucaauugaguguaguaauuuauugcuacaauauggcaguuuuugcacacaauuaaaccgugcuuugacugggauugcuguugaacaagacaaaaacacacaagaaguuuuugcccagguuaaacaaaucuacaaaacaccaccuauuaaagauuuugguggcuuuaacuuuucacaaauauugccagauccaucaaaaccaagcaagaggucauuuauugaggauuuacucuucaacaaagugacacuugcugaugcuggcuucaucaaacaauauggugauugccuuggugauauugcugcuagagaucucaucugugcacaaaaguucaauggacucacgguucuaccgccuuugcucacagaugaaaugauugcucaauacacuucugcacuacuugcuggaacaaucaccucagguuggaccuuuggugcaggagcugcuuuacaaauacccuuugcaaugcaaauggcuuacagguuuaauggcauuggagucacucagaauguucuauaugagaaucagaaauuaauugccaaucaguucaacagugcuauuggcaaaauacaggauucacuuucaucuacggcuagugcacuugguaaacuucaagacgucguaaaucaaaaugcacaggcuuuaaacacacuugucaaacaacuuaguuccaauuuuggagcuauuucgagugugcuuaaugauauucuuucacgucuugacaaaguugaggcugaagugcaaauugauagguuaaucacaggaagacuacagagucuucaaacuuaugugacacaacaauuaaucagagcagcagaaaucagagcuucugcuaaucuugcugcaacaaaaaugucugagugcguacucggacaaucuaaaagaguugauuuuuguggaaaaggcuaccauuuaaugucuuucccucaaucagcaccgcaugguguuguuuucuugcauguuacuuauguaccugcacaagaaaagaacuuuacuacugcuccugcuauuugucaugaaggaaaagcacacuucccucgugaaggugucuucguuucaaauggcacucauugguuuauuacacaaaggaauuuuuaugaaccucaaauuauuaccacugacaacacauucgucucugguagcugugauguuguaauuggaauagucaacaacacaguuuaugauccuuugcaacccgagcuugacucauuuaaggaggaguuagacaaauacuucaaaaaucacacaucaccagauguugaucuuggcgacauaucuggcauaaaugcuucggucgucaacauacaaaaagaaauugaccgccucaaugagguugccaaaaauuugaaugaaucacccauugaccuacaagagcuuggaaaauaugagcaauacaucaaauggccuugguacauuuggcuugguuuuauagcugggcuaauugcuaucauuauggucacaaucaugcuauguuguaugacuaguugcuguaguugccucaaggguuguugcucuugcgguuccugcugcaaauuugaugaagacgauucagaaccuguucugaaaggagucaaauuacauuacacauaaggacuagucccuguucccagagcccacuuuuuuuucuuuuuuugaaauaaaauagccugucuuucagaucucaaaggcucuuuucagagccaccaaaaaaaaaaaaaaaaaaaaaaaaaaaaaaaaaaaaaaaaaaaaaaaaaaaaaaaaaaaaaaaaaaaaaaaaaaaaaaaaaaaaaaaaaaaaaaaaaaaaa

SEQ ID NO: 12268 - RNA, 4076 nt, Artificial Sequence
  SARS-CoV-2/pangolin/Guangxi/P5L/2017__EPI_ISL_410540 spike protein mRNA wt (1-1267)
aggagagucccgcagucggcguccagcggcucugcuuguucgugugugugucguugcaggccuuauucaagcuuaccauguuuguuuuucuuuuugucuugccuuugguuuccagucaaugugucaauuugaccacaagaacuggaauaccgccagguuauaccaauucaucuacuagaggugucuauuauccagacaaaguuuuuaggucuucaauuuuacaucuuacacaagaccuuuucuuaccuuucuuuucuaauguuacuugguuuaacaccauaaauuaucaaggaggcuuuaagaaguuugacaauccuguuuuaccauuuaaugaugguguuuacuuugccuccacggaaaaguccaauauuauacgcgguuggauuuuuggaacaacacuugaugccagaacucaaucucuucuaauaguuaacaacgcaaccaauguuguuaucaaaguaugugaguuucaguuuugcacugauccauuuuuagguguuuacuaucauaacaacaauaaaacauggguugaaaaugaguuuagaguuuauucaagugccaacaauugcacuuucgaauacauuucucaaccuuuucuuauggaccuugaaggaaagcaagguaauuuuaagaaccuuagagaguuuguguuuaaaaauguugaugguuauuucaagauuuacucuaaacacacaccuauugauuuagugcgcgaccuccccagagguuuugcugcauuggaaccacugguggaccucccuauagguauuaauauuaccagauuccaaacauugcuugcuuuacauagaaguuaucuuacaccugguaagcuagaaaguggcuggacaacuggagcugcugcuuacuauguagguuaccuacaacagaggacuuuucucuuaaguuacaaucaaaauggaaccauuacagaugcuguugauuguucacuagacccucuuucagagacaaagugcacauuaaaaucccuaacaguugaaaaaggaauuuaccagacuucuaacuucagaguucaaccaacaaucaguauaguuagauuuccuaauauuacaaacuuauguccauuuggagaaguguuuaacgcauccaaauuugcaucaguuuaugcuuggaacaggaagagaauuagcaauuguguugcugauuacucuguacuuuauaacucuacaucauuuuccacuuuuaaauguuauggaguuucaccuacaaaacucaaugaccuuugcuucaccaauguguaugcagacucauuuguuguuaaaggugacgagguuagacaaauagcacccggacaaacugguguuauugcugauuauaacuauaagcugccagaugauuuuacugguuguguuauugcuuggaacucaguuaagcaagaugcuuugacuggugguaauuaugguuauuuguauagauuauuuagaaagucuaagcuuaaaccauuugagagagauauuuccacugaaauauaccaagccggcagcacacccuguaacggucaaguuggucuaaauuguuauuauccucuugaaagguaugguuuucacccaacuacagguguuaacuaccaaccuuuuagagugguuguuuuaucauuugaguuacuuaauggaccagcuacuguuuguggacccaaauugucuacaacacuaguuaaagacaaaugugucaauuucaacuuuaacgguuuaacuggcacagguguucuuacaacaucuaagaaacaguuucugccuuuucaacaauuugguagagacaucucugacacuacugaugcuguccgugacccacagacacuugaaauacuugacauuaccccuugcucuuuuggaggaguuagugugauaacaccagguacaaacacuucuaaucaaguggcuguacuuuaccaagauguuaacuguacugaagugccuauggccauucaugcagaacaacuuacaccugccuggcguguuuacucugcaggagcaaauguguuucaaacaagagcaggcuguuuaguaggugcugagcaugucaacaauucuuaugaaugugacauuccagucggugcuggcauaugugcaaguuaccauuccaugucaucauuucguagugucaaccagcguucaaucauugcuuacacuaugucuuuaggugcagaaaauucaguugcuuauucuaauaauucaauugccauaccuacuaauuuuacaauaaguguuaccacagaaauucuaccagugucaaugacuaagacuucuguagauuguacuauguacaucuguggagauucaauugaguguaguaauuuauugcuacaauauggcaguuuuugcacacaauuaaaccgugcuuugacugggauugcuguugaacaagacaaaaacacacaagaaguuuuugcccagguuaaacaaaucuacaaaacaccaccuauuaaagauuuugguggcuuuaacuuuucacaaauauugccagauccaucaaaaccaagcaagaggucauuuauugaggauuuacucuucaacaaagugacacuugcugaugcuggcuucaucaaacaauauggugauugccuuggugauauugcugcuagagaucucaucugugcacaaaaguucaauggacucacgguucuaccgccuuugcucacagaugaaaugauugcucaauacacuucugcacuacuugcuggaacaaucaccucagguuggaccuuuggugcaggagcugcuuuacaaauacccuuugcaaugcaaauggcuuacagguuuaauggcauuggagucacucagaauguucuauaugagaaucagaaauuaauugccaaucaguucaacagugcuauuggcaaaauacaggauucacuuucaucuacggcuagugcacuugguaaacuucaagacgucguaaaucaaaaugcacaggcuuuaaacacacuugucaaacaacuuaguuccaauuuuggagcuauuucgagugugcuuaaugauauucuuucacgucuugacaaaguugaggcugaagugcaaauugauagguuaaucacaggaagacuacagagucuucaaacuuaugugacacaacaauuaaucagagcagcagaaaucagagcuucugcuaaucuugcugcaacaaaaaugucugagugcguacucggacaaucuaaaagaguugauuuuuguggaaaaggcuaccauuuaaugucuuucccucaaucagcaccgcaugguguuguuuucuugcauguuacuuauguaccugcacaagaaaagaacuuuacuacugcuccugcuauuugucaugaaggaaaagcacacuucccucgugaaggugucuucguuucaaauggcacucauugguuuauuacacaaaggaauuuuuaugaaccucaaauuauuaccacugacaacacauucgucucugguagcugugauguuguaauuggaauagucaacaacacaguuuaugauccuuugcaacccgagcuugacucauuuaaggaggaguuagacaaauacuucaaaaaucacacaucaccagauguugaucuuggcgacauaucuggcauaaaugcuucggucgucaacauacaaaaagaaauugaccgccucaaugagguugccaaaaauuugaaugaaucacucauugaccuacaagagcuuggaaaauaugagcaauacaucaaauggccuugguacauuuggcuugguuuuauagcugggcuaauugcuaucauuauggucacaaucaugcuauguuguaugacuaguugcuguaguugccucaaggguuguugcucuugcgguuccugcugcaaauuugaugaagacgauucagaaccuguucugaaaggagucaaauuacauuacacauaaggacuagucccuguucccagagcccacuuuuuuuucuuuuuuugaaauaaaauagccugucuuucagaucucaaaggcucuuuucagagccaccaaaaaaaaaaaaaaaaaaaaaaaaaaaaaaaaaaaaaaaaaaaaaaaaaaaaaaaaaaaaaaaaaaaaaaaaaaaaaaaaaaaaaaaaaaaaaaaaaaaaa

SEQ ID NO: 12269 - RNA, 4076 nt, Artificial Sequence
  SARS-CoV-2/pangolin/Guangxi/P5E/2017__EPI_ISL_410541 spike protein mRNA wt (1-1267)
aggagagucccgcagucggcguccagcggcucugcuuguucgugugugugucguugcaggccuuauucaagcuuaccauguuuguuuuucuuuuugucuugccuuugguuuccagucaaugugucaauuugaccacaagaacuggaauaccgccagguuauaccaauucaucuacuagaggugucuauuauccagacaaaguuuuuaggucuucaauuuuacaucuuacacaagaccuuuucuuaccuuucuuuucuaauguuacuugguuuaacaccauaacuuaucaaggaggcucuaagaaguuugacaauccuguuuuaccauuuaaugaugguguuuacuuugccuccacggaaaaguccaauauuauacgcgguuggauuuuuggaacaacacuugaugccagaacucaaucucuucuaauaguuaacaacgcaaccaauguuguuaucaaaguaugugaguuucaguuuugcacugauccauuuuuagguguuuacuaucauaacaacaauaaaacauggguugaaaaugaguuuagaguuuauucaagugccaacaauugcacuuucgaauacauuucucaaccuuuucuuauggaccuugaaggaaagcaagguaauuuuaagaaccuuagagaguuuguguuuaaaaauguugaugguuauuucaagauuuacucuaaacacacaccuauugauuuagugcgcgaccuccccagagguuuugcugcauuggaaccacugguggaccucccuauagguauuaauauuaccagauuccaaacauugcuugcuuuacauagaaguuaucuuacaccugguaagcuagaaaguggcuggacaacuggagcugcugcuuacuauguagguuaccuacaacagaggacuuuucucuuaaguuacaaucaaaauggaaccauuacagaugcuguugauuguucacuagacccucuuucagagacaaagugcacauuaaaaucccuaacaguugaaaaaggaauuuaccagacuucuaacuucagaguucaaccaacaaucaguauaguuagauuuccuaauauuacaaacuuauguccauuuggagaaguguuuaacgcauccaaauuugcaucaguuuaugcuuggaacaggaagagaauuagcaauuguguugcugauuacucuguacuuuauaacucuacaucauuuuccacuuuuaaauguuauggaguuucaccuacaaaacucaaugaccuuugcuucaccaauguguaugcagacucauuuguuguuaaaggugacgagguuagacaaauagcacccggacaaacugguguuauugcugauuauaacuauaagcugccagaugauuuuacugguuguguuauugcuuggaacucaguuaagcaagaugcuuugacuggugauaauuaugguuauuuguauagauuauuuagaaagucuaagcuuaaaccauuugagagagauauuuccacugaaauauaccaagccggcagcacacccuguaacggucaaguuggucuaaauuguuauuauccucuugaaagguaugguuuucacccaacuacagguguuaacuaccaaccuuuuagagugguuguuuuaucauuugaguuacuuaauggaccagcuacuguuuguggacccaaauugucuacaacacuaguuaaagacaaaugugucaauuucaacuuuaacgguuuaacuggcacagguguucuuacaacaucuaagaaacaguuucugccuuuucaacaauuugguagagacaucucugacacuacugaugcuguccgugacccacagacacuugaaauacuugacauuaccccuugcucuuuuggaggaguuagugugauaacaccagguacaaacacuucuaaucaaguggcuguacuuuaccaagauguuaacuguacugaagugccuauggccauucaugcagaacaacuuacaccugccuggcguguuuacucugcaggagcaaauguguuucaaacaagagcaggcuguuuaguaggugcugagcaugucaacaauucuuaugaaugugacauuccagucggugcuggcauaugugcaaguuaccauuccaugucaucauuucguagugucaaccagcguucaaucauugcuuacacuaugucuuuaggugcagaaaauucaguugcuuauucuaauaauucaauugccauaccuacuaauuuuacaauaaguguuaccacagaaauucuaccagugucaaugacuaagacuucuguagauuguacuauguacaucuguggagauucaauugaguguaguaauuuauugcuacaauauggcaguuuuugcacacaauuaaaccgugcuuugacugggauugcuguugaacaagacaaaaacacacaagaaguuuuugcccagguuaaacaaaucuacaaaacaccaccuauuaaagauuuugguggcuuuaacuuuucacaaauauugccagauccaucaaaaccaagcaagaggucauuuauugaggauuuacucuucaacaaagugacacuugcugaugcuggcuucaucaaacaauauggugauugccuuggugauauugcugcuagagaucucaucugugcacaaaaguucaauggacucacgguucuaccgccuuugcucacagaugaaaugauugcucaauacacuucugcacuacuugcuggaacaaucaccucagguuggaccuuuggugcaggagcugcuuuacaaauacccuuugcaaugcaaauggcuuacagguuuaauggcauuggagucacucagaauguucuauaugagaaucagaaauuaauugccaaucaguucaacagugcuauuggcaaaauacaggauucacuuucaucuacggcuagugcacuugguaaacuucaagacgucguaaaucaaaaugcacaggcuuuaaacacacuugucaaacaacuuaguuccaauuuuggagcuauuucgagugugcuuaaugauauucuuucacgucuugacaaaguugaggcugaagugcaaauugauagguuaaucacaggaagacuacagagucuucaaacuuaugugacacaacaauuaaucagagcagcagaaaucagagcuucugcuaaucuugcugcaacaaaaaugucugagugcguacucggacaaucuaaaagaguugauuuuuguggaaaaggcuaccauuuaaugucuuucccucaaucagcaccgcaugguguuguuuucuugcauguuacuuauguaccugcacaagaaaagaacuuuacuacugcuccugcuauuugucaugaaggaaaagcacacuucccucgugaaggugucuucguuucaaauggcacucauugguuuauuacacaaaggaauuuuuaugaaccucaaauuauuaccacugacaacacauucgucucugguagcugugauguuguaauuggaauagucaacaacacaguuuaugauccuuugcaacccgagcuugacucauuuaaggaggaguuagacaaauacuucaaaaaucacacaucaccagauguugaucuuggcgacauaucuggcauaaaugcuucggucgucaacauacaaaaagaaauugaccgccucaaugagguugccaaaaauuugaaugaaucacucauugaccuacaagagcuuggaaaauaugagcaauacaucaaauggccuugguacauuuggcuugguuuuauagcugggcuaauugcuaucauuauggucacaaucaugcuauguuguaugacuaguugcuguaguugccucaaggguuguugcucuugcgguuccugcugcaaauuugaugaagacgauucagaaccuguucugaaaggagucaaauuacauuacacauaaggacuagucccuguucccagagcccacuuuuuuuucuuuuuuugaaauaaaauagccugucuuucagaucucaaaggcucuuuucagagccaccaaaaaaaaaaaaaaaaaaaaaaaaaaaaaaaaaaaaaaaaaaaaaaaaaaaaaaaaaaaaaaaaaaaaaaaaaaaaaaaaaaaaaaaaaaaaaaaaaaaaa

SEQ ID NO: 12270 - RNA, 4070 nt, Artificial Sequence
  SARS-CoV-2/pangolin/Guangxi/P1E/2017__EPI_ISL_410539 spike protein mRNA wt (1-1265)
aggagagucccgcagucggcguccagcggcucugcuuguucgugugugugucguugcaggccuuauucaagcuuaccauguuuguuuuucuuuuugucuugccuuugguuuccagucaaugugucaauuugaccacaagaacuggaauacagccagguuauaccaauucaucuacuagaggugucuauuauccagacaaaguuuuuaggucuucaauuuuacaucuuacacaagaccuuuucuuaccuuucuuuucuaauguuacuugguuuaacaccauaaauuaucaaggaggcuuuaagaaguuugacaauccuguuuuaccauuuaaugaugguguuuacuuugccuccacggaaaaguccaauauuauacgcgguuggauuuuuggaacaacacuugaugccagaacucaaucucuucuaauaguuaacaacgcaaccaauguuguuaucaaaguaugugaguuucaguuuugcacugauccauuuuuagguguuuacuaucauaacaacaauaaaacauggguugaaaaugaguuuagaguuuauucaagugccaacaauugcacuuucgaauacauuucucaaccuuuucuuauggaccuugaaggaaagcaagguaauuuuaagaaccuuagagaguuuguguuuaaaaauguugaugguuauuucaagauuuacucuaaacacacaccuauugauuuagugcgcgaccuccccagagguuuugcugcauuggaaccacugguggaccucccuauagguauuaauauuaccagauuccaaacauugcuugcuuuacauagaaguuaucuuacaccugguaagcuagaaaguggcuggacaacuggagcugcugcuuacuauguagguuaccuacaacagaggacuuuucucuuaaguuacaaucaaaauggaaccauuacagaugcuguugauuguucacuagacccucuuucagagacaaagugcacauuaaaaucccuaacaguugaaaaaggaauuuaccagacuucuaacuucagaguucaaccaacaaucaguauaguuagauuuccuaauauuacaaacuuauguccauuuggagaaguguuuaacgcauccaaauuugcaucaguuuaugcuuggaacaggaagagaauuagcaauuguguugcugauuacucuguacuuuauaacucuacaucauuuuccacuuuuaaauguuauggaguuucaccuacaaaacucaaugaccuuugcuucaccaauguguaugcagacucauuuguuguuaaaggugacgagguuagacaaauagcacccggacaaacugguguuauugcugauuauaacuauaagcugccagaugauuuuacugguuguguuauugcuuggaacucaguuaagcaagaugcuuugacuggugguaauuauuuguauagauuauuuagaaagucuaagcuuaaaccauuugagagagauauuuccacugaaauauaccaagccggcagcacacccuguaacggucaaguuggucuaaauuguuauuauccucuugaaagguaugguuuucacccaacuacagguguuaacuaccaaccuuuuagagugguuguuuuaucauuugaguuacuuaauggaccagcuacuguuuguggacccaaauugucuacaacacuaguuaaagacaaaugugucaauuucaacuuuaacgguuuaacuggcacagguguucuuacaacaucuaagaaacaguuucugccuuuucaacaauuugguagagacaucucugacacuacugaugcuguccgugacccacagacacuugaaauacuugacauuaccccuugcucuuuuggaggaguuagugugauaacaccagguacaaacacuucuaaucaaguggcuguacuuuaccaagauguuaacuguacugaagugccuauggccauucaugcagaacaacuuacaccugccuggcguguuuacucugcaggagcaaauguguuucaaacaagagcaggcuguuuaguaggugcugagcaugucaacaauucuuaugaaugugacauuccagucggugcuggcauaugugcaaguuaccauuccaugucaucauugcguagugucaaccagcguucaaucauugcuuacacuaugucuuuaggugcagaaaauucaguugcuuauucuaauaauucaauugccauaccuacuaauuuuacaauaaguguuaccacagaaauucuaccagugucaaugacuaagacuucuguagauuguacuauguacaucuguggagauucaauugaguguaguaauuuauugcuacaauauggcaguuuuugcacacaauuaaaccgugcuuugacugggauugcuguugaacaagacaaaaacacacaagaaguuuuugcccagguuaaacaaaucuacaaaacaccaccuauuaaagauuuugguggcuuuaacuuuucacaaauauugccagauccaucaaaaccaagcaagaggucauuuauugaggauuuacucuucaacaaagugacacuugcugaugcuggcuucaucaaacaauauggugauugccuuggugauauugcugcuagagaucucaucugugcacaaaaguucaauggacucacgguucuaccgccuuugcucacagaugaaaugauugcucaauacacuucugcacuacuugcuggaacaaucaccucagguuggaccuuuggugcaggagcugcuuuacaaauacccuuugcaaugcaaauggcuuacagguuuaauggcauuggagucacucagaauguucuauaugagaaucagaaauuaauugccaaucaguucaacagugcuauuggcaaaauacaggauucacuuucaucuacggcuagugcacuugguaaacuucaagacgucguaaaucaaaaugcacaggcuuuaaacacacuugucaaacaacuuaguuccaauuuuggagcuauuucgagugugcuuaaugauauucuuucacgucuugacaaaguugaggcugaagugcaaauugauagguuaaucacaggaagacuacagagucuucaaacuuaugugacacaacaauuaaucagagcagcagaaaucagagcuucugcuaaucuugcugcaacaaaaaugucugagugcguacucggacaaucuaaaagaguugauuuuuguggaaaaggcuaccauuuaaugucuuucccucaaucagcaccgcaugguguuguuuucuugcauguuacuuauguaccugcacaagaaaagaacuuuacuacugcuccugcuauuugucaugaaggaaaagcacacuucccucgugaaggugucuucguuucaaauggcacucauugguuuauuacacaaaggaauuuuuaugaaccucaaauuauuaccacugacaacacauucgucucugguagcugugauguuguaauuggaauagucaacaacacaguuuaugauccuuugcaacccgagcuugacucauuuaaggaggaguuagacaaauacuucaaaaaucacacaucaccagauguugaucuuggcgacauaucuggcauaaaugcuucggucgucaacauacaaaaagaaauugaccgccucaaugagguugccaaaaauuugaaugaaucacucauugaccuacaagagcuuggaaaauaugagcaauacaucaaauggccuugguacauuuggcuugguuuuauagcugggcuaauugcuaucauuauggucacaaucaugcuauguuguaugacuaguugcuguaguugccucaaggguuguugcucuugcgguuccugcugcaaauuugaugaagacgauucagaaccuguucugaaaggagucaaauuacauuacacauaaggacuagucccuguucccagagcccacuuuuuuuucuuuuuuugaaauaaaauagccugucuuucagaucucaaaggcucuuuucagagccaccaaaaaaaaaaaaaaaaaaaaaaaaaaaaaaaaaaaaaaaaaaaaaaaaaaaaaaaaaaaaaaaaaaaaaaaaaaaaaaaaaaaaaaaaaaaaaaaaaaaaa

SEQ ID NO: 12271 - RNA, 4094 nt, Artificial Sequence; identical to SEQ ID NO: 148
  SARS-CoV-2/Wuhan/WIV05/2019__EPI_ISL_402128 spike protein mRNA gc (1-1273) R9488, R9492, R10161

SEQ ID NO: 12272 - RNA, 4082 nt, Artificial Sequence
  SARS-CoV-2/bat/Yunnan/RaTG13/2013__EPI_ISL_402131 spike protein mRNA gc (1-1269)
aggagagucccgcagucggcguccagcggcucugcuuguucgugugugugucguugcaggccuuauucaagcuuaccauguucguguuccugguccuccugccccuggugagcucccagugcgugaaccucaccacccgcacgcagcugccgcccgccuacaccaacagcuccacccggggcgucuacuaccccgacaagguguuccgcagcuccgugcugcaccucacccaggaccuguuccugcccuucuucagcaacgucacgugguuccacgccauccacguguccgggaccaacggcaucaagcgguucgacaacccggugcuccccuucaacgacggggucuacuucgcgagcaccgagaaguccaacaucauccgcggcuggaucuucgggaccacgcuggacagcaagacccagucccugcucaucgugaacaacgccaccaacguggucaucaaggugugcgaguuccaguucugcaacgaccccuuccugggcguguacuaccacaagaacaacaagagcuggauggaguccgaguuccgggucuacagcuccgccaacaacugcaccuucgaguacgugagccagcccuuccugauggaccucgagggcaagcaggggaacuucaagaaccugcgcgaguucguguucaagaacaucgacggcuacuucaagaucuacuccaagcacacgccgaucaaccugguccgggaccucccgcccggguucagcgcccuggagccccugguggaccuccccaucggcaucaacaucacccgcuuccagacccugcuggcccuccaccgguccuaccugacccccggggacagcagcuccggcuggacggcgggcgccgccgccuacuacgugggguaccugcagccccgcaccuuccuccugaaguacaacgagaacggcaccaucaccgacgcggucgacugcgcccuggacccccucagcgagacgaagugcacccugaaguccuucaccguggagaaggggaucuaccagaccagcaacuuccgggugcagccgacggacuccaucguccgcuuccccaacaucaccaaccugugccccuucggcgagguguucaacgccaccaccuucgccagcgucuacgccuggaaccggaagcgcaucuccaacugcguggcggacuacagcgugcucuacaacuccacgagcuucuccaccuucaagugcuacggcgucagccccaccaagcugaacgaccugugcuucaccaacguguacgccgacuccuucgugaucacgggggacgagguccggcagaucgccccgggccagaccgggaagaucgccgacuacaacuacaagcuccccgacgacuucaccggcugcgugaucgccuggaacagcaagcacaucgacgcgaaggagggcgggaacuucaacuaccuguaccgccuguuccggaaggccaaccucaagcccuucgagcgcgacaucuccaccgagaucuaccaggccggcagcaagcccugcaacgggcagacgggccugaacugcuacuacccgcuguaccgguacggguucuaccccaccgacggcguggggcaccagcccuaccgcgucguggugcucuccuucgagcugcugaacgcccccgccaccgucugcggcccgaagaaguccaccaaccucgugaagaacaagugcgugaacuucaacuucaacggccugaccgggacgggcguccugaccgagagcaacaagaaguuccugcccuuccagcaguucgggcgggacaucgcggacaccaccgacgccgugcgcgacccccagacgcucgagauccuggacaucaccccgugcagcuucggcggggugagcgucaucacccccggcaccaacgccuccaaccagguggccgugcuguaccaggacgucaacugcacggaggugcccguggccauccacgcggaccagcucacccccaccuggcgcgucuacagcaccggcuccaacguguuccagacgcgggccgggugccugaucggcgccgagcacgugaacaacagcuacgagugcgacaucccgaucggggccggcaucugcgcguccuaccagacccagaccaacagccgcuccgucgccagccaguccaucaucgccuacaccaugagccugggcgccgagaacuccguggccuacagcaacaacuccaucgcgauccccacgaacuucaccaucagcgugaccaccgagauccuccccgucuccaugacgaagaccagcguggacugcaccauguacaucugcggggacuccaccgagugcagcaaccugcugcuccaguacggcagcuucugcacgcagcugaaccgggcccugaccgggaucgccguggagcaggacaagaacacccaggaggucuucgcccaggugaagcagaucuacaagacgcccccgaucaaggacuucggcggguucaacuucucccagauccuccccgaccccagcaagcccuccaagcgcagcuucaucgaggaccugcuguucaacaaggugacccucgccgacgcgggcuucaucaagcaguacggcgacugccugggggacaucgccgcccgggaccugaucugcgcccagaaguucaacggccucaccguccugccgccccugcucaccgacgagaugaucgcccaguacaccuccgcgcugcuggccgggacgaucaccagcggcuggaccuucggggccggcgccgcgcuccagauccccuucgccaugcagauggccuaccgcuucaacggcaucggggugacccagaacgugcuguacgagaaccagaagcugaucgccaaccaguucaacuccgccaucggcaagauccaggacagccucuccagcacggcguccgcccuggggaagcugcaggacgucgugaaccagaacgcccaggcccucaacacccuggugaagcagcugagcuccaacuucggcgccaucagcuccguccucaacgacauccugagccggcuggacaagguggaggcggaggugcagaucgaccgccucaucaccgggcggcugcagucccugcagaccuacgucacccagcagcucauccgcgccgccgagauccgggccagcgccaaccuggcggccacgaagauguccgagugcgugcugggccagagcaagcgcguggacuucugcggcaagggguaccaccucaugagcuucccccaguccgccccgcacggcgucguguuccugcacgugaccuacguccccgcccaggagaagaacuucaccaccgcgcccgccaucugccacgacgggaaggcccacuucccccgggagggcguguucgucagcaacgggacgcacugguucgugacccagcgcaacuucuacgagccgcagaucaucaccaccgacaacacguucguguccggcagcugcgacgucgugaucggcaucgugaacaacaccgucuacgacccccugcagcccgagcucgacuccuucaaggaggagcuggacaaguacuucaagaaccacaccagccccgacguggaccugggggacaucuccggcaucaacgccagcguggucaacauccagaaggagaucgaccggcucaacgagguggccaagaaccugaacgagucccugaucgaccuccaggagcuggggaaguacgagcaguacaucaaguggccgugguacaucuggcugggcuucaucgcgggccucaucgccaucaucauggugaccaucaugcugugcugcaugacgagcugcugcuccugccugaaggggugcugcagcugcggcuccugcugcaaguucgacgaggacgacagcgagcccguccucaagggggugaagcugcacuacaccugaggacuagucccuguucccagagcccacuuuuuuuucuuuuuuugaaauaaaauagccugucuuucagaucucaaaggcucuuuucagagccaccaaaaaaaaaaaaaaaaaaaaaaaaaaaaaaaaaaaaaaaaaaaaaaaaaaaaaaaaaaaaaaaaaaaaaaaaaaaaaaaaaaaaaaaaaaaaaaaaaaaaa

SEQ ID NO: 12273 - RNA, 4094 nt, Artificial Sequence
  SARS-CoV-2/Wuhan/HBCDC-HB-01/2019__EPI_ISL_402132 spike protein mRNA gc (1-1273)
aggagagucccgcagucggcguccagcggcucugcuuguucgugugugugucguugcaggccuuauucaagcuuaccauguucguguuccugguccuccugccccuggugagcucccagugcgugaaccucaccacccgcacgcagcugccgcccgccuacaccaacagcaucacccggggcgucuacuaccccgacaagguguuccgcuccagcgugcugcacuccacccaggaccucuuccugcccuucuucagcaacgucacgugguuccacgccauccacguguccgggaccaacggcaccaagcgguucgacaacccggugcugcccuucaacgacggggucuacuucgcgagcaccgagaaguccaacaucauccgcggcuggaucuucgggacgacccucgacagcaagacccagucccugcugaucgugaacaacgccaccaacguggucaucaaggugugcgaguuccaguucugcaacgaccccuuccucggcguguacuaccacaagaacaacaagagcuggauggaguccgaguuccgggucuacagcuccgccaacaacugcacguucgaguacgugagccagcccuuccugauggaccuggagggcaagcaggggaacuucaagaaccuccgcgaguucguguucaagaacaucgacggcuacuucaagaucuacuccaagcacaccccgaucaaccugguccgggaccugccccagggguucagcgcccucgagccccugguggaccugcccaucggcaucaacaucacccgcuuccagacccuccuggcccugcaccgguccuaccucacgccgggggacagcagcuccggcuggaccgcgggcgccgccgccuacuacgugggguaccugcagccccgcaccuuccugcucaaguacaacgagaacggcaccaucacggacgcggucgacugcgcccuggacccccugagcgagaccaagugcacccucaaguccuucaccguggagaaggggaucuaccagacgagcaacuuccgggugcagcccaccgaguccaucguccgcuucccgaacaucaccaaccugugccccuucggcgagguguucaacgccacccgguucgccagcgucuacgccuggaaccgcaagcggaucuccaacugcguggcggacuacagcgugcuguacaacuccgccagcuucuccacguucaagugcuacggcgucagccccaccaagcucaacgaccugugcuucaccaacguguacgccgacuccuucgugauccgcggggacgagguccggcagaucgcccccggccagaccgggaagaucgccgacuacaacuacaagcugccggacgacuucacgggcugcgugaucgcguggaacagcaacaaccucgacuccaaggucgggggcaacuacaacuaccuguaccgccuguuccgcaagagcaaccucaagcccuucgagcgggacaucuccaccgagaucuaccaggccggcagcacccccugcaacgggguggagggcuucaacugcuacuucccccugcaguccuacggguuccagccgaccaacggcgugggguaccagcccuaccggguggucgugcugagcuucgagcuccugcacgcccccgccacggugugcggccccaagaaguccaccaaccuggucaagaacaagugcgugaacuucaacuucaacggccucaccgggaccggcgugcugaccgagagcaacaagaaguuccugccguuccagcaguucgggcgcgacaucgccgacacgaccgacgcgguccgcgacccccagacccuggagauccucgacaucacccccugcagcuucggcgggguguccgugaucacgccgggcaccaacaccagcaaccaggucgccgugcuguaccaggacgugaacugcaccgagguccccguggccauccacgccgaccagcugacgcccaccuggcggguguacuccaccggcagcaacgucuuccagacccgcgccgggugccucaucggcgcggagcacgugaacaacuccuacgagugcgacauccccaucggggccggcaucugcgccagcuaccagacgcagaccaacuccccgcggcgcgcccggagcguggcgucccagagcaucaucgccuacaccaugucccugggcgccgagaacagcgucgccuacuccaacaacagcaucgccauccccaccaacuucacgaucuccgugaccaccgagauccugcccgugagcaugaccaagacgagcgucgacugcaccauguacaucugcggggacuccaccgagugcagcaaccuccugcugcaguacggcuccuucugcacccagcucaaccgcgcgcugacggggaucgccguggagcaggacaagaacacccaggagguguucgcccaggucaagcagaucuacaagacgcccccgaucaaggacuucggcggguucaacuucagccagauccugcccgaccccuccaagcccagcaagcgguccuucaucgaggaccuccuguucaacaaggugacccuggccgacgccggcuucaucaagcaguacggcgacugccucggggacaucgcggcccgcgaccugaucugcgcccagaaguucaacggccugaccgugcucccgccccugcugaccgacgagaugaucgcccaguacaccagcgcccuccuggcggggaccaucacguccggcuggaccuucggggccggcgccgcccugcagauccccuucgcgaugcagauggccuaccgguucaacggcaucggggucacccagaacgugcucuacgagaaccagaagcugaucgccaaccaguucaacagcgccaucggcaagauccaggacucccugagcuccaccgccagcgcgcucgggaagcugcaggacguggucaaccagaacgcccaggcccugaacacgcucgugaagcagcuguccagcaacuucggcgccaucuccagcgugcugaacgacauccucucccgccuggacaaggucgaggccgaggugcagaucgaccggcugaucaccgggcgccuccagagccugcagaccuacgugacccagcagcugauccgggcggccgagauccgcgccagcgccaaccucgccgcgaccaagauguccgagugcguccugggccagagcaagcggguggacuucugcggcaagggguaccaccugauguccuucccccagagcgccccgcacggcguggucuuccuccacgugacguacguccccgcccaggagaagaacuucaccaccgcccccgcgaucugccacgacgggaaggcccacuucccccgcgagggcguguucguguccaacgggacccacugguucgucacgcagcggaacuucuacgagccgcagaucaucaccaccgacaacaccuucgugagcggcaacugcgacguggucaucggcaucgugaacaacacgguguacgacccccugcagcccgagcuggacuccuucaaggaggagcucgacaaguacuucaagaaccacaccagccccgacgucgaccugggggacaucuccggcaucaacgccagcguggugaacauccagaaggagaucgaccgccugaacgaggucgccaagaaccucaacgagucccugaucgaccugcaggagcucgggaaguacgagcaguacaucaaguggccgugguacaucuggcugggcuucaucgccggccugaucgcgaucgugauggugaccaucaugcucugcugcaugaccagcugcugcuccugccugaaggggugcugcagcugcggcuccugcugcaaguucgacgaggacgacagcgagcccguccugaagggggugaagcuccacuacacgugaggacuagucccuguucccagagcccacuuuuuuuucuuuuuuugaaauaaaauagccugucuuucagaucucaaaggcucuuuucagagccaccaaaaaaaaaaaaaaaaaaaaaaaaaaaaaaaaaaaaaaaaaaaaaaaaaaaaaaaaaaaaaaaaaaaaaaaaaaaaaaaaaaaaaaaaaaaaaaaaaaaaa

SEQ ID NO: 12274 - RNA, 4094 nt, Artificial Sequence
  SARS-CoV-2/Guangdong/20SF028/2020__EPI_ISL_403936 spike protein mRNA gc (1-1273)
aggagagucccgcagucggcguccagcggcucugcuuguucgugugugugucguugcaggccuuauucaagcuuaccauguucguguuccugguccuccugccccuggugagcucccagugcgugaaccucaccacccgcacgcagcugccgcccgccuacaccaacagcuucacccggggcgucuacuaccccgacaagguguuccgcuccagcgugcuguacuccacccaggaccucuuccugcccuucuucagcaacgucacgugguuccacgccauccacguguccgggaccaacggcaccaagcgguucgacaacccggugcugcccuucaacgacggggucuacuucgcgagcaccgagaaguccaacaucauccgcggcuggaucuucgggacgacccucgacagcaagacccagucccugcugaucgugaacaacgccaccaacguggucaucaaggugugcgaguuccaguucugcaacgaccccuuccucggcguguacuaccacaagaacaacaagagcuggauggaguccgaguuccgggucuacagcuccgccaacaacugcacguucgaguacgugagccagcccuuccugauggaccuggagggcaagcaggggaacuucaagaaccuccgcgaguucguguucaagaacaucgacggcuacuucaagaucuacuccaagcacaccccgaucaaccugguccgggaccugccccagggguucagcgcccucgagccccugguggaccugcccaucggcaucaacaucacccgcuuccagacccuccuggcccugcaccgguccuaccucacgccgggggacagcagcuccggcuggaccgcgggcgccgccgccuacuacgugggguaccugcagccccgcaccuuccugcucaaguacaacgagaacggcaccaucacggacgcggucgacugcgcccuggacccccugagcgagaccaagugcacccucaaguccuucaccguggagaaggggaucuaccagacgagcaacuuccgggugcagcccaccgaguccaucguccgcuucccgaacaucaccaaccugugccccuucggcgagguguucaacgccacccgguucgccagcgucuacgccuggaaccgcaagcggaucuccaacugcguggcggacuacagcgugcuguacaacuccgccagcuucuccacguucaagugcuacggcgucagccccaccaagcucaacgaccugugcuucaccaacguguacgccgacuccuucgugauccgcggggacgagguccggcagaucgcccccggccagaccgggaagaucgccgacuacaacuacaagcugccggacgacuucacgggcugcgugaucgcguggaacagcaacaaccucgacuccaaggucgggggcaacuacaacuaccuguaccgccuguuccgcaagagcaaccucaagcccuucgagcgggacaucuccaccgagaucuaccaggccggcagcacccccugcaacgggguggagggcuucaacugcuacuucccccugcaguccuacggguuccagccgaccaacggcgugggguaccagcccuaccggguggucgugcugagcuucgagcuccugcacgcccccgccacggugugcggccccaagaaguccaccaaccuggucaagaacaagugcgugaacuucaacuucaacggccucaccgggaccggcgugcugaccgagagcaacaagaaguuccugccguuccagcaguucgggcgcgacaucgccgacacgaccgacgcgguccgcgacccccagacccuggagauccucgacaucacccccugcagcuucggcgggguguccgugaucacgccgggcaccaacaccagcaaccaggucgccgugcuguaccaggacgugaacugcaccgagguccccguggccauccacgccgaccagcugacgcccaccuggcggguguacuccaccggcagcaacgucuuccagacccgcgccgggugccucaucggcgcggagcacgugaacaacuccuacgagugcgacauccccaucggggccggcaucugcgccagcuaccagacgcagaccaacuccccgcggcgcgcccggagcguggcgucccagagcaucaucgccuacaccaugucccugggcgccgagaacagcgucgccuacuccaacaacagcaucgccauccccaccaacuucacgaucuccgugaccaccgagauccugcccgugagcaugaccaagacgagcgucgacugcaccauguacaucugcggggacuccaccgagugcagcaaccuccugcugcaguacggcuccuucugcacccagcucaaccgcgcgcugacggggaucgccguggagcaggacaagaacacccaggagguguucgcccaggucaagcagaucuacaagacgcccccgaucaaggacuucggcggguucaacuucagccagauccugcccgaccccuccaagcccagcaagcgguccuucaucgaggaccuccuguucaacaaggugacccuggccgacgccggcuucaucaagcaguacggcgacugccucggggacaucgcggcccgcgaccugaucugcgcccagaaguucaacggccugaccgugcucccgccccugcugaccgacgagaugaucgcccaguacaccagcgcccuccuggcggggaccaucacguccggcuggaccuucggggccggcgccgcccugcagauccccuucgcgaugcagauggccuaccgguucaacggcaucggggucacccagaacgugcucuacgagaaccagaagcugaucgccaaccaguucaacagcgccaucggcaagauccaggacucccugagcuccaccgccagcgcgcucgggaagcugcaggacguggucaaccagaacgcccaggcccugaacacgcucgugaagcagcuguccagcaacuucggcgccaucuccagcgugcugaacgacauccucucccgccuggacaaggucgaggccgaggugcagaucgaccggcugaucaccgggcgccuccagagccugcagaccuacgugacccagcagcugauccgggcggccgagauccgcgccagcgccaaccucgccgcgaccaagauguccgagugcguccugggccagagcaagcggguggacuucugcggcaagggguaccaccugauguccuucccccagagcgccccgcacggcguggucuuccuccacgugacguacguccccgcccaggagaagaacuucaccaccgcccccgcgaucugccacgacgggaaggcccacuucccccgcgagggcguguucguguccaacgggacccacugguucgucacgcagcggaacuucuacgagccgcagaucaucaccaccgacaacaccuucgugagcggcaacugcgacguggucaucggcaucgugaacaacacgguguacgacccccugcagcccgagcuggacuccuucaaggaggagcucgacaaguacuucaagaaccacaccagccccgacgucgaccugggggacaucuccggcaucaacgccagcguggugaacauccagaaggagaucgaccgccugaacgaggucgccaagaaccucaacgagucccugaucgaccugcaggagcucgggaaguacgagcaguacaucaaguggccgugguacaucuggcugggcuucaucgccggccugaucgcgaucgugauggugaccaucaugcucugcugcaugaccagcugcugcuccugccugaaggggugcugcagcugcggcuccugcugcaaguucgacgaggacgacagcgagcccguccugaagggggugaagcuccacuacacgugaggacuagucccuguucccagagcccacuuuuuuuucuuuuuuugaaauaaaauagccugucuuucagaucucaaaggcucuuuucagagccaccaaaaaaaaaaaaaaaaaaaaaaaaaaaaaaaaaaaaaaaaaaaaaaaaaaaaaaaaaaaaaaaaaaaaaaaaaaaaaaaaaaaaaaaaaaaaaaaaaaaaa

SEQ ID NO: 12275 - RNA, 4094 nt, Artificial Sequence
  SARS-CoV-2/Shenzhen/SZTH-001/2020__EPI_ISL_406592 spike protein mRNA gc (1-1273)
aggagagucccgcagucggcguccagcggcucugcuuguucgugugugugucguugcaggccuuauucaagcuuaccauguucguguuccugguccuccugccccuggugagcucccagugcgugaaccucaccacccgcacgcagcugccgcccgccuacaccaacagcuucacccggggcgucuacuaccccgacaagguguuccgcuccagcgugcugcacuccacccaggaccucuuccugcccuucuucagcaacgucacgugguuccacgccauccacguguccgggaccaacggcaccaagcgguucgacaacccggugcugcccuucaacgacggggucuacuucgcgagcaccgagaaguccaacaucauccgcggcuggaucuucgggacgacccucgacagcaagacccagucccugcugaucgugaacaacgccaccaacguggucaucaaggugugcgaguuccaguucugcaacgaccccuuccucggcguguacuaccacaagaacaacaagagcuggauggaguccgaguuccgggucuacagcuccgccaacaacugcacguucgaguacgugagccagcccuuccugauggaccuggagggcaagcaggggaacuucaagaaccuccgcgaguucguguucaagaacaucgacggcuacuucaagaucuacuccaagcacaccccgaucaaccugguccgggaccugccccagggguucagcgcccucgagccccugguggaccugcccaucggcaucaacaucacccgcuuccagacccuccuggcccugcaccgguccuaccucacgccgggggacagcagcuccggcuggaccgcgggcgccgccgccuacuacgugggguaccugcagccccgcaccuuccugcucaaguacaacgagaacggcaccaucacggacgcggucgacugcgcccuggacccccugagcgagaccaagugcacccucaaguccuucaccguggagaaggggaucuaccagacgagcaacuuccgggugcagcccaccgaguccaucguccgcuucccgaacaucaccaaccugugccccuucggcgagguguucaacgccacccgguucgccagcgucuacgccuggaaccgcaagcggaucuccaacugcguggcggacuacagcgugcuguacaacuccgccagcuucuccacguucaagugcuacggcgucagccccaccaagcucaacgaccugugcuucaccaacguguacgccgacuccuucgugauccgcggggacgagguccggcagaucgcccccggccagaccgggaagaucgccgacuacaacuacaagcugccggacgacuucacgggcugcgugaucgcguggaacagcaacaaccucgacuccaaggucgggggcaacuacaacuaccuguaccgccuguuccgcaagagcaaccucaagcccuucgagcgggacaucuccaccgagaucuaccaggccggcagcacccccugcaacgggguggagggcuucaacugcuacuucccccugcaguccuacggguuccagccgaccaacggcgugggguaccagcccuaccggguggucgugcugagcuucgagcuccugcacgcccccgccacggugugcggccccaagaaguccaccaaccuggucaagaacaagugcgugaacuucaacuucaacggccucaccgggaccggcgugcugaccgagagcaacaagaaguuccugccguuccagcaguucgggcgcgacaucgccgacacgaccgacgcgguccgcgacccccagacccuggagauccucgacaucacccccugcagcuucggcgggguguccgugaucacgccgggcaccaacaccagcaaccaggucgccgugcuguaccaggacgugaacugcaccgagguccccguggccauccacgccgaccagcugacgcccaccuggcggguguacuccaccggcagcaacgucuuccagacccgcgccgggugccucaucggcgcggagcacgugaacaacuccuacgagugcgacauccccaucggggccggcaucugcgccagcuaccagacgcagaccaacuccccgcggcgcgcccggagcguggcgucccagagcaucaucgccuacaccaugucccugggcgccgagaacagcgucgccuacuccaacaacagcaucgccauccccaccaacuucacgaucuccgugaccaccgagauccugcccgugagcaugaccaagacgagcgucgacugcaccauguacaucugcggggacuccaccgagugcagcaaccuccugcugcaguacggcuccuucugcacccagcucaaccgcgcgcugacggggaucgccguggagcaggacaagaacacccaggagguguucgcccaggucaagcagaucuacaagacgcccccgaucaaggacuucggcggguucaacuucagccagauccugcccgaccccuccaagcccagcaagcgguccuucaucgaggaccuccuguucaacaaggugacccuggccgacgccggcuucaucaagcaguacggcgacugccucggggacaucgcggcccgcgaccugaucugcgcccagaaguucaacggccugaccgugcucccgccccugcugaccgacgagaugaucgcccaguacaccagcgcccuccuggcggggaccaucacguccggcuggaccuucggggccggcgccgcccugcagauccccuucgcgaugcagauggccuaccgguucaacggcaucggggucacccagaacgugcucuacgagaaccagaagcugaucgccaaccaguucaacagcgccaucggcaagauccaggacucccugagcuccaccgccagcgcgcucgggaagcugcaggacguggucaaccagaacgcccaggcccugaacacgcucgugaagcagcuguccagcaacuucggcgccaucuccagcgugcugaacgacauccucucccgccuggacaaggucgaggccgaggugcagaucgaccggcugaucaccgggcgccuccagagccugcagaccuacgugacccagcagcugauccgggcggccgagauccgcgccagcgccaaccucgccgcgaccaagauguccgagugcguccugggccagagcaagcggguggacuucugcggcaagggguaccaccugauguccuucccccagagcgccccgcacggcguggucuuccuccacgugacguacguccccgcccaggagaagaacuucaccaccgcccccgcgaucugccacgacgggaaggcccacuucccccgcgagggcguguucguguccaacgggacccacugguucgucacgcagcggaacuucuacgagccgcagaucaucaccaccgacaacaccuucgugagcggcaacugcgacgugcugaucggcaucgucaacaacacgguguacgacccccugcagcccgagcucgacuccuucaaggaggagcuggacaaguacuucaagaaccacaccagccccgacguggaccugggggacaucuccggcaucaacgccagcgucgugaacauccagaaggagaucgaccgccucaacgagguggccaagaaccugaacgagucccugaucgaccuccaggagcuggggaaguacgagcaguacaucaaguggccgugguacaucuggcugggcuucaucgccggccucaucgcgaucgucauggugaccaucaugcugugcugcaugaccagcugcugcuccugccugaaggggugcugcagcugcggcuccugcugcaaguucgacgaggacgacagcgggcccgugcucaagggcgucaagcugcacuacacgugaggacuagucccuguucccagagcccacuuuuuuuucuuuuuuugaaauaaaauagccugucuuucagaucucaaaggcucuuuucagagccaccaaaaaaaaaaaaaaaaaaaaaaaaaaaaaaaaaaaaaaaaaaaaaaaaaaaaaaaaaaaaaaaaaaaaaaaaaaaaaaaaaaaaaaaaaaaaaaaaaaaaa

SEQ ID NO: 12276 - RNA, 4094 nt, Artificial Sequence
  SARS-CoV-2/Shenzhen/SZTH-004/2020__EPI_ISL_406595 spike protein mRNA gc (1-1273)
aggagagucccgcagucggcguccagcggcucugcuuguucgugugugugucguugcaggccuuauucaagcuuaccauguucguguuccugguccuccugccccuggugagcucccagugcgugaaccucaccacccgcacgcagcugccgcccgccuacaccaacagcuucacccggggcgucuacuaccccgacaagguguuccgcuccagcgugcugcacuccacccaggaccucuuccugcccuucuucagcaacgucacgugguuccacgccauccacguguccgggaccaacggcaccaagcgguucgacaacccggugcugcccuucaacgacggggucuacuucgcgagcaccgagaaguccaacaucauccgcggcuggaucuucgggacgacccucgacagcaagacccagucccugcugaucgugaacaacgccaccaacguggucaucaaggugugcgaguuccaguucugcaacgaccccuuccucggcguguacuaccacaagaacaacaagagcuggauggaguccgaguuccgggucuacagcuccgccaacaacugcacguucgaguacgugagccagcccuuccugauggaccuggagggcaagcaggggaacuucaagaaccuccgcgaguucguguucaagaacaucgacggcuacuucaagaucuacuccaagcacaccccgaucaaccugguccgggaccugccccagggguucagcgcccucgagccccugguggaccugcccaucggcaucaacaucacccgcuuccagacccuccuggcccugcaccgguccuaccucacgccgggggacagcagcuccggcuggaccgcgggcgccgccgccuacuacgugggguaccugcagccccgcaccuuccugcucaaguacaacgagaacggcaccaucacggacgcggucgacugcgcccuggacccccugagcgagaccaagugcacccucaaguccuucaccguggagaaggggaucuaccagacgagcaacuuccgggugcagcccaccgaguccaucguccgcuucccgaacaucaccaaccugugccccuucggcgagguguucaacgccacccgguucgccagcgucuacgccugggaccgcaagcggaucuccaacugcguggcguacuacagcgugcuguacaacuccgccagcuucuccacguucaagugcuacggcgucagccccaccaagcucaacgaccugugcuucaccaacguguacgccgacuccuucgugauccgcggggacgagguccggcagaucgcccccggccagaccgggaagaucgccgacuacaacuacaagcugccggacgacuucacgggcugcgugaucgcguggaacagcaacaaccucgacuccaaggucgggggcaacuacaacuaccuguaccgccuguuccgcaagagcaaccucaagcccuucgagcgggacaucuccaccgagaucuaccaggccggcagcacccccugcaacgggguggagggcuucaacugcuacuucccccugcaguccuacggguuccagccgaccaacggcgugggguaccagcccuaccggguggucgugcugagcuucgagcuccugcacgcccccgccacggugugcggccccaagaaguccaccaaccuggucaagaacaagugcgugaacuucaacuucaacggccucaccgggaccggcgugcugaccgagagcaacaagaaguuccugccguuccagcaguucgggcgcgacaucgccgacacgaccgacgcgguccgcgacccccagacccuggagauccucgacaucacccccugcagcuucggcgggguguccgugaucacgccgggcaccaacaccagcaaccaggucgccgugcuguaccaggacgugaacugcaccgagguccccguggccauccacgccgaccagcugacgcccaccuggcggguguacuccaccggcagcaacgucuuccagacccgcgccgggugccucaucggcgcggagcacgugaacaacuccuacgagugcgacauccccaucggggccggcaucugcgccagcuaccagacgcagaccaacuccccgcggcgcgcccggagcguggcgucccagagcaucaucgccuacaccaugucccugggcgccgagaacagcgucgccuacuccaacaacagcaucgccauccccaccaacuucacgaucuccgugaccaccgagauccugcccgugagcaugaccaagacgagcgucgacugcaccauguacaucugcggggacuccaccgagugcagcaaccuccugcugcaguacggcuccuucugcacccagcucaaccgcgcgcugacggggaucgccguggagcaggacaagaacacccaggagguguucgcccaggucaagcagaucuacaagacgcccccgaucaaggacuucggcggguucaacuucagccagauccugcccgaccccuccaagcccagcaagcgguccuucaucgaggaccuccuguucaacaaggugacccuggccgacgccggcuucaucaagcaguacggcgacugccucggggacaucgcggcccgcgaccugaucugcgcccagaaguucaacggccugaccgugcucccgccccugcugaccgacgagaugaucgcccaguacaccagcgcccuccuggcggggaccaucacguccggcuggaccuucggggccggcgccgcccugcagauccccuucgcgaugcagauggccuaccgguucaacggcaucggggucacccagaacgugcucuacgagaaccagaagcugaucgccaaccaguucaacagcgccaucggcaagauccaggacucccugagcuccaccgccagcgcgcucgggaagcugcaggacguggucaaccagaacgcccaggcccugaacacgcucgugaagcagcuguccagcaacuucggcgccaucuccagcgugcugaacgacauccucucccgccuggacaaggucgaggccgaggugcagaucgaccggcugaucaccgggcgccuccagagccugcagaccuacgugacccagcagcugauccgggcggccgagauccgcgccagcgccaaccucgccgcgaccaagauguccgagugcguccugggccagagcaagcggguggacuucugcggcaagggguaccaccugauguccuucccccagagcgccccgcacggcguggucuuccuccacgugacguacguccccgcccaggagaagaacuucaccaccgcccccgcgaucugccacgacgggaaggcccacuucccccgcgagggcguguucguguccaacgggacccacugguucgucacgcagcggaacuucuacgagccgcagaucaucaccaccgacaacaccuucgugagcggcaacugcgacguggucaucggcaucgugaacaacacgguguacgacccccugcagcccgagcuggacuccuucaaggaggagcucgacaaguacuucaagaaccacaccagccccgacgucgaccugggggacaucuccggcaucaacgccagcguggugaacauccagaaggagaucgaccgccugaacgaggucgccaagaaccucaacgagucccugaucgaccugcaggagcucgggaaguacgagcaguacaucaaguggccgugguacaucuggcugggcuucaucgccggccugaucgcgaucgugauggugaccaucaugcucugcugcaugaccagcugcugcuccugccugaaggggugcugcagcugcggcuccugcugcaaguucgacgaggacgacagcgagcccguccugaagggggugaagcuccacuacacgugaggacuagucccuguucccagagcccacuuuuuuuucuuuuuuugaaauaaaauagccugucuuucagaucucaaaggcucuuuucagagccaccaaaaaaaaaaaaaaaaaaaaaaaaaaaaaaaaaaaaaaaaaaaaaaaaaaaaaaaaaaaaaaaaaaaaaaaaaaaaaaaaaaaaaaaaaaaaaaaaaaaaa

SEQ ID NO: 12277 - RNA, 4094 nt, Artificial Sequence
  SARS-CoV-2/France/IDF0372/2020__EPI_ISL_406596 spike protein mRNA gc (1-1273)
aggagagucccgcagucggcguccagcggcucugcuuguucgugugugugucguugcaggccuuauucaagcuuaccauguucguguuccugguccuccugccccuggugagcucccagugcgugaaccucaccacccgcacgcagcugccgcccgccuacaccaacagcuucacccggggcgucuacuaccccgacaagguguuccgcuccagcgugcugcacuccacccaggaccucuuccugcccuucuucagcaacgucacgugguuccacgccauccacguguccgggaccaacggcaccaagcgguucgacaacccggugcugcccuucaacgacggggucuacuucgcgagcaccgagaaguccaacaucauccgcggcuggaucuucgggacgacccucgacagcaagacccagucccugcugaucgugaacaacgccaccaacguggucaucaaggugugcgaguuccaguucugcaacgaccccuuccucggcguguacuaccacaagaacaacaagagcuggauggaguccgaguuccgggucuacagcuccgccaacaacugcacguucgaguacgugagccagcccuuccugauggaccuggagggcaagcaggggaacuucaagaaccuccgcgaguucguguucaagaacaucgacggcuacuucaagaucuacuccaagcacaccccgaucaaccugguccgggaccugccccagggguucagcgcccucgagccccugguggaccugcccaucggcaucaacaucacccgcuuccagacccuccuggcccugcaccgguccuaccucacgccgggggacagcagcuccggcuggaccgcgggcgccgccgccuacuacgugggguaccugcagccccgcaccuuccugcucaaguacaacgagaacggcaccaucacggacgcggucgacugcgcccuggacccccugagcgagaccaagugcacccucaaguccuucaccguggagaaggggaucuaccagacgagcaacuuccgggugcagcccaccgaguccaucguccgcuucccgaacaucaccaaccugugccccuucggcgagguguucaacgccacccgguucgccagcgucuacgccuggaaccgcaagcggaucuccaacugcguggcggacuacagcuuccuguacaacuccgccagcuucuccacguucaagugcuacggcgugagccccaccaagcucaacgaccugugcuucaccaacgucuacgccgacuccuucgugauccgcggggacgaggugcggcagaucgcccccggccagaccgggaagaucgccgacuacaacuacaagcugccggacgacuucacgggcugcgucaucgcguggaacagcaacaaccucgacuccaaggucgggggcaacuacaacuaccuguaccgccuguuccgcaagagcaaccucaagcccuucgagcgggacaucuccaccgagaucuaccaggccggcagcacccccugcaacgggguggagggcuucaacugcuacuucccccugcaguccuacggguuccagccgaccaacggcgugggguaccagcccuaccggguggugguccugagcuucgagcuccugcacgcccccgccacggugugcggccccaagaaguccaccaaccuggugaagaacaagugcgucaacuucaacuucaacggccucaccgggaccggcgugcugaccgagagcaacaagaaguuccugccguuccagcaguucgggcgcgacaucgccgacacgaccgacgcggugcgcgacccccagacccuggagauccucgacaucacccccugcagcuucggcggggucuccgugaucacgccgggcaccaacaccagcaaccagguggccguccuguaccaggacgugaacugcaccgaggugcccgucgccauccacgccgaccagcugacgcccaccuggcggguguacuccaccggcagcaacguguuccagacccgcgccgggugccucaucggcgcggagcacgucaacaacuccuacgagugcgacauccccaucggggccggcaucugcgccagcuaccagacgcagaccaacuccccgcggcgcgcccggagcguggcgucccagagcaucaucgccuacaccaugucccugggcgccgagaacagcguggccuacuccaacaacagcaucgccauccccaccaacuucacgaucuccgucaccaccgagauccugcccgugagcaugaccaagacgagcguggacugcaccauguacaucugcggggacuccaccgagugcagcaaccuccugcugcaguacggcuccuucugcacccagcucaaccgcgcgcugacggggaucgccgucgagcaggacaagaacacccaggagguguucgcccaggugaagcagaucuacaagacgcccccgaucaaggacuucggcggguucaacuucagccagauccugcccgaccccuccaagcccagcaagcgguccuucaucgaggaccuccuguucaacaaggucacccuggccgacgccggcuucaucaagcaguacggcgacugccucggggacaucgcggcccgcgaccugaucugcgcccagaaguucaacggccugaccgugcucccgccccugcugaccgacgagaugaucgcccaguacaccagcgcccuccuggcggggaccaucacguccggcuggaccuucggggccggcgccgcccugcagauccccuucgcgaugcagauggccuaccgguucaacggcaucggggugacccagaacguccucuacgagaaccagaagcugaucgccaaccaguucaacagcgccaucggcaagauccaggacucccugagcuccaccgccagcgcgcucgggaagcugcaggacguggugaaccagaacgcccaggcccugaacacgcucgucaagcagcuguccagcaacuucggcgccaucuccagcgugcugaacgacauccucucccgccuggacaagguggaggccgagguccagaucgaccggcugaucaccgggcgccuccagagccugcagaccuacgugacccagcagcugauccgggcggccgagauccgcgccagcgccaaccucgccgcgaccaagauguccgagugcgugcugggccagagcaagcgggucgacuucugcggcaagggguaccaccugauguccuucccccagagcgccccgcacggcgugguguuccuccacgucacguacgugcccgcccaggagaagaacuucaccaccgcccccgcgaucugccacgacgggaaggcccacuucccccgcgagggcgucuucguguccaacgggacccacugguucgugacgcagcggaacuucuacgagccgcagaucaucaccaccgacaacaccuucgucagcggcaacugcgacguggugaucggcaucgucaacaacacgguguacgacccccugcagcccgagcuggacuccuucaaggaggagcucgacaaguacuucaagaaccacaccagccccgacguggaccugggggacaucuccggcaucaacgccagcgucgugaacauccagaaggagaucgaccgccugaacgagguggccaagaaccucaacgagucccugaucgaccugcaggagcucgggaaguacgagcaguacaucaaguggccgugguacaucuggcugggcuucaucgccggccugaucgcgaucgucauggugaccaucaugcucugcugcaugaccagcugcugcuccugccugaaggggugcugcagcugcggcuccugcugcaaguucgacgaggacgacagcgagcccgugcugaagggggucaagcuccacuacacgugaggacuagucccuguucccagagcccacuuuuuuuucuuuuuuugaaauaaaauagccugucuuucagaucucaaaggcucuuuucagagccaccaaaaaaaaaaaaaaaaaaaaaaaaaaaaaaaaaaaaaaaaaaaaaaaaaaaaaaaaaaaaaaaaaaaaaaaaaaaaaaaaaaaaaaaaaaaaaaaaaaaaa

SEQ ID NO: 12278 - RNA, 4094 nt, Artificial Sequence
  SARS-CoV-2/Australia/VIC01/2020__EPI_ISL_406844 spike protein mRNA gc (1-1273)
aggagagucccgcagucggcguccagcggcucugcuuguucgugugugugucguugcaggccuuauucaagcuuaccauguucguguuccugguccuccugccccuggugagcucccagugcgugaaccucaccacccgcacgcagcugccgcccgccuacaccaacagcuucacccggggcgucuacuaccccgacaagguguuccgcuccagcgugcugcacuccacccaggaccucuuccugcccuucuucagcaacgucacgugguuccacgccauccacguguccgggaccaacggcaccaagcgguucgacaacccggugcugcccuucaacgacggggucuacuucgcgagcaccgagaaguccaacaucauccgcggcuggaucuucgggacgacccucgacagcaagacccagucccugcugaucgugaacaacgccaccaacguggucaucaaggugugcgaguuccaguucugcaacgaccccuuccucggcguguacuaccacaagaacaacaagagcuggauggaguccgaguuccgggucuacagcuccgccaacaacugcacguucgaguacgugagccagcccuuccugauggaccuggagggcaagcaggggaacuucaagaaccuccgcgaguucguguucaagaacaucgacggcuacuucaagaucuacuccaagcacaccccgaucaaccugguccgggaccugccccagggguucagcgcccucgagccccugguggaccugcccaucggcaucaacaucacccgcuuccagacccuccuggcccugcaccggcgcuaccucacgccgggggacuccagcagcggcuggaccgcgggcgccgccgccuacuacgugggguaccugcagccccggaccuuccugcucaaguacaacgagaacggcaccaucacggacgcggucgacugcgcccuggacccccuguccgagaccaagugcacccucaagagcuucaccguggagaaggggaucuaccagacguccaacuuccgcgugcagcccaccgagagcaucguccgguucccgaacaucaccaaccugugccccuucggcgagguguucaacgccacccgcuucgccuccgucuacgccuggaaccggaagcgcaucagcaacugcguggcggacuacuccgugcuguacaacagcgccuccuucagcacguucaagugcuacggcgucucccccaccaagcucaacgaccugugcuucaccaacguguacgccgacagcuucgugauccgcggggacgagguccggcagaucgcccccggccagaccgggaagaucgccgacuacaacuacaagcugccggacgacuucacgggcugcgugaucgcguggaacuccaacaaccucgacagcaaggucgggggcaacuacaacuaccuguaccggcuguuccgcaaguccaaccucaagcccuucgagcgggacaucagcaccgagaucuaccaggccggcuccacccccugcaacgggguggagggcuucaacugcuacuucccccugcagagcuacggguuccagccgaccaacggcgugggguaccagcccuaccgcguggucgugcuguccuucgagcuccugcacgcccccgccacggugugcggccccaagaaguccaccaaccuggucaagaacaagugcgugaacuucaacuucaacggccucaccgggaccggcgugcugaccgagagcaacaagaaguuccugccguuccagcaguucgggcgcgacaucgccgacacgaccgacgcgguccgggacccccagacccuggagauccucgacaucacccccugcagcuucggcggggugagcgugaucacgccgggcaccaacaccuccaaccaggucgccgugcuguaccaggacgugaacugcaccgagguccccguggccauccacgccgaccagcugacgcccaccuggcgcguguacagcaccggcuccaacgucuuccagacccgggccgggugccucaucggcgcggagcacgugaacaacagcuacgagugcgacauccccaucggggccggcaucugcgccuccuaccagacgcagaccaacagcccgcgccgggcccgcuccguggcgagccaguccaucaucgccuacaccaugagccugggcgccgagaacuccgucgccuacagcaacaacuccaucgccauccccaccaacuucacgaucagcgugaccaccgagauccugcccguguccaugaccaagacgagcgucgacugcaccauguacaucugcggggacagcaccgagugcuccaaccuccugcugcaguacggcagcuucugcacccagcucaaccgggcgcugacggggaucgccguggagcaggacaagaacacccaggagguguucgcccaggucaagcagaucuacaagacgcccccgaucaaggacuucggcggguucaacuucucccagauccugcccgaccccagcaagcccuccaagcgcagcuucaucgaggaccuccuguucaacaaggugacccuggccgacgccggcuucaucaagcaguacggcgacugccucggggacaucgcggcccgggaccugaucugcgcccagaaguucaacggccugaccgugcucccgccccugcugaccgacgagaugaucgcccaguacaccuccgcccuccuggcggggaccaucacgagcggcuggaccuucggggccggcgccgcccugcagauccccuucgcgaugcagauggccuaccgcuucaacggcaucggggucacccagaacgugcucuacgagaaccagaagcugaucgccaaccaguucaacuccgccaucggcaagauccaggacagccuguccagcaccgccuccgcgcucgggaagcugcaggacguggucaaccagaacgcccaggcccugaacacgcucgugaagcagcugagcuccaacuucggcgccaucagcuccgugcugaacgacauccucagccggcuggacaaggucgaggccgaggugcagaucgaccgccugaucaccgggcggcuccagucccugcagaccuacgugacccagcagcugauccgcgcggccgagauccgggccagcgccaaccucgccgcgaccaagaugagcgagugcguccugggccaguccaagcgcguggacuucugcggcaagggguaccaccugaugagcuucccccaguccgccccgcacggcguggucuuccuccacgugacguacguccccgcccaggagaagaacuucaccaccgcccccgcgaucugccacgacgggaaggcccacuucccccgggagggcguguucgugagcaacgggacccacugguucgucacgcagcgcaacuucuacgagccgcagaucaucaccaccgacaacaccuucguguccggcaacugcgacguggucaucggcaucgugaacaacacgguguacgacccccugcagcccgagcuggacagcuucaaggaggagcucgacaaguacuucaagaaccacaccucccccgacgucgaccugggggacaucagcggcaucaacgccuccguggugaacauccagaaggagaucgaccggcugaacgaggucgccaagaaccucaacgagagccugaucgaccugcaggagcucgggaaguacgagcaguacaucaaguggccgugguacaucuggcugggcuucaucgccggccugaucgcgaucgugauggugaccaucaugcucugcugcaugaccuccugcugcagcugccugaaggggugcugcuccugcggcagcugcugcaaguucgacgaggacgacuccgagcccguccugaagggggugaagcuccacuacacgugaggacuagucccuguucccagagcccacuuuuuuuucuuuuuuugaaauaaaauagccugucuuucagaucucaaaggcucuuuucagagccaccaaaaaaaaaaaaaaaaaaaaaaaaaaaaaaaaaaaaaaaaaaaaaaaaaaaaaaaaaaaaaaaaaaaaaaaaaaaaaaaaaaaaaaaaaaaaaaaaaaaaa

SEQ ID NO: 12279 - RNA, 4094 nt, Artificial Sequence
  SARS-CoV-2/Germany/BavPat1/2020__EPI_ISL_406862 spike protein mRNA gc (1-1273)
aggagagucccgcagucggcguccagcggcucugcuuguucgugugugugucguugcaggccuuauucaagcuuaccauguucguguuccugguccuccugccccuggugagcucccagugcgugaaccucaccacccgcacgcagcugccgcccgccuacaccaacagcuucacccggggcgucuacuaccccgacaagguguuccgcuccagcgugcugcacuccacccaggaccucuuccugcccuucuucagcaacgucacgugguuccacgccauccacguguccgggaccaacggcaccaagcgguucgacaacccggugcugcccuucaacgacggggucuacuucgcgagcaccgagaaguccaacaucauccgcggcuggaucuucgggacgacccucgacagcaagacccagucccugcugaucgugaacaacgccaccaacguggucaucaaggugugcgaguuccaguucugcaacgaccccuuccucggcguguacuaccacaagaacaacaagagcuggauggaguccgaguuccgggucuacagcuccgccaacaacugcacguucgaguacgugagccagcccuuccugauggaccuggagggcaagcaggggaacuucaagaaccuccgcgaguucguguucaagaacaucgacggcuacuucaagaucuacuccaagcacaccccgaucaaccugguccgggaccugccccagggguucagcgcccucgagccccugguggaccugcccaucggcaucaacaucacccgcuuccagacccuccuggcccugcaccgguccuaccucacgccgggggacagcagcuccggcuggaccgcgggcgccgccgccuacuacgugggguaccugcagccccgcaccuuccugcucaaguacaacgagaacggcaccaucacggacgcggucgacugcgcccuggacccccugagcgagaccaagugcacccucaaguccuucaccguggagaaggggaucuaccagacgagcaacuuccgggugcagcccaccgaguccaucguccgcuucccgaacaucaccaaccugugccccuucggcgagguguucaacgccacccgguucgccagcgucuacgccuggaaccgcaagcggaucuccaacugcguggcggacuacagcgugcuguacaacuccgccagcuucuccacguucaagugcuacggcgucagccccaccaagcucaacgaccugugcuucaccaacguguacgccgacuccuucgugauccgcggggacgagguccggcagaucgcccccggccagaccgggaagaucgccgacuacaacuacaagcugccggacgacuucacgggcugcgugaucgcguggaacagcaacaaccucgacuccaaggucgggggcaacuacaacuaccuguaccgccuguuccgcaagagcaaccucaagcccuucgagcgggacaucuccaccgagaucuaccaggccggcagcacccccugcaacgggguggagggcuucaacugcuacuucccccugcaguccuacggguuccagccgaccaacggcgugggguaccagcccuaccggguggucgugcugagcuucgagcuccugcacgcccccgccacggugugcggccccaagaaguccaccaaccuggucaagaacaagugcgugaacuucaacuucaacggccucaccgggaccggcgugcugaccgagagcaacaagaaguuccugccguuccagcaguucgggcgcgacaucgccgacacgaccgacgcgguccgcgacccccagacccuggagauccucgacaucacccccugcagcuucggcgggguguccgugaucacgccgggcaccaacaccagcaaccaggucgccgugcuguaccagggcgugaacugcaccgagguccccguggccauccacgccgaccagcugacgcccaccuggcggguguacuccaccgggagcaacgucuuccagacccgcgccggcugccucaucggggcggagcacgugaacaacuccuacgagugcgacauccccaucggcgccggcaucugcgccagcuaccagacgcagaccaacuccccgcggcgcgcccggagcguggcgucccagagcaucaucgccuacaccaugucccugggggccgagaacagcgucgccuacuccaacaacagcaucgccauccccaccaacuucacgaucuccgugaccaccgagauccugcccgugagcaugaccaagacgagcgucgacugcaccauguacaucugcggcgacuccaccgagugcagcaaccuccugcugcaguacggguccuucugcacccagcucaaccgcgcgcugacgggcaucgccguggagcaggacaagaacacccaggagguguucgcccaggucaagcagaucuacaagacgcccccgaucaaggacuucgggggcuucaacuucagccagauccugcccgaccccuccaagcccagcaagcgguccuucaucgaggaccuccuguucaacaaggugacccuggccgacgccggcuucaucaagcaguacggggacugccucggcgacaucgcggcccgcgaccugaucugcgcccagaaguucaacgggcugaccgugcucccgccccugcugaccgacgagaugaucgcccaguacaccagcgcccuccuggcgggcaccaucacguccggguggaccuucggcgccggcgccgcccugcagauccccuucgcgaugcagauggccuaccgguucaacgggaucggcgucacccagaacgugcucuacgagaaccagaagcugaucgccaaccaguucaacagcgccaucgggaagauccaggacucccugagcuccaccgccagcgcgcucggcaagcugcaggacguggucaaccagaacgcccaggcccugaacacgcucgugaagcagcuguccagcaacuucggggccaucuccagcgugcugaacgacauccucucccgccuggacaaggucgaggccgaggugcagaucgaccggcugaucaccggccgccuccagagccugcagaccuacgugacccagcagcugauccgggcggccgagauccgcgccagcgccaaccucgccgcgaccaagauguccgagugcguccugggccagagcaagcggguggacuucugcgggaagggcuaccaccugauguccuucccccagagcgccccgcacgggguggucuuccuccacgugacguacguccccgcccaggagaagaacuucaccaccgcccccgcgaucugccacgacggcaaggcccacuucccccgcgaggggguguucguguccaacggcacccacugguucgucacgcagcggaacuucuacgagccgcagaucaucaccaccgacaacaccuucgugagcggcaacugcgacguggucaucgggaucgugaacaacacgguguacgacccccugcagcccgagcuggacuccuucaaggaggagcucgacaaguacuucaagaaccacaccagccccgacgucgaccugggcgacaucuccgggaucaacgccagcguggugaacauccagaaggagaucgaccgccugaacgaggucgccaagaaccucaacgagucccugaucgaccugcaggagcucggcaaguacgagcaguacaucaaguggccgugguacaucuggcugggcuucaucgccgggcugaucgcgaucgugauggugaccaucaugcucugcugcaugaccagcugcugcuccugccugaagggcugcugcagcugcggguccugcugcaaguucgacgaggacgacagcgagcccguccugaagggcgugaagcuccacuacacgugaggacuagucccuguucccagagcccacuuuuuuuucuuuuuuugaaauaaaauagccugucuuucagaucucaaaggcucuuuucagagccaccaaaaaaaaaaaaaaaaaaaaaaaaaaaaaaaaaaaaaaaaaaaaaaaaaaaaaaaaaaaaaaaaaaaaaaaaaaaaaaaaaaaaaaaaaaaaaaaaaaaaa

SEQ ID NO: 12280 - RNA, 4094 nt, Artificial Sequence
  SARS-CoV-2/Wuhan/HBCDC-HB-02/2020__EPI_ISL_412978 spike protein mRNA gc (1-1273)
aggagagucccgcagucggcguccagcggcucugcuuguucgugugugugucguugcaggccuuauucaagcuuaccauguucguguuccugguccuccugccccuggugagcucccagugcgugaaccucaccacccgcacgcagcugccgcccgccuacaccaacagcuucacccggggcgucuacuaccccgacaagguguuccgcuccagcgugcugcacuccacccaggaccucuuccugcccuucuucagcaacgucacgugguuccacgccauccacguguccgggaccaacggcaccaagcgguucgacaacccggugcugcccuucaacgacggggucuacuucgcgagcaccgagaaguccaacaucauccgcggcuggaucuucgggacgacccucgacagcaagacccagucccugcugaucgugaacaacgccaccaacguggucaucaaggugugcgaguuccaguucugcaacgaccccuuccucggcguguacuaccacaagaacaacaagagcuggauggaguccgaguuccgggucuacagcuccgccaacaacugcacguucgaguacgugagccagcccuuccugauggaccuggagggcaagcaggggaacuucaagaaccuccgcgaguucguguucaagaacaucgacggcuacuucaagaucuacuccaagcacaccccgaucaaccugguccgggaccugccccagggguucagcgcccucgagccccugguggaccugcccaucggcaucaacaucacccgcuuccagacccuccuggcccugcaccgguccuaccucacgccgggggacagcagcuccggcuggaccgcgggcgccgccgccuacuacgugggguaccugcagccccgcaccuuccugcucaaguacaacgagaacggcaccaucacggacgcggucgacugcgcccuggacccccugagcgagaccaagugcacccucaaguccuucaccguggagaaggggaucuaccagacgagcaacuuccgggugcagcccaccgaguccaucguccgcuucccgaacaucaccaaccugugccccuucggcgagguguucaacgccacccgguucgccagcgucuacgccuggaaccgcaagcggaucuccaacugcguggcggacuacagcgugcuguacaacuccgccagcuucuccacguucaagugcuacggcgucagccccaccaagcucaacgaccugugcuucaccaacguguacgccgacuccuucgugauccgcggggacgagguccggcagaucgcccccggccagaccgggaagaucgccgacuacaacuacaagcugccggacgacuucacgggcugcgugaucgcguggaacagcaacaaccucgacuccaaggucgggggcaacuacaacuaccuguaccgccuguuccgcaagagcaaccucaagcccuucgagcgggacaucuccaccgagaucuaccaggccggcagcacccccugcaacgggguggagggcuucaacugcuacuucccccugcaguccuacggguuccagccgaccaacggcgugggguaccagcccuaccggguggucgugcugagcuucgagcuccugcacgcccccgccacggugugcggccccaagaaguccaccaaccuggucaagaacaagugcgugaacuucaacuucaacggccucaccgggaccggcgugcugaccgagagcaacaagaaguuccugccguuccagcaguucgggcgcgacaucgccgacacgaccgacgcgguccgcgacccccagacccuggagauccucgacaucacccccugcagcuucggcgggguguccgugaucacgccgggcaccaacaccagcaaccaggucgccgugcuguaccaggacgugaacugcaccgagguccccguggccauccacgccgaccagcugacgcccaccuggcggguguacuccaccggcagcaacgucuuccagacccgcgccgggugccucaucggcgcggagcacgugaacaacuccuacgagugcgacauccccaucggggccggcaucugcgccagcuaccagacgcagaccaacuccccgcggcgcgcccggagcguggcgucccagagcaucaucgccuacaccaugucccugggcgccgagaacagcgucgccuacuccaacaacagcaucgccauccccaccaacuucacgaucuccgugaccaccgagauccugcccgugagcaugaccaagacgagcgucgacugcaccauguacaucugcggggacuccaccgagugcagcaacuuccuccugcaguacggcuccuucugcacccagcugaaccgcgcgcucacggggaucgccguggagcaggacaagaacacccaggagguguucgcccaggucaagcagaucuacaagacgcccccgaucaaggacuucggcggguucaacuucagccagauccugcccgaccccuccaagcccagcaagcgguccuucaucgaggaccuccuguucaacaaggugacccuggccgacgccggcuucaucaagcaguacggcgacugccugggggacaucgcggcccgcgaccucaucugcgcccagaaguucaacggccugaccgugcugccgccccuccugaccgacgagaugaucgcccaguacaccagcgcccugcucgcggggaccaucacguccggcuggaccuucggggccggcgccgcccugcagauccccuucgcgaugcagauggccuaccgguucaacggcaucggggucacccagaacgugcuguacgagaaccagaagcucaucgccaaccaguucaacagcgccaucggcaagauccaggacucccugagcuccaccgccagcgcgcuggggaagcuccaggacguggucaaccagaacgcccaggcccugaacacgcuggugaagcagcucuccagcaacuucggcgccaucuccagcgugcugaacgacauccugucccgccucgacaaggucgaggccgaggugcagaucgaccggcugaucaccgggcgccugcagagccuccagaccuacgugacccagcagcugauccgggcggccgagauccgcgccagcgccaaccuggccgcgaccaagauguccgagugcguccucggccagagcaagcggguggacuucugcggcaagggguaccaccugauguccuucccccagagcgccccgcacggcguggucuuccugcacgugacguacguccccgcccaggagaagaacuucaccaccgcccccgcgaucugccacgacgggaaggcccacuucccccgcgagggcguguucguguccaacgggacccacugguucgucacgcagcggaacuucuacgagccgcagaucaucaccaccgacaacaccuucgugagcggcaacugcgacguggucaucggcaucgugaacaacacgguguacgacccccuccagcccgagcuggacuccuucaaggaggagcuggacaaguacuucaagaaccacaccagccccgacgucgaccucggggacaucuccggcaucaacgccagcguggugaacauccagaaggagaucgaccgccugaacgaggucgccaagaaccugaacgagucccucaucgaccugcaggagcuggggaaguacgagcaguacaucaaguggccgugguacaucuggcucggcuucaucgccggccugaucgcgaucgugauggugaccaucaugcugugcugcaugaccagcugcugcuccugccucaaggggugcugcagcugcggcuccugcugcaaguucgacgaggacgacagcgagcccguccugaagggggugaagcugcacuacacgugaggacuagucccuguucccagagcccacuuuuuuuucuuuuuuugaaauaaaauagccugucuuucagaucucaaaggcucuuuucagagccaccaaaaaaaaaaaaaaaaaaaaaaaaaaaaaaaaaaaaaaaaaaaaaaaaaaaaaaaaaaaaaaaaaaaaaaaaaaaaaaaaaaaaaaaaaaaaaaaaaaaaa

SEQ ID NO: 12281 - RNA, 4094 nt, Artificial Sequence
  SARS-CoV-2/Australia/QLD02/2020__EPI_ISL_407896 spike protein mRNA gc (1-1273)
aggagagucccgcagucggcguccagcggcucugcuuguucgugugugugucguugcaggccuuauucaagcuuaccauguucguguuccugguccuccugccccuggugagcucccagugcgugaaccucaccacccgcacgcagcugccgcccgccuacaccaacagcuucacccggggcgucuacuaccccgacaagguguuccgcuccagcgugcugcacuccacccaggaccucuuccugcccuucuucagcaacgucacgugguuccacgccauccacguguccgggaccaacggcaccaagcgguucgacaacccggugcugcccuucaacgacggggucuacuucgcgagcaccgagaaguccaacaucauccgcggcuggaucuucgggacgacccucgacagcaagacccagucccugcugaucgugaacaacgccaccaacguggucaucaaggugugcgaguuccaguucugcaacgaccccuuccucggcguguacuaccacaagaacaacaagagcuggauggaguccgaguuccgggucuacagcuccgccaacaacugcacguucgaguacgugagccagcccuuccugauggaccuggagggcaagcaggggaacuucaagaaccuccgcgaguucguguucaagaacaucgacggcuacuucaagaucuacuccaagcacaccccgaucaaccugguccgggaccugccccagggguucagcgcccucgagccccugguggaccugcccaucggcaucaacaucacccgcuuccagacccuccuggcccugcaccgguccuaccucacgccgggggacagcagcuccggcuggaccgcgggcgccgccgccuacuacgugggguaccugcagccccgcaccuuccugcucaaguacaacgagaacggcaccaucacggacgcggucgacugcgcccuggacccccugagcgagaccaagugcacccucaaguccuucaccguggagaaggggaucuaccagacgagcaacuuccgggugcagcccaccgaguccaucguccgcuucccgaacaucaccaaccugugccccuucggcgagguguucaacgccacccgguucgccagcgucuacgccuggaaccgcaagcggaucuccaacugcguggcggacuacagcgugcuguacaacuccgccagcuucuccacguucaagugcuacggcgucagccccaccaagcucaacgaccugugcuucaccaacguguacgccgacuccuucgugauccgcggggacgagguccggcagaucgcccccggccagaccgggaagaucgccgacuacaacuacaagcugccggacgacuucacgggcugcgugaucgcguggaacagcaacaaccucgacuccaaggucgggggcaacuacaacuaccuguaccgccuguuccgcaagagcaaccucaagcccuucgagcgggacaucuccaccgagaucuaccaggccggcagcacccccugcaacgggguggagggcuucaacugcuacuucccccugcaguccuacggguuccagccgaccaacggcgugggguaccagcccuaccggguggucgugcugagcuucgagcuccugcacgcccccgccacggugugcggccccaagaaguccaccaaccuggucaagaacaagugcgugaacuucaacuucaacggccucaccgggaccggcgugcugaccgagagcaacaagaaguuccugccguuccagcaguucgggcgcgacaucgccgacacgaccgacgcgguccgcgacccccagacccuggagauccucgacaucacccccugcagcuucggcgggguguccgugaucacgccgggcaccaacaccagcaaccaggucgccgugcuguaccaggacgugaacugcaccgagguccccguggccauccacgccgaccagcugacgcccaccuggcggguguacuccaccggcagcaacgucuuccagacccgcgccgggugccucaucggcgcggagcacgugaacaacuccuacgagugcgacauccccaucggggccggcaucugcgccagcuaccagacgcagaccaacuccccgcggcgcgcccggagcguggcgucccagagcaucaucgccuacaccaugucccugggcgccgagaacagcgucgccuacuccaacaacagcaucgccauccccaccaacuucacgaucuccgugaccaccgagauccugcccgugagcaugaccaagacgagcgucgacugcaccauguacaucugcggggacuccaccgagugcagcaaccuccugcugcaguacggcuccuucugcacccagcucaaccgcgcgcugacggggaucgccguggagcaggacaagaacacccaggagguguucgcccaggucaagcagaucuacaagacgcccccgaucaaggacuucggcggguucaacuucagccagauccugcccgaccccuccaagcccagcaagcgguccuucaucgaggaccuccuguucaacaaggugacccuggccgacgccggcuucaucaagcaguacggcgacugccucggggacaucgcggcccgcgaccugaucugcgcccagaaguucaacggccugaccgugcucccgccccugcugaccgacgagaugaucgcccaguacaccagcgcccuccuggcggggaccaucacguccggcuggaccuucggggccggcgccgcccugcagauccccuucgcgaugcagauggccuaccgguucaacggcaucggggucacccagaacgugcucuacgagaaccagaagcugaucgccaaccaguucaacagcgccaucggcaagauccaggacucccugagcuccaccgccagcgcgcucgggaagcugcaggacguggucaaccagaacgcccaggcccugaacacgcucgugaagcagcuguccagcaacuucggcgccaucuccagcgugcugaacgacauccucucccgccuggacaaggucgaggccgaggugcagaucgaccggcugaucaccgggcgccuccagagccugcagaccuacgugacccagcagcugauccgggcggccgagauccgcgccagcgccaaccucgccgcgaccaagauguccgagugcguccugggccagagcaagcggguggacuucugcggcaagggguaccaccugauguccuucccccagagcgccccgcacggcguggucuuccuccacgugacguacguccccgcccaggagaagaacuucaccaccgcccccgcgaucugccacgacgggaaggcccacuucccccgcgagggcguguucguguccaacgggacccacugguucgucacgcagcggaacuucuacgagccgcagaucaucaccaccgacaacaccuucgugagcggcaacugcgacguggucaucggcaucgugaacaacacgguguacgacccccugcagcuggagcucgacuccuucaaggaggagcuggacaaguacuucaagaaccacaccagccccgacgucgaccugggggacaucuccggcaucaacgccagcguggugaacauccagaaggagaucgaccgccucaacgaggucgccaagaaccugaacgagucccugaucgaccuccaggagcuggggaaguacgagcaguacaucaaguggcccugguacaucuggcugggcuucaucgccggccucaucgcgaucgugauggugaccaucaugcugugcugcaugaccagcugcugcuccugccugaaggggugcugcagcugcggcuccugcugcaaguucgacgaggacgacagcgagccgguccucaagggggugaagcugcacuacacgugaggacuagucccuguucccagagcccacuuuuuuuucuuuuuuugaaauaaaauagccugucuuucagaucucaaaggcucuuuucagagccaccaaaaaaaaaaaaaaaaaaaaaaaaaaaaaaaaaaaaaaaaaaaaaaaaaaaaaaaaaaaaaaaaaaaaaaaaaaaaaaaaaaaaaaaaaaaaaaaaaaaaa

SEQ ID NO: 12282 - RNA, 4094 nt, Artificial Sequence
  SARS-CoV-2/India/1-31/2020__EPI_ISL_413523 spike protein mRNA gc (1-1273)
aggagagucccgcagucggcguccagcggcucugcuuguucgugugugugucguugcaggccuuauucaagcuuaccauguucguguuccugguccuccugccccuggugagcucccagugcgugaaccucaccacccgcacgcagcugccgcccgccuacaccaacagcuucacccggggcgucuacuaccccgacaagguguuccgcuccagcgugcugcacuccacccaggaccucuuccugcccuucuucagcaacgucacgugguuccacgccauccacguguccgggaccaacggcaccaagcgguucgacaacccggugcugcccuucaacgacggggucuacuucgcgagcaccgagaaguccaacaucauccgcggcuggaucuucgggacgacccucgacagcaagacccagucccugcugaucgugaacaacgccaccaacguggucaucaaggugugcgaguuccaguucugcaacgaccccuuccucggcguguacuaccacaagaacaacaagagcuggauggaguccgaguuccgggucuacagcuccgccaacaacugcacguucgaguacgugagccagcccuuccugauggaccuggagggcaagcaggggaacuucaagaaccuccgcgaguucguguucaagaacaucgacggcuacuucaagaucuacuccaagcacaccccgaucaaccugguccgggaccugccccagggguucagcgcccucgagccccugguggaccugcccaucggcaucaacaucacccgcuuccagacccuccuggcccugcaccgguccuaccucacgccgggggacagcagcuccggcuggaccgcgggcgccgccgccuacuacgugggguaccugcagccccgcaccuuccugcucaaguacaacgagaacggcaccaucacggacgcggucgacugcgcccuggacccccugagcgagaccaagugcacccucaaguccuucaccguggagaaggggaucuaccagacgagcaacuuccgggugcagcccaccgaguccaucguccgcuucccgaacaucaccaaccugugccccuucggcgagguguucaacgccacccgguucgccagcgucuacgccuggaaccgcaagcggaucuccaacugcguggcggacuacagcgugcuguacaacuccgccagcuucuccacguucaagugcuacggcgucagccccaccaagcucaacgaccugugcuucaccaacguguacgccgacuccuucgugauccgcggggacgagguccggcagaucgcccccggccagaccgggaagaucgccgacuacaacuacaagcugccggacgacuucacgggcugcgugaucgcguggaacagcaacaaccucgacuccaaggucgggggcaacuacaacuaccuguaccgccuguuccgcaagagcaaccucaagcccuucgagcgggacaucuccaccgagaucuaccaggccggcagcacccccugcaacgggguggagggcuucaacugcuacuucccccugcaguccuacggguuccagccgaccaacggcgugggguaccagcccuaccggguggucgugcugagcuucgagcuccugcacgcccccgccacggugugcggccccaagaaguccaccaaccuggucaagaacaagugcgugaacuucaacuucaacggccucaccgggaccggcgugcugaccgagagcaacaagaaguuccugccguuccagcaguucgggcgcgacaucgccgacacgaccgacgcgguccgcgacccccagacccuggagauccucgacaucacccccugcagcuucggcgggguguccgugaucacgccgggcaccaacaccagcaaccaggucgccgugcuguaccaggacgugaacugcaccgagguccccguggccauccacgccgaccagcugacgcccaccuggcggguguacuccaccggcagcaacgucuuccagacccgcgccgggugccucaucggcgcggagcacgugaacaacuccuacgagugcgacauccccaucggggccggcaucugcgccagcuaccagacgcagaccaacuccccgcggcgcgcccggagcguggcgucccagagcaucaucgccuacaccaugucccugggcgccgagaacagcgucgccuacuccaacaacagcaucgccauccccaccaacuucacgaucuccgugaccaccgagauccugcccgugagcaugaccaagacgagcgucgacugcaccauguacaucugcggggacuccaccgagugcagcaaccuccugcugcaguacggcuccuucugcacccagcucaaccgcgcgcugacggggaucgccguggagcaggacaagaacacccaggagguguucgcccaggucaagcagaucuacaagacgcccccgaucaaggacuucggcggguucaacuucagccagauccugcccgaccccuccaagcccagcaagcgguccuucaucgaggaccuccuguucaacaaggugacccuggccgacgccggcuucaucaagcaguacggcgacugccucggggacaucgcggcccgcgaccugaucugcgcccagaaguucaacggccugaccgugcucccgccccugcugaccgacgagaugaucgcccaguacaccagcgcccuccuggcggggaccaucacguccggcuggaccuucggggccggcgccgcccugcagauccccuucgcgaugcagauggccuaccgguucaacggcaucggggucacccagaacgugcucuacgagaaccagaagcugaucgccaaccaguucaacagcgugaucggcaagauccaggacucccugagcuccaccgccagcgcccucgggaagcugcaggacgucgugaaccagaacgcgcaggcccugaacacgcucgugaagcagcuguccagcaacuucggcgccaucuccagcguccugaacgacauccucucccgccuggacaagguggaggccgaggugcagaucgaccggcugaucaccgggcgccuccagagccugcagaccuacgucacccagcagcugauccgggccgcggagauccgcgccagcgccaaccucgccgccaccaagauguccgagugcgugcugggccagagcaagcggguggacuucugcggcaagggguaccaccugauguccuucccccagagcgcgccgcacggcgucguguuccuccacgucacguacgugcccgcccaggagaagaacuucaccaccgcccccgccaucugccacgacgggaaggcgcacuucccccgcgagggcguguucgucuccaacgggacccacugguucgugacgcagcggaacuucuacgagccgcagaucaucaccaccgacaacaccuucgugagcggcaacugcgacgucgugaucggcaucgugaacaacacggucuacgacccccugcagcccgagcuggacuccuucaaggaggagcucgacaaguacuucaagaaccacaccagccccgacguggaccugggggacaucuccggcaucaacgccagcguggucaacauccagaaggagaucgaccgccugaacgagguggccaagaaccucaacgagucccugaucgaccugcaggagcucgggaaguacgagcaguacaucaaguggccgugguacaucuggcugggcuucaucgccggccugaucgccaucgugauggucaccaucaugcucugcugcaugaccagcugcugcuccugccugaaggggugcugcagcugcggcuccugcugcaaguucgacgaggacgacagcgagcccgugcugaagggggugaagcuccacuacacgugaggacuagucccuguucccagagcccacuuuuuuuucuuuuuuugaaauaaaauagccugucuuucagaucucaaaggcucuuuucagagccaccaaaaaaaaaaaaaaaaaaaaaaaaaaaaaaaaaaaaaaaaaaaaaaaaaaaaaaaaaaaaaaaaaaaaaaaaaaaaaaaaaaaaaaaaaaaaaaaaaaaaa

SEQ ID NO: 12283 - RNA, 4094 nt, Artificial Sequence
  SARS-CoV-2/Guangdong/GD2020087-P0008/2020__EPI_ISL_413863 spike protein mRNA gc (1-1273)
aggagagucccgcagucggcguccagcggcucugcuuguucgugugugugucguugcaggccuuauucaagcuuaccauguucguguuccugguccuccugccccuggugagcucccagugcgugaaccucaccacccgcacgcagcugccgcccgccuacaccaacagcuucacccggggcgucuacuaccccgacaagguguuccgcuccagcgugcugcacuccacccaggaccucuuccugcccuucuucagcaacgucacgugguuccacgccauccacguguccgggaccaacggcaccaagcgguucgacaacccggugcugcccuucaacgacggggucuacuucgcgagcaccgagaaguccaacaucauccgcggcuggaucuucgggacgacccucgacagcaagacccagucccugcugaucgugaacaacgccaccaacguggucaucaaggugugcgaguuccaguucugcaacgaccccuuccucggcguguacuaccacaagaacaacaagagcuggauggaguccgaguuccgggucuacagcuccgccaacaacugcacguucgaguacgugagccagcccuuccugauggaccuggagggcaagcaggggaacuucaagaaccuccgcgaguucguguucaagaacaucgacggcuacuucaagaucuacuccaagcacaccccgaucaaccugguccgggaccugccccagggguucagcgcccucgagccccugguggaccugcccaucggcaucaacaucacccgcuuccagacccuccuggcccugcaccgguccuaccucacgccgggggacagcagcuccggcuggaccgcgggcgccgccgccuacuacgugggguaccugcagccccgcaccuuccugcucaaguacaacgagaacggcaccaucacggacgcggucgacugcgcccuggacccccugagcgagaccaagugcacccucaaguccuucaccguggagaaggggaucuaccagacgagcaacuuccgggugcagcccaccgaguccaucguccgcuucccgaacaucaccaaccugugccccuucggcgagguguucaacgccacccgguucgccagcgucuacgccuggaaccgcaagcggaucuccaacugcguggcggacuacagcgugcuguacaacuccgccagcuucuccacguucaagugcuacggcgucagccccaccaagcucaacgaccugugcuucaccaacguguacgccgacuccuucgugauccgcggggacgagguccgggagaucgcccccggccagaccgggaagaucgccgacuacaacuacaagcugccggacgacuucacgggcugcgugaucgcguggaacagcaacaaccucgacuccaaggucgggggcaacuacaacuaccuguaccgccuguuccgcaagagcaaccucaagcccuucgagcgggacaucuccaccgagaucuaccaggccggcagcacccccugcaacgggguggagggcuucaacugcuacuucccccugcaguccuacggguuccagccgaccaacggcgugggguaccagcccuaccggguggucgugcugagcuucgagcuccugcacgcccccgccacggugugcggccccaagaaguccaccaaccuggucaagaacaagugcgugaacuucaacuucaacggccucaccgggaccggcgugcugaccgagagcaacaagaaguuccugccguuccagcaguucgggcgcgacaucgccgacacgaccgacgcgguccgcgacccccagacccuggagauccucgacaucacccccugcagcuucggcgggguguccgugaucacgccgggcaccaacaccagcaaccaggucgccgugcuguaccaggacgugaacugcaccgagguccccguggccauccacgccgaccagcugacgcccaccuggcggguguacuccaccggcagcaacgucuuccagacccgcgccgggugccucaucggcgcggagcacgugaacaacuccuacgagugcgacauccccaucggggccggcaucugcgccagcuaccagacgcagaccaacuccccgcggcgcgcccggagcguggcgucccagagcaucaucgccuacaccaugucccugggcgccgagaacagcgucgccuacuccaacaacagcaucgccauccccaccaacuucacgaucuccgugaccaccgagauccugcccgugagcaugaccaagacgagcgucgacugcaccauguacaucugcggggacuccaccgagugcagcaaccuccugcugcaguacggcuccuucugcacccagcucaaccgcgcgcugacggggaucgccguggagcaggacaagaacacccaggagguguucgcccaggucaagcagaucuacaagacgcccccgaucaaggacuucggcggguucaacuucagccagauccugcccgaccccuccaagcccagcaagcgguccuucaucgaggaccuccuguucaacaaggugacccuggccgacgccggcuucaucaagcaguacggcgacugccucggggacaucgcggcccgcgaccugaucugcgcccagaaguucaacggccugaccgugcucccgccccugcugaccgacgagaugaucgcccaguacaccagcgcccuccuggcggggaccaucacguccggcuggaccuucggggccggcgccgcccugcagauccccuucgcgaugcagauggccuaccgguucaacggcaucggggucacccagaacgugcucuacgagaaccagaagcugaucgccaaccaguucaacagcgccaucggcaagauccaggacucccugagcuccaccgccagcgcgcucgggaagcugcaggacguggucaaccagaacgcccaggcccugaacacgcucgugaagcagcuguccagcaacuucggcgccaucuccagcgugcugaacgacauccucucccgccuggacaaggucgaggccgaggugcagaucgaccggcugaucaccgggcgccuccagagccugcagaccuacgugacccagcagcugauccgggcggccgagauccgcgccagcgccaaccucgccgcgaccaagauguccgagugcguccugggccagagcaagcggguggacuucugcggcaagggguaccaccugauguccuucccccagagcgccccgcacggcguggucuuccuccacgugacguacguccccgcccaggagaagaacuucaccaccgcccccgcgaucugccacgacgggaaggcccacuucccccgcgagggcguguucguguccaacgggacccacugguucgucacgcagcggaacuucuacgagccgcagaucaucaccaccgacaacaccuucgugagcggcaacugcgacguggucaucggcaucgugaacaacacgguguacgacccccugcagcccgagcuggacuccuucaaggaggagcucgacaaguacuucaagaaccacaccagccccgacgucgaccugggggacaucuccggcaucaacgccagcguggugaacauccagaaggagaucgaccgccugaacgaggucgccaagaaccucaacgagucccugaucgaccugcaggagcucgggaaguacgagcaguacaucaaguggccgugguacaucuggcugggcuucaucgccggccugaucgcgaucgugauggugaccaucaugcucugcugcaugaccagcugcugcuccugccugaaggggugcugcagcugcggcuccugcugcaaguucgacgaggacgacagcgagcccguccugaagggggugaagcuccacuacacgugaggacuagucccuguucccagagcccacuuuuuuuucuuuuuuugaaauaaaauagccugucuuucagaucucaaaggcucuuuucagagccaccaaaaaaaaaaaaaaaaaaaaaaaaaaaaaaaaaaaaaaaaaaaaaaaaaaaaaaaaaaaaaaaaaaaaaaaaaaaaaaaaaaaaaaaaaaaaaaaaaaaaa

SEQ ID NO: 12284 - RNA, 4094 nt, Artificial Sequence
  SARS-CoV-2/Sweden/01/2020__EPI_ISL_411951 spike protein mRNA gc (1-1273)
aggagagucccgcagucggcguccagcggcucugcuuguucgugugugugucguugcaggccuuauucaagcuuaccauguucguguuccugguccuccugccccuggugagcucccagugcgugaaccucaccacccgcacgcagcugccgcccgccuacaccaacagcuucacccggggcgucuacuaccccgacaagguguuccgcuccagcgugcugcacuccacccaggaccucuuccugcccuucuucagcaacgucacgugguuccacgccauccacguguccgggaccaacggcaccaagcgguucgacaacccggugcugcccuucaacgacggggucuacuucgcgagcaccgagaaguccaacaucauccgcggcuggaucuucgggacgacccucgacagcaagacccagucccugcugaucgugaacaacgccaccaacguggucaucaaggugugcgaguuccaguucugcaacgaccccuuccucggcguguacuaccacaagaacaacaagagcuggauggaguccgaguuccgggucuacagcuccgccaacaacugcacguucgaguacgugagccagcccuuccugauggaccuggagggcaagcaggggaacuucaagaaccuccgcgaguucguguucaagaacaucgacggcuacuucaagaucuacuccaagcacaccccgaucaaccugguccgggaccugccccagggguucagcgcccucgagccccugguggaccugcccaucggcaucaacaucacccgcuuccagacccuccuggcccugcaccgguccuaccucacgccgggggacagcagcuccggcuggaccgcgggcgccgccgccuacuacgugggguaccugcagccccgcaccuuccugcucaaguacaacgagaacggcaccaucacggacgcggucgacugcgcccuggacccccugagcgagaccaagugcacccucaaguccuucaccguggagaaggggaucuaccagacgagcaacuuccgggugcagcccaccgaguccaucguccgcuucccgaacaucaccaaccugugccccuucggcgagguguucaacgccacccgguucgccagcgucuacgccuggaaccgcaagcggaucuccaacugcguggcggacuacagcgugcuguacaacuccgccagcuucuccacguucaagugcuacggcgucagccccaccaagcucaacgaccugugcuucaccaacguguacgccgacuccuucgugauccgcggggacgagguccggcagaucgcccccggccagaccgggaagaucgccgacuacaacuacaagcugccggacgacuucacgggcugcgugaucgcguggaacagcaacaaccucgacuccaaggucgggggcaacuacaacuaccuguaccgccuguuccgcaagagcaaccucaagcccuucgagcgggacaucuccaccgagaucuaccaggccggcagcacccccugcaacgggguggagggcuucaacugcuacuucccccugcaguccuacggguuccagccgaccaacggcgugggguaccagcccuaccggguggucgugcugagcuucgagcuccugcacgcccccgccacggugugcggccccaagaaguccaccaaccuggucaagaacaagugcgugaacuucaacuucaacggccucaccgggaccggcgugcugaccgagagcaacaagaaguuccugccguuccagcaguucgggcgcgacaucgccgacacgaccgacgcgguccgcgacccccagacccuggagauccucgacaucacccccugcagcuucggcgggguguccgugaucacgccgggcaccaacaccagcaaccaggucgccgugcuguaccaggacgugaacugcaccgagguccccguggccauccacgccgaccagcugacgcccaccuggcggguguacuccaccggcagcaacgucuuccagacccgcgccgggugccucaucggcgcggagcacgugaacaacuccuacgagugcgacauccccaucggggccggcaucugcgccagcuaccagacgcagaccaacuccccgcggcgcgcccggagcguggcgucccagagcaucaucgccuacaccaugucccugggcgccgagaacagcgucgccuacuccaacaacagcaucgccauccccaccaacuucacgaucuccgugaccaccgagauccugcccgugagcaugaccaagacgagcgucgacugcaccauguacaucugcggggacuccaccgagugcagcaaccuccugcugcaguacggcuccuucugcacccagcucaaccgcgcgcugacggggaucgccguggagcaggacaagaacacccaggagguguucgcccaggucaagcagaucuacaagacgcccccgaucaaggacugcggcggguucaacuucagccagauccugcccgaccccuccaagcccagcaagcgguccuucaucgaggaccuccuguucaacaaggugacccuggccgacgccggcuucaucaagcaguacggcgacugccucggggacaucgcggcccgcgaccugaucugcgcccagaaguucaacggccugaccgugcucccgccccugcugaccgacgagaugaucgcccaguacaccagcgcccuccuggcggggaccaucacguccggcuggaccuucggggccggcgccgcccugcagauccccuucgcgaugcagauggccuaccgguucaacggcaucggggucacccagaacgugcucuacgagaaccagaagcugaucgccaaccaguucaacagcgccaucggcaagauccaggacucccugagcuccaccgccagcgcgcucgggaagcugcaggacguggucaaccagaacgcccaggcccugaacacgcucgugaagcagcuguccagcaacuucggcgccaucuccagcgugcugaacgacauccucucccgccuggacaaggucgaggccgaggugcagaucgaccggcugaucaccgggcgccuccagagccugcagaccuacgugacccagcagcugauccgggcggccgagauccgcgccagcgccaaccucgccgcgaccaagauguccgagugcguccugggccagagcaagcggguggacuucugcggcaagggguaccaccugauguccuucccccagagcgccccgcacggcguggucuuccuccacgugacguacguccccgcccaggagaagaacuucaccaccgcccccgcgaucugccacgacgggaaggcccacuucccccgcgagggcguguucguguccaacgggacccacugguucgucacgcagcggaacuucuacgagccgcagaucaucaccaccgacaacaccuucgugagcggcaacugcgacguggucaucggcaucgugaacaacacgguguacgacccccugcagcccgagcuggacuccuucaaggaggagcucgacaaguacuucaagaaccacaccagccccgacgucgaccugggggacaucuccggcaucaacgccagcguggugaacauccagaaggagaucgaccgccugaacgaggucgccaagaaccucaacgagucccugaucgaccugcaggagcucgggaaguacgagcaguacaucaaguggccgugguacaucuggcugggcuucaucgccggccugaucgcgaucgugauggugaccaucaugcucugcugcaugaccagcugcugcuccugccugaaggggugcugcagcugcggcuccugcugcaaguucgacgaggacgacagcgagcccguccugaagggggugaagcuccacuacacgugaggacuagucccuguucccagagcccacuuuuuuuucuuuuuuugaaauaaaauagccugucuuucagaucucaaaggcucuuuucagagccaccaaaaaaaaaaaaaaaaaaaaaaaaaaaaaaaaaaaaaaaaaaaaaaaaaaaaaaaaaaaaaaaaaaaaaaaaaaaaaaaaaaaaaaaaaaaaaaaaaaaaa

SEQ ID NO: 12285 - RNA, 4094 nt, Artificial Sequence
  SARS-CoV-2/Tianmen/HBCDC-HB-07/2020__EPI_ISL_412983 spike protein mRNA gc (1-1273)
aggagagucccgcagucggcguccagcggcucugcuuguucgugugugugucguugcaggccuuauucaagcuuaccauguucguguuccugguccuccugccccuggugagcucccagugcgugaaccucaccacccgcacgcagcugccgcccgccuacaccaacagcuucacccggggcgucuacuaccccgacaagguguuccgcuccagcgugcugcacuccacccaggaccucuuccugcccuucuucagcaacgucacgugguuccacgccauccacguguccgggaccaacggcaccaagcgguucgacaacccggugcugcccuucaacgacggggucuacuucgcgagcaccgagaaguccaacaucauccgcggcuggaucuucgggacgacccucgacagcaagacccagucccugcugaucgugaacaacgccaccaacguggucaucaaggugugcgaguuccaguucugcaacgaccccuuccucggcguguacuaccacaagaacaacaagagcuggauggaguccgaguuccgggucuacagcuccgccaacaacugcacguucgaguacgugagccagcccuuccugauggaccuggagggcaagcaggggaacuucaagaaccuccgcgaguucguguucaagaacaucgacggcuacuucaagaucuacuccaagcacaccccgaucaaccugguccgggaccugccccagggguucagcgcccucgagccccugguggaccugcccaucggcaucaacaucacccgcuuccagacccuccuggcccugcaccgguccuaccucacgccgggggacagcagcuccggcuggaccgcgggcgccgccgccuacuacgugggguaccugcagccccgcaccuuccugcucaaguacaacgagaacggcaccaucacggacgcggucgacugcgcccuggacccccugagcgagaccaagugcacccucaaguccuucaccguggagaaggggaucuaccagacgagcaacuuccgggugcagcccaccgaguccaucguccgcuucccgaacaucaccaaccugugccccuucggcgagguguucaacgccacccgguucgccagcgucuacgccuggaaccgcaagcggaucuccaacugcguggcggacuacagcgugcuguacaacuccgccagcuucuccacguucaagugcuacggcgucagccccaccaagcucaacgaccugugcuucaccaacguguacgccgacuccuucgugauccgcggggacgagguccggcagaucgcccccggccagaccgggaagaucgccgacuacaacuacaagcugccggacgacuucacgggcugcgugaucgcguggaacagcaacaaccucgacuccaaggucgggggcaacuacaacuaccuguaccgccuguuccgcaagagcaaccucaagcccuucgagcgggacaucuccaccgagaucuaccaggccggcagcacccccugcaacgggguggagggcuucaacugcuacuucccccugcaguccuacggguuccagccgaccaacggcgugggguaccagcccuaccggguggucgugcugagcuucgagcuccugcacgcccccgccacggugugcggccccaagaaguccaccaaccuggucaagaacaagugcgugaacuucaacuucaacggccucaccgggaccggcgugcugaccgagagcaacaagaaguuccugccguuccagcaguucgggcgcgacaucgccgacacgaccgacgcgguccgcgacccccagacccuggagauccucgacaucacccccugcagcuucggcgggguguccgugaucacgccgggcaccaacaccagcaaccaggucgccgugcuguaccaggaccugaacugcaccgaggugcccgucgccauccacgccgaccagcucacgcccaccuggcggguguacuccaccggcagcaacguguuccagacccgcgccgggugccugaucggcgcggagcacgucaacaacuccuacgagugcgacauccccaucggggccggcaucugcgccagcuaccagacgcagaccaacuccccgcggcgcgcccggagcguggcgucccagagcaucaucgccuacaccaugucccugggcgccgagaacagcguggccuacuccaacaacagcaucgccauccccaccaacuucacgaucuccgucaccaccgagauccuccccgugagcaugaccaagacgagcguggacugcaccauguacaucugcggggacuccaccgagugcagcaaccugcugcuccaguacggcuccuucugcacccagcugaaccgcgcgcugacggggaucgccgucgagcaggacaagaacacccaggagguguucgcccaggugaagcagaucuacaagacgcccccgaucaaggacuucggcggguucaacuucagccagauccuccccgaccccuccaagcccagcaagcgguccuucaucgaggaccugcuguucaacaaggucacccucgccgacgccggcuucaucaagcaguacggcgacugccugggggacaucgcggcccgcgaccugaucugcgcccagaaguucaacggccucaccgugcugccgccccugcucaccgacgagaugaucgcccaguacaccagcgcccugcuggcggggaccaucacguccggcuggaccuucggggccggcgccgcccuccagauccccuucgcgaugcagauggccuaccgguucaacggcaucggggugacccagaacguccuguacgagaaccagaagcugaucgccaaccaguucaacagcgccaucggcaagauccaggacucccucagcuccaccgccagcgcgcuggggaagcugcaggacguggugaaccagaacgcccaggcccucaacacgcuggucaagcagcuguccagcaacuucggcgccaucuccagcgugcucaacgacauccugucccgccuggacaagguggaggccgagguccagaucgaccggcucaucaccgggcgccugcagagccugcagaccuacgugacccagcagcucauccgggcggccgagauccgcgccagcgccaaccuggccgcgaccaagauguccgagugcgugcugggccagagcaagcgggucgacuucugcggcaagggguaccaccucauguccuucccccagagcgccccgcacggcgugguguuccugcacgucacguacgugcccgcccaggagaagaacuucaccaccgcccccgcgaucugccacgacgggaaggcccacuucccccgcgagggcgucuucguguccaacgggacccacugguucgugacgcagcggaacuucuacgagccgcagaucaucaccaccgacaacaccuucgucagcggcaacugcgacguggugaucggcaucgucaacaacacgguguacgacccccugcagcccgagcucgacuccuucaaggaggagcuggacaaguacuucaagaaccacaccagccccgacguggaccugggggacaucuccggcaucaacgccagcgucgugaacauccagaaggagaucgaccgccucaacgagguggccaagaaccugaacgagucccugaucgaccuccaggagcuggggaaguacgagcaguacaucaaguggccgugguacaucuggcugggcuucaucgccggccucaucgcgaucgucauggugaccaucaugcugugcugcaugaccagcugcugcuccugccugaaggggugcugcagcugcggcuccugcugcaaguucgacgaggacgacagcgagcccgugcucaagggggucaagcugcacuacacgugaggacuagucccuguucccagagcccacuuuuuuuucuuuuuuugaaauaaaauagccugucuuucagaucucaaaggcucuuuucagagccaccaaaaaaaaaaaaaaaaaaaaaaaaaaaaaaaaaaaaaaaaaaaaaaaaaaaaaaaaaaaaaaaaaaaaaaaaaaaaaaaaaaaaaaaaaaaaaaaaaaaaa

SEQ ID NO: 12286 - RNA, 4094 nt, Artificial Sequence
  SARS-CoV-2/Hong Kong/case42_VM20002493/2020__EPI_ISL_414527 spike protein mRNA gc (1-1273)
aggagagucccgcagucggcguccagcggcucugcuuguucgugugugugucguugcaggccuuauucaagcuuaccauguucguguuccugguccuccugccccuggugagcucccagugcgugaaccucaccacccgcacgcagcugccgcccgccuacaccaacagcuucacccggggcgucuacuaccccgacaagguguuccgcuccagcgugcugcacuccacccaggaccucuuccugcccuucuucagcaacgucacgugguuccacgccauccacguguccgggaccaacggcaccaagcgguucgacaacccggugcugcccuucaacgacggggucuacuucgcgagcaccgagaaguccaacaucauccgcggcuggaucuucgggacgacccucgacagcaagacccagucccugcugaucgugaacaacgccaccaacguggucaucaaggugugcgaguuccaguucugcaacgaccccuuccucggcguguacuaccacaagaacaacaagagcuggauggaguccgaguuccgggucuacagcuccgccaacaacugcacguucgaguacgugagccagcccuuccugauggaccuggagggcaagcaggggaacuucaagaaccuccgcgaguucguguucaagaacaucgacggcuacuucaagaucuacuccaagcacaccccgaucaaccugguccgggaccugccccagggguucagcgcccucgagccccugguggaccugcccaucggcaucaacaucacccgcuuccagacccuccuggcccugcaccgguccuaccucacgccgggggacagcagcuccggcuggaccgcgggcgccgccgccuacuacgugggguaccugcagccccgcaccuuccugcucaaguacaacgagaacggcaccaucacggacgcggucgacugcgcccuggacccccugagcgagaccaagugcacccucaaguccuucaccguggagaaggggaucuaccagacgagcaacuuccgggugcagcccaccgaguccaucguccgcuucccgaacaucaccaaccugugccccuucggcgagguguucaacgccacccgguucgccagcgucuacgccuggaaccgcaagcggaucuccaacugcguggcggacuacagcgugcuguacaacuccgccagcuucuccacguucaagugcuacggcgucagccccaccaagcucaacgaccugugcuucaccaacguguacgccgacuccuucgugauccgcggggacgagguccggcagaucgcccccggccagaccgggaagaucgccgacuacaacuacaagcugccggacgacuucacgggcugcgugaucgcguggaacagcaacaaccucgacuccaaggucgggggcaacuacaacuaccuguaccgccuguuccgcaagagcaaccucaagcccuucgagcgggacaucuccaccgagaucuaccaggccggcagcacccccugcaacgggguggagggcuucaacugcuacuucccccugcaguccuacggguuccagccgaccaacggcgugggguaccagcccuaccggguggucgugcugagcuucgagcuccugcacgcccccgccacggugugcggccccaagaaguccaccaaccuggucaagaacaagugcgugaacuucaacuucaacggccucaccgggaccggcgugcugaccgagagcaacaagaaguuccugccguuccagcaguucgggcgcgacaucgccgacacgaccgacgcgguccgcgacccccagacccuggagauccucgacaucacccccugcagcuucggcgggguguccgugaucacgccgggcaccaacaccagcaaccaggucgccgugcuguaccaggacgugaacugcaccgagguccccguggccauccacgccgaccagcugacgcccaccuggcggguguacuccaccggcagcaacgucuuccagacccgcgccgggugccucaucggcgcggagcacgugaacaacuccuacgagugcgacauccccaucggggccggcaucugcgccagcuaccagacgcagaccaacuccccgcggcgcgcccggagcguggcgucccagagcaucaucgccuacaccaugucccugggcgccgagaacagcgucgccuacuccaacaacagcaucgccauccccaccaacuucgcgaucuccgugacgaccgagauccugcccgugagcaugaccaagaccagcgucgacugcacgauguacaucugcggggacuccaccgagugcagcaaccuccugcugcaguacggcuccuucugcacccagcucaaccgcgcccugaccgggaucgccguggagcaggacaagaacacgcaggagguguucgcccaggucaagcagaucuacaagacgcccccgaucaaggacuucggcggguucaacuucagccagauccugcccgaccccuccaagcccagcaagcgguccuucaucgaggaccuccuguucaacaaggugacccuggccgacgcgggcuucaucaagcaguacggcgacugccucggggacaucgccgcccgcgaccugaucugcgcccagaaguucaacggccugaccgugcucccgccccugcugaccgacgagaugaucgcccaguacaccagcgcgcuccuggccgggaccaucaccuccggcuggacguucggggccggcgccgcgcugcagauccccuucgccaugcagauggccuaccgguucaacggcaucggggucacccagaacgugcucuacgagaaccagaagcugaucgccaaccaguucaacagcgccaucggcaagauccaggacucccugagcuccaccgcgagcgcccucgggaagcugcaggacguggucaaccagaacgcccaggcccugaacacccucgugaagcagcuguccagcaacuucggcgccaucuccagcgugcugaacgacauccucucccgccuggacaaggucgaggcggaggugcagaucgaccggcugaucacggggcgccuccagagccugcagaccuacgugacccagcagcugauccgggccgccgagauccgcgccagcgccaaccucgcggccaccaagauguccgagugcguccugggccagagcaagcggguggacuucugcggcaagggguaccaccugauguccuucccccagagcgccccgcacggcguggucuuccuccacgugaccuacguccccgcccaggagaagaacuucacgaccgcgcccgccaucugccacgacgggaaggcccacuucccccgcgagggcguguucguguccaacgggacccacugguucgucacccagcggaacuucuacgagccgcagaucaucacgaccgacaacaccuucgugagcggcaacugcgacguggucaucggcaucgugaacaacaccguguacgacccccugcagcccgagcuggacuccuucaaggaggagcucgacaaguacuucaagaaccacacgagccccgacgucgaccugggggacaucuccggcaucaacgccagcguggugaacauccagaaggagaucgaccgccugaacgaggucgccaagaaccucaacgagucccugaucgaccugcaggagcucgggaaguacgagcaguacaucaaguggccgugguacaucuggcugggcuucaucgcgggccugaucgccaucgugauggugaccaucaugcucugcugcaugaccagcugcugcuccugccugaaggggugcugcagcugcggcuccugcugcaaguucgacgaggacgacagcgagcccguccugaagggggugaagcuccacuacaccugaggacuagucccuguucccagagcccacuuuuuuuucuuuuuuugaaauaaaauagccugucuuucagaucucaaaggcucuuuucagagccaccaaaaaaaaaaaaaaaaaaaaaaaaaaaaaaaaaaaaaaaaaaaaaaaaaaaaaaaaaaaaaaaaaaaaaaaaaaaaaaaaaaaaaaaaaaaaaaaaaaaaa

SEQ ID NO: 12287 - RNA, 4094 nt, Artificial Sequence
  SARS-CoV-2/USA/CruiseA-23/2020__EPI_ISL_414482 spike protein mRNA gc (1-1273)
aggagagucccgcagucggcguccagcggcucugcuuguucgugugugugucguugcaggccuuauucaagcuuaccauguucguguuccugguccuccugccccuggugagcucccagugcgugaaccucaccacccgcacgcagcugccgcccgccuacaccaacagcuucacccggggcgucuacuaccccgacaagguguuccgcuccagcgugcugcacuccacccaggaccucuuccugcccuucuucagcaacgucacgugguuccacgccauccacguguccgggaccaacggcaccaagcgguucgacaacccggugcugcccuucaacgacggggucuacuucgcgagcaccgagaaguccaacaucauccgcggcuggaucuucgggacgacccucgacagcaagacccagucccugcugaucgugaacaacgccaccaacguggucaucaaggugugcgaguuccaguucugcaacgaccccuuccucggcguguacuaccacaagaacaacaagagcuggauggaguccgaguuccgggucuacagcuccgccaacaacugcacguucgaguacgugagccagcccuuccugauggaccuggaggugaagcagggcaacuucaagaaccuccgcgaguucgucuucaagaacaucgacggguacuucaagaucuacuccaagcacaccccgaucaaccuggugcgggaccugccccagggcuucagcgcccucgagccccugguggaccugcccaucgggaucaacaucacccgcuuccagacccuccuggcccugcaccgguccuaccucacgccgggcgacagcagcuccggguggaccgcgggcgccgccgccuacuacgucggcuaccugcagccccgcaccuuccugcucaaguacaacgagaacgggaccaucacggacgcgguggacugcgcccuggacccccugagcgagaccaagugcacccucaaguccuucaccguggagaagggcaucuaccagacgagcaacuuccggguccagcccaccgaguccaucgugcgcuucccgaacaucaccaaccugugccccuucggggaggucuucaacgccacccgguucgccagcguguacgccuggaaccgcaagcggaucuccaacugcguggcggacuacagcguccuguacaacuccgccagcuucuccacguucaagugcuacggcgugagccccaccaagcucaacgaccugugcuucaccaacguguacgccgacuccuucgucauccgcggcgacgaggugcggcagaucgcccccgggcagaccggcaagaucgccgacuacaacuacaagcugccggacgacuucacggggugcgugaucgcguggaacagcaacaaccucgacuccaaggucggcgggaacuacaacuaccuguaccgccuguuccgcaagagcaaccucaagcccuucgagcgggacaucuccaccgagaucuaccaggccggcagcacccccugcaacggcguggagggguucaacugcuacuucccccugcaguccuacggcuuccagccgaccaacggggugggcuaccagcccuaccgggucguggugcugagcuucgagcuccugcacgcccccgccacggucugcgggcccaagaaguccaccaaccuggugaagaacaagugcgugaacuucaacuucaacggccucaccggcaccgggguccugaccgagagcaacaagaaguuccugccguuccagcaguucggccgcgacaucgccgacacgaccgacgcggugcgcgacccccagacccuggagauccucgacaucacccccugcagcuucgggggcguguccgucaucacgccggggaccaacaccagcaaccagguggccgugcuguaccaggacgucaacugcaccgaggugcccguggccauccacgccgaccagcugacgcccaccuggcgggucuacuccaccggcagcaacguguuccagacccgcgccggcugccucaucggggcggagcacgugaacaacuccuacgagugcgacauccccaucggcgccgggaucugcgccagcuaccagacgcagaccaacuccccgcggcgcgcccggagcgucgcgucccagagcaucaucgccuacaccaugucccugggcgccgagaacagcguggccuacuccaacaacagcaucgccauccccaccaacuucacgaucuccgugaccaccgagauccugcccgucagcaugaccaagacgagcguggacugcaccauguacaucugcggcgacuccaccgagugcagcaaccuccugcugcaguacggguccuucugcacccagcucaaccgcgcgcugacgggcaucgccguggagcaggacaagaacacccaggaggucuucgcccaggugaagcagaucuacaagacgcccccgaucaaggacuucgggggcuucaacuucagccagauccugcccgaccccuccaagcccagcaagcgguccuucaucgaggaccuccuguucaacaaggugacccuggccgacgccggguucaucaagcaguacggcgacugccucggcgacaucgcggcccgcgaccugaucugcgcccagaaguucaacgggcugaccguccucccgccccugcugaccgacgagaugaucgcccaguacaccagcgcccuccuggcgggcaccaucacguccggguggaccuucggcgccggggccgcccugcagauccccuucgcgaugcagauggccuaccgguucaacggcaucggcgugacccagaacgugcucuacgagaaccagaagcugaucgccaaccaguucaacagcgccaucgggaagauccaggacucccugagcuccaccgccagcgcgcucggcaagcugcaggacgucgugaaccagaacgcccaggcccugaacacgcucgugaagcagcuguccagcaacuucggggccaucuccagcguccugaacgacauccucucccgccuggacaagguggaggccgaggugcagaucgaccggcugaucaccggccgccuccagagccugcagaccuacgucacccagcagcugauccgggcggccgagauccgcgccagcgccaaccucgccgcgaccaagauguccgagugcgugcuggggcagagcaagcggguggacuucugcggcaagggcuaccaccugauguccuucccccagagcgccccgcacggggucguguuccuccacgucacguacgugcccgcccaggagaagaacuucaccaccgcccccgcgaucugccacgacggcaaggcccacuucccccgcgaggggguguucgucuccaacggcacccacugguucgugacgcagcggaacuucuacgagccgcagaucaucaccaccgacaacaccuucgugagcgggaacugcgacgucgugaucggcaucgugaacaacacggucuacgacccccugcagcccgagcuggacuccuucaaggaggagcucgacaaguacuucaagaaccacaccagccccgacguggaccugggcgacaucuccgggaucaacgccagcguggucaacauccagaaggagaucgaccgccugaacgagguggccaagaaccucaacgagucccugaucgaccugcaggagcucggcaaguacgagcaguacaucaaguggccgugguacaucuggcugggguucaucgccggccugaucgcgaucgugauggucaccaucaugcucugcugcaugaccagcugcugcuccugccugaagggcugcugcagcugcggguccugcugcaaguucgacgaggacgacagcgagcccgugcugaagggcgugaagcuccacuacacgugaggacuagucccuguucccagagcccacuuuuuuuucuuuuuuugaaauaaaauagccugucuuucagaucucaaaggcucuuuucagagccaccaaaaaaaaaaaaaaaaaaaaaaaaaaaaaaaaaaaaaaaaaaaaaaaaaaaaaaaaaaaaaaaaaaaaaaaaaaaaaaaaaaaaaaaaaaaaaaaaaaaaa

SEQ ID NO: 12288 - RNA, 4094 nt, Artificial Sequence
  SARS-CoV-2/Hong Kong/case85_VM20002868/2020__EPI_ISL_414519 spike protein mRNA gc (1-1273)
aggagagucccgcagucggcguccagcggcucugcuuguucgugugugugucguugcaggccuuauucaagcuuaccauguucguguuccugguccucgugccccuggugagcucccagugcgucaaccugaccacccgcacgcagcucccgcccgccuacaccaacagcuucacccggggcguguacuaccccgacaagguguuccgcuccagcguccugcacuccacccaggaccuguuccuccccuucuucagcaacgugacgugguuccacgccauccacguguccgggaccaacggcaccaagcgguucgacaacccgguccugcccuucaacgacgggguguacuucgcgagcaccgagaaguccaacaucauccgcggcuggaucuucgggacgacccuggacagcaagacccagucccuccugaucgugaacaacgccaccaacgucgugaucaaggugugcgaguuccaguucugcaacgaccccuuccugggcgucuacuaccacaagaacaacaagagcuggauggaguccgaguuccggguguacagcuccgccaacaacugcacguucgaguacgugagccagcccuuccucauggaccuggagggcaagcaggggaacuucaagaaccugcgcgaguucgucuucaagaacaucgacggcuacuucaagaucuacuccaagcacaccccgaucaaccucgugcgggaccugccccagggguucagcgcccuggagccccucguggaccugcccaucggcaucaacaucacccgcuuccagacccugcucgcccugcaccgguccuaccugacgccgggggacagcagcuccggcuggaccgcgggcgccgccgccuacuacgucggguaccuccagccccgcaccuuccugcugaaguacaacgagaacggcaccaucacggacgcgguggacugcgcccucgacccccugagcgagaccaagugcacccugaaguccuucaccguggagaaggggaucuaccagacgagcaacuuccggguccagcccaccgaguccaucgugcgcuucccgaacaucaccaaccucugccccuucggcgaggucuucaacgccacccgguucgccagcguguacgccuggaaccgcaagcggaucuccaacugcguggcggacuacagcguccuguacaacuccgccagcuucuccacguucaagugcuacggcgugagccccaccaagcugaacgaccucugcuucaccaacguguacgccgacuccuucgucauccgcggggacgaggugcggcagaucgcccccggccagaccgggaagaucgccgacuacaacuacaagcugccggacgacuucacgggcugcgugaucgcguggaacagcaacaaccuggacuccaaggucgggggcaacuacaacuaccucuaccgccuguuccgcaagagcaaccugaagcccuucgagcgggacaucuccaccgagaucuaccaggccggcagcacccccugcaacgggguggagggcuucaacugcuacuucccccuccaguccuacggguuccagccgaccaacggcgugggguaccagcccuaccgggucguggugcugagcuucgagcugcuccacgcccccgccacggucugcggccccaagaaguccaccaaccuggugaagaacaagugcgugaacuucaacuucaacggccugaccgggaccggcguccucaccgagagcaacaagaaguuccugccguuccagcaguucgggcgcgacaucgccgacacgaccgacgcggugcgcgacccccagacccuggagauccuggacaucacccccugcagcuucggcgggguguccgucaucacgccgggcaccaacaccagcaaccagguggccgugcucuaccaggacgucaacugcaccgaggugcccguggccauccacgccgaccagcugacgcccaccuggcgggucuacuccaccggcagcaacguguuccagacccgcgccgggugccugaucggcgcggagcacgugaacaacuccuacgagugcgacauccccaucggggccggcaucugcgccagcuaccagacgcagaccaacuccccgcggcgcgcccggagcgucgcgucccagagcaucaucgccuacaccaugucccucggcgccgagaacagcguggccuacuccaacaacagcaucgccauccccaccaacuucacgaucuccgugaccaccgagauccugcccgucagcaugaccaagacgagcguggacugcaccauguacaucugcggggacuccaccgagugcagcaaccugcuccugcaguacggcuccuucugcacccagcugaaccgcgcgcucacggggaucgccguggagcaggacaagaacacccaggaggucuucgcccaggugaagcagaucuacaagacgcccccgaucaaggacuucggcggguucaacuucagccagauccugcccgaccccuccaagcccagcaagcgguccuucaucgaggaccuccuguucaacaaggugacccuggccgacgccggcuucaucaagcaguacggcgacugccugggggacaucgcggcccgcgaccucaucugcgcccagaaguucaacggccugaccguccugccgccccuccugaccgacgagaugaucgcccaguacaccagcgcccugcucgcggggaccaucacguccggcuggaccuucggggccggcgccgcccugcagauccccuucgcgaugcagauggccuaccgguucaacggcaucggggugacccagaacgugcuguacgagaaccagaagcucaucgccaaccaguucaacagcgccaucggcaagauccaggacucccugagcuccaccgccagcgcgcuggggaagcuccaggacgucgugaaccagaacgcccaggcccugaacacgcuggugaagcagcucuccagcaacuucggcgccaucuccagcguccugaacgacauccugucccgccucgacaagguggaggccgaggugcagaucgaccggcugaucaccgggcgccugcagagccuccagaccuacgucacccagcagcugauccgggcggccgagauccgcgccagcgccaaccuggccgcgaccaagauguccgagugcgugcucggccagagcaagcggguggacuucugcggcaagggguaccaccugauguccuucccccagagcgccccgcacggcgucguguuccugcacgucacguacgugcccgcccaggagaagaacuucaccaccgcccccgcgaucugccacgacgggaaggcccacuucccccgcgagggcguguucgucuccaacgggacccacugguucgugacgcagcggaacuucuacgagccgcagaucaucaccaccgacaacaccuucgugagcggcaacugcgacgucgugaucggcaucgugaacaacacggucuacgacccccuccagcccgagcuggacuccuucaaggaggagcuggacaaguacuucaagaaccacaccagccccgacguggaccucggggacaucuccggcaucaacgccagcguggucaacauccagaaggagaucgaccgccugaacgagguggccaagaaccugaacgagucccucaucgaccugcaggagcuggggaaguacgagcaguacaucaaguggccgugguacaucuggcucggcuucaucgccggccugaucgcgaucgugauggucaccaucaugcugugcugcaugaccagcugcugcuccugccucaaggggugcugcagcugcggcuccugcugcaaguucgacgaggacgacagcgagcccgugcugaagggggugaagcugcacuacacgugaggacuagucccuguucccagagcccacuuuuuuuucuuuuuuugaaauaaaauagccugucuuucagaucucaaaggcucuuuucagagccaccaaaaaaaaaaaaaaaaaaaaaaaaaaaaaaaaaaaaaaaaaaaaaaaaaaaaaaaaaaaaaaaaaaaaaaaaaaaaaaaaaaaaaaaaaaaaaaaaaaaaa

SEQ ID NO: 12289 - RNA, 4094 nt, Artificial Sequence
  SARS-CoV-2/England/200990660/2020__EPI_ISL_414523 spike protein mRNA gc (1-1273)
aggagagucccgcagucggcguccagcggcucugcuuguucgugugugugucguugcaggccuuauucaagcuuaccauguucguguuccugguccuccugccccuggugagcucccagugcgugaaccucaccacccgcacgcagcugccgcccgccuacaccaacagcuucacccggggcgucuacuaccccgacaagguguuccgcuccagcgugcugcacuccacccaggaccucuuccugcccuucuucagcaacgucacgugguuccacgccauccacguguccgggaccaacggcaccaagcgguucgacaacccggugcugcccuucaacgacggggucuacuucgcgagcaccgagaaguccaacaucauccgcggcuggaucuucgggacgacccucgacagcaagacccagucccugcugaucgugaacaacgccaccaacguggucaucaaggugugcgaguuccaguucugcaacgaccccuuccucggcguguacuaccacaagaacaacaagagcuggauggaguccgaguuccgggucuacagcuccgccaacaacugcacguucgaguacgugagccagcccuuccugauggaccuggagggcaagcaggggaacuucaagaaccuccgcgaguucguguucaagaacaucgacggcuacuucaagaucuacuccaagcacaccccgaucaaccugguccgggaccugccccagggguucagcgcccucgagccccugguggaccugcccaucggcaucaacaucacccgcuuccagacccuccuggcccugcaccgguccuaccucacgccgggggacagcagcuccggcuggaccgcgggcgccgccgccuacuacgugggguaccugcagccccgcaccuuccugcucaaguacaacgagaacggcaccaucacggacgcggucgacugcgcccuggacccccugagcgagaccaagugcacccucaaguccuucaccguggagaaggggaucuaccagacgagcaacuuccgggugcagcccaccgaguccaucguccgcuucccgaacaucaccaaccugugccccuucggcgagguguucaacgccacccgguucgccagcgucuacgccuggaaccgcaagcggaucuccaacugcguggcggacuacagcgugcuguacaacuccgccagcuucuccacguucaagugcuacggcgucagccccaccaagcucaacgaccugugcuucaccaacguguacgccgacuccuucgugauccgcggggacgagguccggcagaucgcccccggccagaccgggaagaucgccgacuacaacuacaagcugccggacgacuucacgggcugcgugaucgcguggaacagcaacaaccucgacuccaaggucgggggcaacuacaacuaccuguaccgccuguuccgcaagagcaaccucaagcccuucgagcgggacaucuccaccgagaucuaccaggccggcagcacccccugcaacgggguggagggcuucaacugcuacuucccccugcaguccuacggguuccagccgaccaacggcgugggguaccagcccuaccggguggucgugcugagcuucgagcuccugcacgcccccgccacggugugcggccccaagaaguccaccaaccuggucaagaacaagugcgugaacuucaacuucaacggccucaccgggaccggcgugcugaccgagagcaacaagaaguuccugccguuccagcaguucgggcgcgacaucgccgacacgaccgacgcgguccgcgacccccagacccuggagauccucgacaucacccccugcagcuucggcgggguguccgugaucacgccgggcaccaacaccagcaaccaggucgccgugcuguaccagggcgugaacugcaccgagguccccguggccauccacgccgaccagcugacgcccaccuggcggguguacuccaccgggagcaacgucuuccagacccgcgccggcugccucaucggggcggagcacgugaacaacuccuacgagugcgacauccccaucggcgccggcaucugcgccagcuaccagacgcagaccaacuccccgcggcgcgcccggagcguggcgucccagagcaucaucgccuacaccaugucccugggggccgagaacagcgucgccuacuccaacaacagcaucgccauccccaccaacuucacgaucuccgugaccaccgagauccugcccgugagcaugaccaagacgagcgucgacugcaccauguacaucugcggcgacuccaccgagugcagcaaccuccugcugcaguacggguccuucugcacccagcucaaccgcgcgcugacgggcaucgccguggagcaggacaagaacacccaggagguguucgcccaggucaagcagaucuacaagacgcccccgaucaaggacuucgggggcuucaacuucagccagauccugcccgaccccuccaagcccagcaagcgguccuucaucgaggaccuccuguucaacaaggugacccuggccgacgccggcuucaucaagcaguacggggacugccucggcgacaucgcggcccgcgaccugaucugcgcccagaaguucaacgggcugaccgugcucccgccccugcugaccgacgagaugaucgcccaguacaccagcgcccuccuggcgggcaccaucacguccggguggaccuucggcgccggcgccgcccugcagauccccuucgcgaugcagauggccuaccgguucaacgggaucggcgucacccagaacgugcucuacgagaaccagaagcugaucgccaaccaguucaacagcgccaucgggaagauccaggacucccugagcuccaccgccagcgcgcucggcaagcugcaggacguggucaaccagaacgcccaggcccugaacacgcucgugaagcagcuguccagcaacuucggggccaucuccagcgugcugaacgacauccucucccgccuggacaaggucgaggccgaggugcagaucgaccggcugaucaccggccgccuccagagccugcagaccuacgugacccagcagcugauccgggcggccgagauccgcgccagcgccaaccucgccgcgaccaagauguccgagugcguccugggccagagcaagcggguggacuucugcgggaagggcuaccaccugauguccuucccccagagcgccccgcacgggguggucuuccuccacgugacguacguccccgcccaggagaagaacuucaccaccgcccccgcgaucugccacgacggcaaggcccacuucccccgcgaggggguguucguguccaacggcacccacugguucgucacgcagcggaacuucuacgagccgcagaucaucaccaccgacaacaccuucgugagcggcaacugcgacguggucaucgggaucgugaacaacacgguguacgacccccugcagcccgagcuggacuccuucaaggaggagcucgacaaguacuucaagaaccacaccagccccgacgucgaccugggcgacaucuccgggaucaacgccagcguggugaacauccagaaggagaucgaccgccugaacgaggucgccaagaaccucaacgagucccugaucgaccugcaggagcucggcaaguacgagcaguacaucaaguggccgugguacaucuggcugggcuucaucgccgggcugaucgcgaucgugauggugaccaucaugcucugcugcaugaccagcugcugcuccugccugaagggcugcugcagcugcggguccugcugcaaguucgacgaggacgacagcgagcugguccucaagggcgugaagcugcacuacacgugaggacuagucccuguucccagagcccacuuuuuuuucuuuuuuugaaauaaaauagccugucuuucagaucucaaaggcucuuuucagagccaccaaaaaaaaaaaaaaaaaaaaaaaaaaaaaaaaaaaaaaaaaaaaaaaaaaaaaaaaaaaaaaaaaaaaaaaaaaaaaaaaaaaaaaaaaaaaaaaaaaaaa

SEQ ID NO: 12290 - RNA, 4094 nt, Artificial Sequence
  SARS-CoV-2/Australia/NSW09/2020__EPI_ISL_413595 spike protein mRNA gc (1-1273)
aggagagucccgcagucggcguccagcggcucugcuuguucgugugugugucguugcaggccuuauucaagcuuaccauguucguguuccugguccuccugccccuggugagcucccagugcgugaaccucaccacccgcacgcagcugccgcccgccuacaccaacagcuucacccggggcgucuacuaccccgacaagguguuccgcuccagcgugcugcacuccacccaggaccucuuccugcccuucuucagcaacgucacgugguuccacgccauccacguguccgggaccaacggcaccaagcgguucgacaacccggugcugcccuucaacgacggggucuacuucgcgagcaccgagaaguccaacaucauccgcggcuggaucuucgggacgacccucgacagcaagacccagucccugcugaucgugaacaacgccaccaacguggucaucaaggugugcgaguuccaguucugcaacgaccccuuccucggcguguacuaccacaagaacaacaagagcuggauggaguccgaguuccgggucuacagcuccgccaacaacugcacguucgaguacgugagccagcccuuccugauggaccuggagggcaagcaggggaacuucaagaaccuccgcgaguucguguucaagaacaucgacggcuacuucaagaucuacuccaagcacaccccgaucaaccugguccgggaccugccccagggguucagcgcccucgagccccugguggaccugcccaucggcaucaacaucacccgcuuccagacccuccuggcccugcaccgguccuaccucacgccgggggacagcagcuccggcuggaccgcgggcgccgccgccuacuacgugggguaccugcagccccgcaccuuccugcucaaguacaacgagaacggcaccaucacggacgcggucgacugcgcccuggacccccugagcgagaccaagugcacccucaaguccuucaccguggagaaggggaucuaccagacgagcaacuuccgggugcagcccaccgaguccaucguccgcuucccgaacaucaccaaccugugccccuucggcgagguguucaacgccacccgguucgccagcgucuacgccuggaaccgcaagcggaucuccaacugcguggcggacuacagcgugcuguacaacuccgccagcuucuccacguucaagugcuacggcgucagccccaccaagcucaacgaccugugcuucaccaacguguacgccgacuccuucgugauccgcggggacgagguccggcagaucgcccccggccagaccgggaagaucgccgacuacaacuacaagcugccggacgacuucacgggcugcgugaucgcguggaacagcaacaaccucgacuccaaggucgggggcaacuacaacuaccuguaccgccuguuccgcaagagcaaccucaagcccuucgagcgggacaucuccaccgagaucuaccaggccggcagcacccccugcaacgggguggagggcuucaacugcuacuucccccugcaguccuacggguuccagccgaccaacggcgugggguaccagcccuaccggguggucgugcugagcuucgagcuccugcacgcccccgccacggugugcggccccaagaaguccaccaaccuggucaagaacaagugcgugaacuucaacuucaacggccucaccgggaccggcgugcugaccgagagcaacaagaaguuccugccguuccagcaguucgggcgcgacaucgccgacacgaccgacgcgguccgcgacccccagacccuggagauccucgacaucacccccugcagcuucggcgggguguccgugaucacgccgggcaccaacaccagcaaccaggucgccgugcuguaccaggacgugaacugcaccgagguccccguggccauccacgccgaccagcugacgcccaccuggcggguguacuccaccggcagcaacgucuuccagacccgcgccgggugccucaucggcgcggagcacgugaacaacuccuacgagugcgacauccccaucggggccggcaucugcgccagcuaccagacgcagaccaacuccccgcggcgcgcccggagcguggcgucccagagcaucaucgccuacaccaugucccugggcgccgagaacagcgucgccuacuccaacaacagcaucgccauccccaccaacuucacgaucuccgugaccaccgagauccugcccgugagcaugaccaagacgagcgucgacugcaccauguacaucugcggggacuccaccgagugcagcaaccuccugcugcaguacggcuccuucugcacccagcucaaccgcgcgcugacggggaucgccguggagcaggacaagaacacccaggagguguucgcccaggucaagcagaucuacaagacgcccccgaucaaggacuucggcggguucaacuucagccagauccugcccgaccccuccaagcccagcaagcgguccuucaucgaggaccuccuguucaacaaggugacccuggccgacgccggcuucaucaagcaguacggcgacugccucggggacaucgcggcccgcgaccugaucugcgcccagaaguucaacggccugaccgugcucccgccccugcugaccgacgagaugaucgcccaguacaccagcgcccuccuggcggggaccaucacguccggcuggaccuucggggccggcgccgcccugcagauccccuucgcgaugcagauggccuaccgguucaacggcaucggggucacccagaacgugcucuacgagaaccagaagcugaucgccaaccaguucaacagcgccaucggcaagauccaggacucccugagcuucaccgccuccgcgcucgggaagcugcaggacguggucaaccagaacgcccaggcccugaacacgcucgugaagcagcugagcuccaacuucggcgccaucagcuccgugcugaacgacauccucagccgccuggacaaggucgaggccgaggugcagaucgaccggcugaucaccgggcgccuccagucccugcagaccuacgugacccagcagcugauccgggcggccgagauccgcgccagcgccaaccucgccgcgaccaagaugagcgagugcguccugggccaguccaagcggguggacuucugcggcaagggguaccaccugaugagcuucccccaguccgccccgcacggcguggucuuccuccacgugacguacguccccgcccaggagaagaacuucaccaccgcccccgcgaucugccacgacgggaaggcccacuucccccgcgagggcguguucgugagcaacgggacccacugguucgucacgcagcggaacuucuacgagccgcagaucaucaccaccgacaacaccuucguguccggcaacugcgacguggucaucggcaucgugaacaacacgguguacgacccccugcagcccgagcuggacagcuucaaggaggagcucgacaaguacuucaagaaccacaccucccccgacgucgaccugggggacaucagcggcaucaacgccuccguggugaacauccagaaggagaucgaccgccugaacgaggucgccaagaaccucaacgagagccugaucgaccugcaggagcucgggaaguacgagcaguacaucaaguggccgugguacaucuggcugggcuucaucgccggccugaucgcgaucgugauggugaccaucaugcucugcugcaugaccuccugcugcagcugccugaaggggugcugcuccugcggcagcugcugcaaguucgacgaggacgacuccgagcccguccugaagggggugaagcuccacuacacgugaggacuagucccuguucccagagcccacuuuuuuuucuuuuuuugaaauaaaauagccugucuuucagaucucaaaggcucuuuucagagccaccaaaaaaaaaaaaaaaaaaaaaaaaaaaaaaaaaaaaaaaaaaaaaaaaaaaaaaaaaaaaaaaaaaaaaaaaaaaaaaaaaaaaaaaaaaaaaaaaaaaaa

SEQ ID NO: 12291 - RNA, 4094 nt, Artificial Sequence
  SARS-CoV-2/Australia/NSW10/2020__EPI_ISL_413596 spike protein mRNA gc (1-1273)
aggagagucccgcagucggcguccagcggcucugcuuguucgugugugugucguugcaggccuuauucaagcuuaccauguucguguuccugguccuccugccccuggugagcucccagugcgugaaccucaccacccgcacgcagcugccgcccgccuacaccaacagcuucacccggggcgucuacuaccccgacaagguguuccgcuccagcgugcugcacuccacccaggaccucuuccugcccuucuucagcaacgucacgugguuccacgccauccacguguccgggaccaacggcaccaagcgguucgacaacccggugcugcccuucaacgacggggucuacuucgcgagcaccgagaaguccaacaucauccgcggcuggaucuucgggacgacccucgacagcaagacccagucccugcugaucgugaacaacgccaccaacguggucaucaaggugugcgaguuccaguucugcaacgaccccuuccucggcguguacuaccacaagaacaacaagagcuggauggaguccgaguuccgggucuacagcuccgccaacaacugcacguucgaguacgugagccagcccuuccugauggaccuggagggcaagcaggggaacuucaagaaccuccgcgaguucguguucaagaacaucgacggcuacuucaagaucuacuccaagcacaccccgaucaaccugguccgggaccugccccagggguucagcgcccucgagccccugguggaccugcccaucggcaucaacaucacccgcuuccagacccuccuggcccugcaccgguccuaccucacgccgggggacagcagcuccggcuggaccgcgggcgccgccgccuacuacgugggguaccugcagccccgcaccuuccugcucaaguacaacgagaacggcaccaucacggacgcggucgacugcgcccuggacccccugagcgagaccaagugcacccucaaguccuucaccguggagaaggggaucuaccagacgagcaacuuccgggugcagcccaccgaguccaucguccgcuucccgaacaucaccaaccugugccccuucggcgagguguucaacgccacccgguucgccagcgucuacgccuggaaccgcaagcggaucuccaacugcguggcggacuacagcgugcuguacaacuccgccagcuucuccacguucaagugcuacggcgucagccccaccaagcucaacgaccugugcuucaccaacguguacgccgacuccuucgugauccgcggggacgagguccggcagaucgcccccggccagaccgggaagaucgccgacuacaacuacaagcugccggacgacuucacgggcugcgugaucgcguggaacagcaacaaccucgacuccaaggucgggggcaacuacaacuaccuguaccgccuguuccgcaagagcaaccucaagcccuucgagcgggacaucuccaccgagaucuaccaggccggcagcacccccugcaacgggguggagggcuucaacugcuacuucccccugcaguccuacggguuccagccgaccaacggcgugggguaccagcccuaccggguggucgugcugagcuucgagcuccugcacgcccccgccacggugugcggccccaagaaguccaccaaccuggucaagaacaagugcgugaacuucaacuucaacggccucaccgggaccggcgugcugaccgagagcaacaagaaguuccugccguuccagcaguucgggcgcgacaucgccgacacgaccgacgcgguccgcgacccccagacccuggagauccucgacaucacccccugcagcuucggcgggguguccgugaucacgccgggcaccaacaccagcaaccaggucgccgugcuguaccaggacgugaacugcaccgagguccccguggccauccacgccgaccagcugacgcccaccuggcggguguacuccaccggcagcaacgucuuccagacccgcgccgggugccucaucggcgcggagcacgugaacaacuccuacgagugcgacauccccaucggggccggcaucugcgccagcuaccagacgcagaccaacuccccgcggcgcgcccggagcguggcgucccagagcaucaucgccuacaccaugucccugggcgccgagaacagcgucgccuacuccaacaacagcaucgccauccccaccaacuucacgaucuccgugaccaccgagauccugcccgugagcaugaccaagacgagcgucgacugcaccauguacaucugcggggacuccaccgagugcagcaaccuccugcugcaguacggcuccuucugcacccagcucaaccgcgcgcugacggggaucgccguggagcaggacaagaacacccaggagguguucgcccaggucaagcagaucuacaagacgcccccgaucaaggacuucggcggguucaacuucagccagauccugcccgaccccuccaagcccagcaagcgguccuucaucgaggaccuccuguucaacaaggugacccuggccgacgccggcuucaucaagcaguacggcgacugccucggggacaucgcggcccgcgaccugaucugcgcccagaaguucaacggccugaccgugcucccgccccugcugaccgacgagaugaucgcccaguacaccagcgcccuccuggcggggaccaucacguccggcuggaccuucggggccggcgccgcccugcagauccccuucgcgaugcagauggccuaccgguucaacggcaucggggucacccagaacgugcucuacgagaaccagaagcugaucgccaaccaguucaacagcgccaucggcaagauccaggacucccugagcuccaccgccagcgcgcucgggaagcugcaggacguggucaaccagaacgcccaggcccugaacacgcucgugaagcagcuguccagcaacuucggcgccaucuccagcgugcugaacgacauccucucccgccuggacaaggucgaggccgaggugcagaucgaccggcugaucaccgggcgccuccagagccugcagaccuacgugacccagcagcugauccgggcggccgagauccgcgccagcgccaaccucgccgcgaccaagauguccgagugcguccugggccagagcaagcggguggacuucugcggcaagggguaccaccugauguccuucccccagagcgccccgcacggcguggucuuccuccacgugacguacguccccgcccaggagaagaacuucaccaccgcccccgcgaucugccacgacgggaaggcccacuucccccgcgagggcguguucguguccaacgggacccacugguucgucacgcagcggaacuucuacgagccgcagaucaucaccaccgacaacaccuucgugagcggcaacugcgacguggucaucggcaucgugaacaacacgguguacgacccccugcagcccgagcuggacuccuucaaggaggagcucgacaaguacuucaagaaccacaccagccccgacgucgaccugggggacaucuccggcaucaacgccagcguggugaacauccagaaggagaucgaccgccugaacgaggucgccaagaaccucaacgagucccugaucgaccugcaggagcucgggaaguacgagcaguacaucaaguggccgugguacaucuggcugggcuucaucgccggccugaucgcgaucgugauggugaccaucaugcucugcugcaugaccagcugcugcuccugccugaaggggugcugcagcugcggcuccugcuucaaguucgacgaggacgacagcgagcccguccugaagggggugaagcuccacuacacgugaggacuagucccuguucccagagcccacuuuuuuuucuuuuuuugaaauaaaauagccugucuuucagaucucaaaggcucuuuucagagccaccaaaaaaaaaaaaaaaaaaaaaaaaaaaaaaaaaaaaaaaaaaaaaaaaaaaaaaaaaaaaaaaaaaaaaaaaaaaaaaaaaaaaaaaaaaaaaaaaaaaaa

SEQ ID NO: 12292 - RNA, 4094 nt, Artificial Sequence
  SARS-CoV-2/Switzerland/1000477797/2020__EPI_ISL_413023 spike protein mRNA gc (1-1273)
aggagagucccgcagucggcguccagcggcucugcuuguucgugugugugucguugcaggccuuauucaagcuuaccauguucguguuccugguccuccugccccuggugagcucccagugcgugaaccucaccacccgcacgcagcugccgcccgccuacaccaacagcuucacccggggcgucuacuaccccgacaagguguuccgcuccagcgugcugcacuccacccaggaccucuuccugcccuucuucagcaacgucacgugguuccacgccauccacguguccgggaccaacggcaccaagcgguucgacaacccggugcugcccuucaacgacggggucuacuucgcgagcaccgagaaguccaacaucauccgcggcuggaucuucgggacgacccucgacagcaagacccagucccugcugaucgugaacaacgccaccaacguggucaucaaggugugcgaguuccaguucugcaacgaccccuuccucggcguguacuaccacaagaacaacaagagcuggauggaguccgaguuccgggucuacagcuccgccaacaacugcacguucgaguacgugagccagcccuuccugauggaccuggagggcaagcaggggaacuucaagaaccuccgcgaguucguguucaagaacaucgacggcuacuucaacaucuacuccaagcacaccccgaucaaccugguccgggaccugccccagggguucagcgcccucgagccccugguggaccugcccaucggcaucaacaucacccgcuuccagacccuccuggcccugcaccgguccuaccucacgccgggggacagcagcuccggcuggaccgcgggcgccgccgccuacuacgugggguaccugcagccccgcaccuuccugcucaaguacaacgagaacggcaccaucacggacgcggucgacugcgcccuggacccccugagcgagaccaagugcacccucaaguccuucaccguggagaaggggaucuaccagacgagcaacuuccgggugcagcccaccgaguccaucguccgcuucccgaacaucaccaaccugugccccuucggcgagguguucaacgccacccgguucgccagcgucuacgccuggaaccgcaagcggaucuccaacugcguggcggacuacagcgugcuguacaacuccgccagcuucuccacguucaagugcuacggcgucagccccaccaagcucaacgaccugugcuucaccaacguguacgccgacuccuucgugauccgcggggacgagguccggcagaucgcccccggccagaccgggaagaucgccgacuacaacuacaagcugccggacgacuucacgggcugcgugaucgcguggaacagcaacaaccucgacuccaaggucgggggcaacuacaacuaccuguaccgccuguuccgcaagagcaaccucaagcccuucgagcgggacaucuccaccgagaucuaccaggccggcagcacccccugcaacgggguggagggcuucaacugcuacuucccccugcaguccuacggguuccagccgaccaacggcgugggguaccagcccuaccggguggucgugcugagcuucgagcuccugcacgcccccgccacggugugcggccccaagaaguccaccaaccuggucaagaacaagugcgugaacuucaacuucaacggccucaccgggaccggcgugcugaccgagagcaacaagaaguuccugccguuccagcaguucgggcgcgacaucgccgacacgaccgacgcgguccgcgacccccagacccuggagauccucgacaucacccccugcagcuucggcgggguguccgugaucacgccgggcaccaacaccagcaaccaggucgccgugcuguaccagggcgugaacugcaccgagguccccguggccauccacgccgaccagcugacgcccaccuggcggguguacuccaccgggagcaacgucuuccagacccgcgccggcugccucaucggggcggagcacgugaacaacuccuacgagugcgacauccccaucggcgccggcaucugcgccagcuaccagacgcagaccaacuccccgcggcgcgcccggagcguggcgucccagagcaucaucgccuacaccaugucccugggggccgagaacagcgucgccuacuccaacaacagcaucgccauccccaccaacuucacgaucuccgugaccaccgagauccugcccgugagcaugaccaagacgagcgucgacugcaccauguacaucugcggcgacuccaccgagugcagcaaccuccugcugcaguacggguccuucugcacccagcucaaccgcgcgcugacgggcaucgccguggagcaggacaagaacacccaggagguguucgcccaggucaagcagaucuacaagacgcccccgaucaaggacuucgggggcuucaacuucagccagauccugcccgaccccuccaagcccagcaagcgguccuucaucgaggaccuccuguucaacaaggugacccuggccgacgccggcuucaucaagcaguacggggacugccucggcgacaucgcggcccgcgaccugaucugcgcccagaaguucaacgggcugaccgugcucccgccccugcugaccgacgagaugaucgcccaguacaccagcgcccuccuggcgggcaccaucacguccggguggaccuucggcgccggcgccgcccugcagauccccuucgcgaugcagauggccuaccgguucaacgggaucggcgucacccagaacgugcucuacgagaaccagaagcugaucgccaaccaguucaacagcgccaucgggaagauccaggacucccugagcuccaccgccagcgcgcucggcaagcugcaggacguggucaaccagaacgcccaggcccugaacacgcucgugaagcagcuguccagcaacuucggggccaucuccagcgugcugaacgacauccucucccgccuggacaaggucgaggccgaggugcagaucgaccggcugaucaccggccgccuccagagccugcagaccuacgugacccagcagcugauccgggcggccgagauccgcgccagcgccaaccucgccgcgaccaagauguccgagugcguccugggccagagcaagcggguggacuucugcgggaagggcuaccaccugauguccuucccccagagcgccccgcacgggguggucuuccuccacgugacguacguccccgcccaggagaagaacuucaccaccgcccccgcgaucugccacgacggcaaggcccacuucccccgcgaggggguguucguguccaacggcacccacugguucgucacgcagcggaacuucuacgagccgcagaucaucaccaccgacaacaccuucgugagcggcaacugcgacguggucaucgggaucgugaacaacacgguguacgacccccugcagcccgagcuggacuccuucaaggaggagcucgacaaguacuucaagaaccacaccagccccgacgucgaccugggcgacaucuccgggaucaacgccagcguggugaacauccagaaggagaucgaccgccugaacgaggucgccaagaaccucaacgagucccugaucgaccugcaggagcucggcaaguacgagcaguacaucaaguggccgugguacaucuggcugggcuucaucgccgggcugaucgcgaucgugauggugaccaucaugcucugcugcaugaccagcugcugcuccugccugaagggcugcugcagcugcggguccugcugcaaguucgacgaggacgacagcgagcccguccugaagggcgugaagcuccacuacacgugaggacuagucccuguucccagagcccacuuuuuuuucuuuuuuugaaauaaaauagccugucuuucagaucucaaaggcucuuuucagagccaccaaaaaaaaaaaaaaaaaaaaaaaaaaaaaaaaaaaaaaaaaaaaaaaaaaaaaaaaaaaaaaaaaaaaaaaaaaaaaaaaaaaaaaaaaaaaaaaaaaaaa

SEQ ID NO: 12293 - RNA, 4094 nt, Artificial Sequence
  SARS-CoV-2/Belgium/BA-02291/2020__EPI_ISL_415159 spike protein mRNA gc (1-1273)
aggagagucccgcagucggcguccagcggcucugcuuguucgugugugugucguugcaggccuuauucaagcuuaccauguucguguuccugguccuccugccccuggugagcucccagugcgugaaccucaccacccgcacgcagcugccgcccgccuacaccaacagcuucacccggggcgucuacuaccccgacaagguguuccgcuccagcgugcugcacuccacccaggaccucuuccugcccuucuucagcaacgucacgugguuccacgccauccacguguccgggaccaacggcaccaagcgguucgacaacccggugcugcccuucaacgacggggucuacuucgcgagcaccgagaaguccaacaucauccgcggcuggaucuucgggacgacccucgacagcaagacccagucccugcugaucgugaacaacgccaccaacguggucaucaaggugugcgaguuccaguucugcaacgaccccuuccucggcguguacuaccacaagaacaacaagagcuggauggaguccgaguuccgggucuacagcuccgccaacaacugcacguucgaguacgugagccagcccuuccugauggaccuggagggcaagcaggggaacuucaagaaccuccgcgaguucguguucaagaacaucgacggcuacuucaagaucuacuccaagcacaccccgaucaaccugguccgggaccugccccagggguucagcgcccucgagccccugguggaccugcccaucggcaucaacaucacccgcuuccagacccuccuggcccugcaccgguccuaccucacgccgggggacagcagcuccggcuggaccgcgggcgccgccgccuacuacgugggguaccugcagccccgcaccuuccugcucaaguacaacgagaacggcaccaucacggacgcggucgacugcgcccuggacccccugagcgagaccaagugcacccucaaguccuucaccguggagaaggggaucuaccagacgagcaacuuccgggugcagcccaccgaguccaucguccgcuucccgaacaucaccaaccugugccccuucggcgagguguucaacgccacccgguucgccagcgucuacgccuggaaccgcaagcggaucuccaacugcguggcggacuacagcgugcuguacaacuccgccagcuucuccacguucaagugcuacggcgucagccccaccaagcucaacgaccugugcuucaccaacguguacgccgacuccuucgugauccgcggggacgagguccggcagaucgcccccggccagaccgggaagaucgccgacuacaacuacaagcugccggacgacuucacgggcugcgugaucgcguggaacagcaacaaccucgacuccaaggucgggggcaacuacaacuaccuguaccgccuguuccggcgcagcaaccucaagcccuucgagcgggacaucuccaccgagaucuaccaggccggcagcacccccugcaacgggguggagggcuucaacugcuacuucccccugcaguccuacggguuccagccgaccaacggcgugggguaccagcccuaccgcguggucgugcugagcuucgagcuccugcccgcccccgccacggugugcggcccgaagaaguccaccaaccuggucaagaacaagugcgugaacuucaacuucaacggccucaccgggaccggcgugcugaccgaguccaacaagaaguuccugcccuuccagcaguucgggcgcgacaucgccgacacgaccgacgcgguccgggacccccagacccuggagauccucgacaucaccccgugcagcuucggcgggguguccgugaucacgcccggcaccaacaccagcaaccaggucgccgugcuguaccagggcgugaacugcaccgagguccccguggccauccacgccgaccagcugacgcccaccuggcgcguguacuccaccgggagcaacgucuuccagacccgggccggcugccucaucggggcggagcacgugaacaacuccuacgagugcgacaucccgaucggcgccggcaucugcgccagcuaccagacgcagaccaacagcccccgccgggcccgcagcguggcgucccagagcaucaucgccuacaccaugucccugggggccgagaacagcgucgccuacuccaacaacagcaucgccauccccaccaacuucacgaucuccgugaccaccgagauccugcccgugagcaugaccaagacgagcgucgacugcaccauguacaucugcggcgacuccaccgagugcagcaaccuccugcugcaguacggguccuucugcacccagcucaaccgggcgcugacgggcaucgccguggagcaggacaagaacacccaggagguguucgcccaggucaagcagaucuacaagaccccgcccaucaaggacuucgggggcuucaacuucagccagauccugcccgaccccuccaagccgagcaagcgcuccuucaucgaggaccuccuguucaacaaggugacccuggccgacgccggcuucaucaagcaguacggggacugccucggcgacaucgcggcccgggaccugaucugcgcccagaaguucaacgggcugacggugcucccgccccugcugaccgacgagaugaucgcccaguacaccagcgcccuccuggcgggcaccaucacguccggguggaccuucggcgccggcgccgcccugcagauccccuucgcgaugcagauggccuaccgcuucaacgggaucggcgucacccagaacgugcucuacgagaaccagaagcugaucgccaaccaguucaacagcgccaucgggaagauccaggacucccugagcuccgccgcgcccgcccucggcaagcugcaggacguggucaaccagaacgcccaggcccugaacacccucgugaagcagcugagcuccaacuucggggccaucagcuccgugcugaacgacauccucagccggcuggacaaggucgaggcggaggugcagaucgaccgccugaucacgggccggcuccagucccugcagaccuacgugacccagcagcugauccgcgccgccgagauccgggccagcgccaaccucgcggccaccaagaugagcgagugcguccugggccaguccaagcgcguggacuucugcgggaagggcuaccaccugaugagcuucccccaguccgcgccccacgggguggucuuccuccacgugaccuacguccccgcccaggagaagaacuucacgaccgccccggccaucugccacgacggcaaggcccacuucccccgggaggggguguucgugagcaacggcacccacugguucgucacccagcgcaacuucuacgagccccagaucaucacgaccgacaacaccuucguguccggcaacugcgacguggucaucgggaucgugaacaacaccguguacgacccccugcagccggagcuggacagcuucaaggaggagcucgacaaguacuucaagaaccacacgucccccgacgucgaccugggcgacaucagcgggaucaacgccuccguggugaacauccagaaggagaucgaccggcugaacgaggucgccaagaaccucaacgagagccugaucgaccugcaggagcucggcaaguacgagcaguacaucaaguggcccugguacaucuggcugggcuucaucgcggggcugaucgccaucgugauggugaccaucaugcucugcugcaugaccuccugcugcagcugccugaagggcugcugcuccugcgggagcugcugcaaguucgacgaggacgacuccgagccgguccugaagggcgugaagcuccacuacaccugaggacuagucccuguucccagagcccacuuuuuuuucuuuuuuugaaauaaaauagccugucuuucagaucucaaaggcucuuuucagagccaccaaaaaaaaaaaaaaaaaaaaaaaaaaaaaaaaaaaaaaaaaaaaaaaaaaaaaaaaaaaaaaaaaaaaaaaaaaaaaaaaaaaaaaaaaaaaaaaaaaaaa

SEQ ID NO: 12294 - RNA, 4094 nt, Artificial Sequence
  SARS-CoV-2/USA/WA8-UW5/2020__EPI_ISL_413486 spike protein mRNA gc (1-1273)
aggagagucccgcagucggcguccagcggcucugcuuguucgugugugugucguugcaggccuuauucaagcuuaccauguucguguuccugguccuccugccccuggugagcucccagugcgugaaccucaccacccgcacgcagcugccgcccgccuacaccaacagcuucacccggggcgucuacuaccccgacaagguguuccgcuccagcgugcugcacuccacccaggaccucuuccugcccuucuucagcaacgucacgugguuccacgccauccacguguccgggaccaacggcaccaagcgguucgacaacccggugcugcccuucaacgacggggucuacuucgcgagcaccgagaaguccaacaucauccgcggcuggaucuucgggacgacccucgacagcaagacccagucccugcugaucgugaacaacgccaccaacguggucaucaaggugugcgaguuccaguucugcaacgaccccuuccucggcguguacuaccacaagaacaacaagagcuggauggaguccgaguuccgggucuacagcuccgccaacaacugcacguucgaguacgugagccagcccuuccugauggaccuggagggcaagcaggggaacuucaagaaccuccgcgaguucguguucaagaacaucgacggcuacuucaagaucuacuccaagcacaccccgaucaaccugguccgggaccugccccagggguucagcgcccucgagccccugguggaccugcccaucggcaucaacaucacccgcuuccagacccuccuggcccugcaccgguccuaccucacgccgggggacagcagcuccggcuggaccgcgggcgccgccgccuacuacgugggguaccugcagccccgcaccuuccugcucaaguacaacgagaacggcaccaucacggacgcggucgacugcgcccuggacccccugagcgagaccaagugcacccucaaguccuucaccguggagaaggggaucuaccagacgagcaacuuccgggugcagcccaccgaguccaucguccgcuucccgaacaucaccaaccugugccccuucggcgagguguucaacgccacccgguucgccagcgucuacgccuggaaccgcaagcggaucuccaacugcguggcggacuacagcgugcuguacaacuccgccagcuucuccacguucaagugcuacggcgucagccccaccaagcucaacgaccugugcuucaccaacguguacgccgacuccuucgugauccgcggggacgagguccggcagaucgcccccggccagaccgggaagaucgccgacuacaacuacaagcugccggacgacuucacgggcugcgugaucgcguggaacagcaacaaccucgacuccaaggucgggggcaacuacaacuaccuguaccgccuguuccgcaagagcaaccucaagcccuucgagcgggacaucuccaccgagaucuaccaggccggcagcacccccugcaacgggguggagggcuucaacugcuacuucccccugcaguccuacggguuccagccgaccaacggcgugggguaccagcccuaccggguggucgugcugagcuucgagcuccugcacgcccccgccacggugugcggccccaagaaguccaccaaccuggucaagaacaagugcgugaacuucaacuucaacggccucaccgggaccggcgugcugaccgagagcaacaagaaguuccugccguuccagcaguucgggcgcgacaucgccgacacgaccgacgcgguccgcgacccccagacccuggagauccucgacaucacccccugcagcuucggcgggguguccgugaucacgccgggcaccaacaccagcaaccaggucgccgugcuguaccaggacgugaacugcaccgagguccccguggccauccacgccgaccagcugacgcccaccuggcggguguacuccaccggcagcaacgucuuccagacccgcgccgggugccucaucggcgcggaguacgugaacaacuccuacgagugcgacauccccaucggggccggcaucugcgccagcuaccagacgcagaccaacuccccgcggcgcgcccggagcguggcgucccagagcaucaucgccuacaccaugucccugggcgccgagaacagcgucgccuacuccaacaacagcaucgccauccccaccaacuucacgaucuccgugaccaccgagauccugcccgugagcaugaccaagacgagcgucgacugcaccauguacaucugcggggacuccaccgagugcagcaaccuccugcugcaguacggcuccuucugcacccagcucaaccgcgcgcugacggggaucgccguggagcaggacaagaacacccaggagguguucgcccaggucaagcagaucuacaagacgcccccgaucaaggacuucggcggguucaacuucagccagauccugcccgaccccuccaagcccagcaagcgguccuucaucgaggaccuccuguucaacaaggugacccuggccgacgccggcuucaucaagcaguacggcgacugccucggggacaucgcggcccgcgaccugaucugcgcccagaaguucaacggccugaccgugcucccgccccugcugaccgacgagaugaucgcccaguacaccagcgcccuccuggcggggaccaucacguccggcuggaccuucggggccggcgccgcccugcagauccccuucgcgaugcagauggccuaccgguucaacggcaucggggucacccagaacgugcucuacgagaaccagaagcugaucgccaaccaguucaacagcgccaucggcaagauccaggacucccugagcuccaccgccagcgcgcucgggaagcugcaggacguggucaaccagaacgcccaggcccugaacacgcucgugaagcagcuguccagcaacuucggcgccaucuccagcgugcugaacgacauccucucccgccuggacaaggucgaggccgaggugcagaucgaccggcugaucaccgggcgccuccagagccugcagaccuacgugacccagcagcugauccgggcggccgagauccgcgccagcgccaaccucgccgcgaccaagauguccgagugcguccugggccagagcaagcggguggacuucugcggcaagggguaccaccugauguccuucccccagagcgccccgcacggcguggucuuccuccacgugacguacguccccgcccaggagaagaacuucaccaccgcccccgcgaucugccacgacgggaaggcccacuucccccgcgagggcguguucguguccaacgggacccacugguucgucacgcagcggaacuucuacgagccgcagaucaucaccaccgacaacaccuucgugagcggcaacugcgacguggucaucggcaucgugaacaacacgguguacgacccccugcagcccgagcuggacuccuucaaggaggagcucgacaaguacuucaagaaccacaccagccccgacgucgaccugggggacaucuccggcaucaacgccagcguggugaacauccagaaggagaucgaccgccugaacgaggucgccaagaaccucaacgagucccugaucgaccugcaggagcucgggaaguacgagcaguacaucaaguggccgugguacaucuggcugggcuucaucgccggccugaucgcgaucgugauggugaccaucaugcucugcugcaugaccagcugcugcuccugccugaaggggugcugcagcugcggcuccugcugcaaguucgacgaggacgacagcgagcccguccugaagggggugaagcuccacuacacgugaggacuagucccuguucccagagcccacuuuuuuuucuuuuuuugaaauaaaauagccugucuuucagaucucaaaggcucuuuucagagccaccaaaaaaaaaaaaaaaaaaaaaaaaaaaaaaaaaaaaaaaaaaaaaaaaaaaaaaaaaaaaaaaaaaaaaaaaaaaaaaaaaaaaaaaaaaaaaaaaaaaaa

SEQ ID NO: 12295 - RNA, 4094 nt, Artificial Sequence
  SARS-CoV-2/England/20102000506/2020__EPI_ISL_415147 spike protein mRNA gc (1-1273)
aggagagucccgcagucggcguccagcggcucugcuuguucgugugugugucguugcaggccuuauucaagcuuaccauguucguguuccugguccuccugccccuggugagcucccagugcgugaaccucaccacccgcacgcagcugccgcccgccuacaccaacagcuucacccggggcgucuacuaccccgacaagguguuccgcuccagcgugcugcacuccacccaggaccucuuccugcccuucuucagcaacgucacgugguuccacgccauccacguguccgggaccaacggcaccaagcgguucgacaacccggugcugcccuucaacgacggggucuacuucgcgagcaccgagaaguccaacaucauccgcggcuggaucuucgggacgacccucgacagcaagacccagucccugcugaucgugaacaacgccaccaacguggucaucaaggugugcgaguuccaguucugcaacgaccccuuccucggcguguacuaccacaagaacaacaagagcuggauggaguccgaguuccgggucuacagcuccgccaacaacugcacguucgaguacgugagccagcccuuccugauggaccuggagggcaagcaggggaacuucaagaaccuccgcgaguucguguucaagaacaucgacggcuacuucaagaucuacuccaagcacaccccgaucaaccugguccgggaccugccccagggguucagcgcccucgagccccugguggaccugcccaucggcaucaacaucacccgcuuccagacccuccuggcccugcaccgguccuaccucacgccgggggacagcagcuccggcuggaccgcgggcgccgccgccuacuacgugggguaccugcagccccgcaccuuccugcucaaguacaacgagaacggcaccaucacggacgcggucgacugcgcccuggacccccugagcgagaccaagugcacccucaaguccuucaccguggagaaggggaucuaccagacgagcaacuuccgggugcagcccaccgaguccaucguccgcuucccgaacaucaccaaccugugccccuucggcgagguguucaacgccacccgguucgccagcgucuacgccuggaaccgcaagcggaucuccaacugcguggcggacuacagcgugcuguacaacuccgccagcuucuccacguucaagugcuacggcgucagccccaccaagcucaacgaccugugcuucaccaacguguacgccgacuccuucgugauccgcggggacgagguccggcagaucgcccccggccagaccgggaagaucgccgacuacaacuacaagcugccggacgacuucacgggcugcgugaucgcguggaacagcaacaaccucgacuccaaggucgggggcaacuacaacuaccuguaccgccuguuccgcaagagcaaccucaagcccuucgagcgggacaucuccaccgagaucuaccaggccggcagcacccccugcaacgggguggagggcuucaacugcuacuucccccugcaguccuacggguuccagccgaccaacggcgugggguaccagcccuaccggguggucgugcugagcuucgagcuccugcacgcccccgccacggugugcggccccaagaaguccaccaaccuggucaagaacaagugcgugaacuucaacuucaacggccucaccgggaccggcgugcugaccgagagcaacaagaaguuccugccguuccagcaguucgggcgcgacaucgccgacacgaccgacgcgguccgcgacccccagacccuggagauccucgacaucacccccugcagcuucggcgggguguccgugaucacgccgggcaccaacaccagcaaccaggucgccgugcuguaccagggcgugaacugcaccgagguccccguggccauccacgccgaccagcugacgcccaccuggcggguguacuccaccgggagcaacgucuuccagacccgcgccggcugccucaucggggcggagcacgugaacaacuccuacgagugcgacauccccaucggcgccggcaucugcgccagcuaccagacgcagaccaacuccccgcggcgcgcccggagcguggcgucccagagcaucaucgccuacaccaugucccugggggccgagaacagcgucgccuacuccaacaacagcaucgccauccccaccaacuucacgaucuccgugaccaccgagauccugcccgugagcaugaccaagacgagcgucgacugcaccauguacaucugcggcgacuccaccgagugcagcaaccuccugcugcaguacggguccuucugcacccagcucaaccgcgcgcugacgggcaucgccguggagcaggacaagaacacccaggagguguucgcccaggucaagcagaucuacaagacgcccccgaucaaggacuucgggggcuucaacuucagccagauccugcccgaccccuccaagcccagcaagcgguccuucaucgaggaccuccuguucaacaaggugacccuggccgacgccggcuucaucaagcaguacggguacugccucggcgacaucgcggcccgcgaccugaucugcgcccagaaguucaacgggcugaccgugcucccgccccugcugaccgacgagaugaucgcccaguacaccagcgcccuccuggcgggcaccaucacguccggguggaccuucggcgccggcgccgcccugcagauccccuucgcgaugcagauggccuaccgguucaacgggaucggcgucacccagaacgugcucuacgagaaccagaagcugaucgccaaccaguucaacagcgccaucgggaagauccaggacucccugagcuccaccgccagcgcgcucggcaagcugcaggacguggucaaccagaacgcccaggcccugaacacgcucgugaagcagcuguccagcaacuucggggccaucuccagcgugcugaacgacauccucucccgccuggacaaggucgaggccgaggugcagaucgaccggcugaucaccggccgccuccagagccugcagaccuacgugacccagcagcugauccgggcggccgagauccgcgccagcgccaaccucgccgcgaccaagauguccgagugcguccugggccagagcaagcggguggacuucugcgggaagggcuaccaccugauguccuucccccagagcgccccgcacgggguggucuuccuccacgugacguacguccccgcccaggagaagaacuucaccaccgcccccgcgaucugccacgacggcaaggcccacuucccccgcgaggggguguucguguccaacggcacccacugguucgucacgcagcggaacuucuacgagccgcagaucaucaccaccgacaacaccuucgugagcggcaacugcgacguggucaucgggaucgugaacaacacgguguacgacccccugcagcccgagcuggacuccuucaaggaggagcucgacaaguacuucaagaaccacaccagccccgacgucgaccugggcgacaucuccgggaucaacgccagcguggugaacauccagaaggagaucgaccgccugaacgaggucgccaagaaccucaacgagucccugaucgaccugcaggagcucggcaaguacgagcaguacaucaaguggccgugguacaucuggcugggcuucaucgccgggcugaucgcgaucgugauggugaccaucaugcucugcugcaugaccagcugcugcuccugccugaagggcugcugcagcugcggguccugcugcaaguucgacgaggacgacagcgagcccguccugaagggcgugaagcuccacuacacgugaggacuagucccuguucccagagcccacuuuuuuuucuuuuuuugaaauaaaauagccugucuuucagaucucaaaggcucuuuucagagccaccaaaaaaaaaaaaaaaaaaaaaaaaaaaaaaaaaaaaaaaaaaaaaaaaaaaaaaaaaaaaaaaaaaaaaaaaaaaaaaaaaaaaaaaaaaaaaaaaaaaaa

SEQ ID NO: 12296 - RNA, 4094 nt, Artificial Sequence
  SARS-CoV-2/Belgium/VAG-03013/2020__EPI_ISL_415155 spike protein mRNA gc (1-1273)
aggagagucccgcagucggcguccagcggcucugcuuguucgugugugugucguugcaggccuuauucaagcuuaccauguucguguuccugguccuccugccccuggugagcucccagugcgugaaccucaccacccgcacgcagcugccgcccgccuacaccaacagcuucacccggggcgucuacuaccccgacaagguguuccgcuccagcgugcugcacuccacccaggaccucuuccugcccuucuucagcaacgucacgugguuccacgccauccacguguccgggaccaacggcaccaagcgguucgacaacccggugcugcccuucaacgacggggucuacuucgcgagcaccgagaaguccaacaucauccgcggcuggaucuucgggacgacccucgacagcaagacccagucccugcugaucgugaacaacgccaccaacguggucaucaaggugugcgaguuccaguucugcaacgaccccuuccucggcguguacuaccacaagaacaacaagagcuggauggaguccgaguuccgggucuacagcuccgccaacaacugcacguucgaguacgugagccagcccuuccugauggaccuggagggcaagcaggggaacuucaagaaccuccgcgaguucguguucaagaacaucgacggcuacuucaagaucuacuccaagcacaccccgaucaaccugguccgggaccugccccagggguucagcgcccucgagccccugguggaccugcccaucggcaucaacaucacccgcuuccagacccuccuggcccugcaccgguccuaccucacgccgggggacagcagcuccggcuggaccgcgggcgccgccgccuacuacgugggguaccugcagccccgcaccuuccugcucaaguacaacgagaacggcaccaucacggacgcggucgacugcgcccuggacccccugagcgagaccaagugcacccucaaguccuucaccguggagaaggggaucuaccagacgagcaacuuccgggugcagcccaccgaguccaucguccgcuucccgaacaucaccaaccugugccccuucggcgagguguucaacgccacccgguucgccagcgucuacgccuggaaccgcaagcggaucuccaacugcguggcggacuacagcgugcuguacaacuccgccagcuucuccacguucaagugcuacggcgucagccccaccaagcucaacgaccugugcuucaccaacguguacgccgacuccuucgugauccgcggggacgagguccggcagaucgcccccggccagaccgggaagaucgccgacuacaacuacaagcugccggacgacuucacgggcugcgugaucgcguggaacagcaacaaccucgacuccaaggucgggggcaacuacaacuaccuguaccgccuguuccgcaagagcaaccucaagcccuucgagcgggacaucuccaccgagaucuaccaggccggcagcacccccugcaacgggguggagggcuucaacugcuacuucccccugcaguccuacggguuccagccgaccaacggcgugggguaccagcccuaccggguggucgugcugagcuucgagcuccugcacgcccccgccacggugugcggccccaagaaguccaccaaccuggucaagaacaagugcgugaacuucaacuucaacggccucaccgggaccggcgugcugaccgagagcaacaagaaguuccugccguuccagcaguucgggcgcgacaucgccgacacgaccgacgcgguccgcgacccccagacccuggagauccucgacaucacccccugcagcuucggcgggguguccgugaucacgccgggcaccaacaccagcaaccaggucgccgugcuguaccagggcgugaacugcaccgagguccccguggccauccacgccgaccagcugacgcccaccuggcggguguacuccaccgggagcaacgucuuccagacccgcgccggcugccucaucggggcggagcacgugaacaacuccuacgagugcgacauccccaucggcgccggcaucugcgccagcuaccagacgcagaccaacuccccgcggcgcgcccggagcguggcgucccagagcaucaucgccuacaccaugucccugggggccgagaacagcgucgccuacuccaacaacagcaucgccauccccaccaacuucacgaucuccgugaccaccgagauccugcccgugagcaugaccaagacgagcgucgacugcaccauguacaucugcggcgacuccaccgagugcagcaaccuccugcugcaguacggguccuucugcacccagcucaaccgcgcgcugacgggcaucgccguggagcaggacaagaacacccaggagguguucgcccaggucaagcagaucuacaagacgcccccgaucaaggacuucgggggcuucaacuucagccagauccugcccgaccccuccaagcccagcaagcgguccuucaucgaggaccuccuguucaacaaggugacccuggccgacgccggcuucaucaagcaguacggggacugccucggcgacaucgcggcccgcgaccugaucugcgcccagaaguucaacgggcugaccgugcucccgccccugcugaccgacgagaugaucgcccaguacaccagcgcccuccuggcgggcaccaucacguccggguggaccuucggcgccggcgccgcccugcagauccccuucgcgaugcagauggccuaccgguucaacgggaucggcgucacccagaacgugcucuacgagaaccagaagcugaucgccaaccaguucaacagcgccaucgggaagauccaggacucccugagcuccaccgccacggcgcucggcaagcugcaggacguggucaaccagaacgcccaggcccugaacacccucgugaagcagcugagcuccaacuucggggccaucagcuccgugcugaacgacauccucagccgccuggacaaggucgaggccgaggugcagaucgaccggcugaucaccggccgccuccagucccugcagaccuacgugacccagcagcugauccgggcggccgagauccgcgccagcgccaaccucgccgcgacgaagaugagcgagugcguccugggccaguccaagcggguggacuucugcgggaagggcuaccaccugaugagcuucccccaguccgccccgcacgggguggucuuccuccacgugaccuacguccccgcccaggagaagaacuucaccaccgcccccgcgaucugccacgacggcaaggcccacuucccccgcgaggggguguucgugagcaacggcacgcacugguucgucacccagcggaacuucuacgagccgcagaucaucaccaccgacaacacguucguguccggcaacugcgacguggucaucgggaucgugaacaacaccguguacgacccccugcagcccgagcuggacagcuucaaggaggagcucgacaaguacuucaagaaccacaccucccccgacgucgaccugggcgacaucagcgggaucaacgccuccguggugaacauccagaaggagaucgaccgccugaacgaggucgccaagaaccucaacgagagccugaucgaccugcaggagcucggcaaguacgagcaguacaucaaguggccgugguacaucuggcugggcuucaucgccgggcugaucgcgaucgugauggugaccaucaugcucugcugcaugacguccugcugcagcugccugaagggcugcugcuccugcgggagcugcugcaaguucgacgaggacgacuccgagcccguccugaagggcgugaagcuccacuacaccugaggacuagucccuguucccagagcccacuuuuuuuucuuuuuuugaaauaaaauagccugucuuucagaucucaaaggcucuuuucagagccaccaaaaaaaaaaaaaaaaaaaaaaaaaaaaaaaaaaaaaaaaaaaaaaaaaaaaaaaaaaaaaaaaaaaaaaaaaaaaaaaaaaaaaaaaaaaaaaaaaaaaa

SEQ ID NO: 12297 - RNA, 4094 nt, Artificial Sequence
  SARS-CoV-2/Belgium/BC-03016/2020__EPI_ISL_415157 spike protein mRNA gc (1-1273)
aggagagucccgcagucggcguccagcggcucugcuuguucgugugugugucguugcaggccuuauucaagcuuaccauguucguguuccugguccuccugccccuggugagcucccagugcgugaaccucaccacccgcacgcagcugccgcccgccuacaccaacagcuucacccggggcgucuacuaccccgacaagguguuccgcuccagcgugcugcacuccacccaggaccucuuccugcccuucuucagcaacgucacgugguuccacgccauccacguguccgggaccaacggcaccaagcgguucgacaacccggugcugcccuucaacgacggggucuacuucgcgagcaccgagaaguccaacaucauccgcggcuggaucuucgggacgacccucgacagcaagacccagucccugcugaucgugaacaacgccaccaacguggucaucaaggugugcgaguuccaguucugcaacgaccccuuccucggcguguacuaccacaagaacaacaagagcuggauggaguccgaguuccgggucuacagcuccgccaacaacugcacguucgaguacgugagccagcccuuccugauggaccuggagggcaagcaggggaacuucaagaaccuccgcgaguucguguucaagaacaucgacggcuacuucaagaucuacuccaagcacaccccgaucaaccugguccgggaccugccccagggguucagcgcccucgagccccugguggaccugcccaucggcaucaacaucacccgcuuccagacccuccuggcccugcaccgguccuaccucacgccgggggacagcagcuccggcuggaccgcgggcgccgccgccuacuacgugggguaccugcagccccgcaccuuccugcucaaguacaacgagaacggcaccaucacggacgcggucgacugcgcccuggacccccugagcgagaccaagugcacccucaaguccuucaccguggagaaggggaucuaccagacgagcaacuuccgggugcagcccaccgaguccaucguccgcuucccgaacaucaccaaccugugccccuucggcgagguguucaacgccacccgguucgccagcgucuacgccuggaaccgcaagcggaucuccaacugcguggcggacuacagcgugcuguacaacuccgccagcuucuccacguucaagugcuacggcgucagccccaccaagcucaacgaccugugcuucaccaacguguacgccgacuccuucgugauccgcggggacgagguccggcagaucgcccccggccagaccgggaagaucgccgacuacaacuacaagcugccggacgacuucacgggcugcgugaucgcguggaacagcaacaaccucgacuccaaggucgggggcaacuacaacuaccuguaccgccuguuccgcaagagcaaccucaagcccuucgagcgggacaucuccaccgagaucuaccaggccggcagcacccccugcaacgggguggagggcuucaacugcuacuucccccugcaguccuacggguuccagccgaccaacggcgugggguaccagcccuaccggguggucgugcugagcuucgagcuccugcacgcccccgccacggugugcggccccaagaaguccaccaaccuggucaagaacaagugcgugaacuucaacuucaacggccucaccgggaccggcgugcugaccgagagcaacaagaaguuccugccguuccagcaguucgggcgcgacaucgccgacacgaccgacgcgguccgcgacccccagacccuggagauccucgacaucacccccugcagcuucggcgggguguccgugaucacgccgggcaccaacaccagcaaccaggucgccgugcuguaccagggcgugaacugcaccgagguccccguggccauccacgccgaccagcugacgcccaccuggcggguguacuccaccgggagcaacgucuuccagacccgcgccggcugccucaucggggcggagcacgugaacaacuccuacgagugcgacauccccaucggcgccggcaucugcgccagcuaccagacgcagaccaacuccccgcggcgcgcccggagcguggcgucccagagcaucaucgccuacaccaugucccugggggccgagaacagcgucgccuacuccaacaacagcaucgccauccccaccaacuucacgaucuccgugaccaccgagauccugcccgugagcaugaccaagacgagcgucgacugcaccauguacaucugcggcgacuccaccgagugcagcaaccuccugcugcaguacggguccuucugcacccagcucaaccgcgcgcugacgggcaucgccguggagcaggacaagaacacccaggagguguucgcccaggucaagcagaucuacaagacgcccccgaucaaggacuucgggggcuucaacuucagccagauccugcccgaccccuccaagcccagcaagcgguccuucaucgaggaccuccuguucaacaaggugacccuggccgacgccggcuucaucaagcaguacggggacugccucggcgacaucgcggcccgcgaccugaucugcgcccagaaguucaacgggcugaccgugcucccgccccugcugaccgacgagaugaucgcccaguacaccagcgcccuccuggcgggcaccaucacguccggguggaccuucggcgccggcgccgcccugcagauccccuucgcgaugcagauggccuaccgguucaacgggaucggcgucacccagaacgugcucuacgagaaccagaagcugaucgccaaccaguucaacagcgccaucgggaagauccaggacucccugagcuccaccgcccccgcgcucggcaagcugcaggacguggucaaccagaacgcccaggcccugaacacgcucgugaagcagcugagcuccaacuucggggccaucagcuccgugcugaacgacauccucagccgccuggacaaggucgaggccgaggugcagaucgaccggcugaucaccggccgccuccagucccugcagaccuacgugacccagcagcugauccgggcggccgagauccgcgccagcgccaaccucgccgcgaccaagaugagcgagugcguccugggccaguccaagcggguggacuucugcgggaagggcuaccaccugaugagcuucccgcaguccgcgccccacgggguggucuuccuccacgugacguacguccccgcccaggagaagaacuucaccaccgcccccgccaucugccacgacggcaaggcccacuucccgcgcgaggggguguucgugagcaacggcacccacugguucgucacgcagcggaacuucuacgagccccagaucaucaccaccgacaacaccuucguguccggcaacugcgacguggucaucgggaucgugaacaacacgguguacgacccccugcagcccgagcuggacagcuucaaggaggagcucgacaaguacuucaagaaccacaccuccccggacgucgaccugggcgacaucagcgggaucaacgccuccguggugaacauccagaaggagaucgaccgccugaacgaggucgccaagaaccucaacgagagccugaucgaccugcaggagcucggcaaguacgagcaguacaucaaguggcccugguacaucuggcugggcuucaucgccgggcugaucgcgaucgugauggugaccaucaugcucugcugcaugaccuccugcugcagcugccugaagggcugcugcuccugcgggagcugcugcaaguucgacgaggacgacuccgagcccguccugaagggcgugaagcuccacuacacgugaggacuagucccuguucccagagcccacuuuuuuuucuuuuuuugaaauaaaauagccugucuuucagaucucaaaggcucuuuucagagccaccaaaaaaaaaaaaaaaaaaaaaaaaaaaaaaaaaaaaaaaaaaaaaaaaaaaaaaaaaaaaaaaaaaaaaaaaaaaaaaaaaaaaaaaaaaaaaaaaaaaaa

SEQ ID NO: 12298 - RNA, 4094 nt, Artificial Sequence
  SARS-CoV-2/Germany/BavPat3/2020__EPI_ISL_414521 spike protein mRNA gc (1-1273)
aggagagucccgcagucggcguccagcggcucugcuuguucgugugugugucguugcaggccuuauucaagcuuaccauguucguguuccugguccuccugccccuggugagcucccagugcgugaaccucaccacccgcacgcagcugccgcccgccuacaccaacagcuucacccggggcgucuacuaccccgacaagguguuccgcuccagcgugcugcacuccacccaggaccucuuccugcccuucuucagcaacgucacgugguuccacgccauccacguguccgggaccaacggcaccaagcgguucgacaacccggugcugcccuucaacgacggggucuacuucgcgagcaccgagaaguccaacaucauccgcggcuggaucuucgggacgacccucgacagcaagacccagucccugcugaucgugaacaacgccaccaacguggucaucaaggugugcgaguuccaguucugcaacgaccccuuccucggcguguacuaccacaagaacaacaagagcuggauggaguccgaguuccgggucuacagcuccgccaacaacugcacguucgaguacgugagccagcccuuccugauggaccuggagggcaagcaggggaacuucaagaaccuccgcgaguucguguucaagaacaucgacggcuacuucaagaucuacuccaagcacaccccgaucaaccugguccgggaccugccccagggguucagcgcccucgagccccugguggaccugcccaucggcaucaacaucacccgcuuccagacccuccuggcccugcaccgguccuaccucacgccgggggacagcagcuccggcuggaccgcgggcgccgccgccuacuacgugggguaccugcagccccgcaccuuccugcucaaguacaacgagaacggcaccaucacggacgcggucgacugcgcccuggacccccugagcgagaccaagugcacccucaaguccuucaccguggagaaggggaucuaccagacgagcaacuuccgggugcagcccaccgaguccaucguccgcuucccgaacaucaccaaccugugccccuucggcgagguguucaacgccacccgguucgccagcgucuacgccuggaaccgcaagcggaucuccaacugcguggcggacuacagcgugcuguacaacuccgccagcuucuccacguucaagugcuacggcgucagccccaccaagcucaacgaccugugcuucaccaacguguacgccgacuccuucgugauccgcggggacgagguccggcagaucgcccccggccagaccgggaagaucgccgacuacaacuacaagcugccggacgacuucacgggcugcgugaucgcguggaacagcaacaaccucgacuccaaggucgggggcaacuacaacuaccuguaccgccuguuccgcaagagcaaccucaagcccuucgagcgggacaucuccaccgagaucuaccaggccggcagcacccccugcaacgggguggagggcuucaacugcuacuucccccugcaguccuacggguuccagccgaccaacggcgugggguaccagcccuaccggguggucgugcugagcuucgagcuccugcacgcccccgccacggugugcggccccaagaaguccaccaaccuggucaagaacaagugcgugaacuucaacuucaacggccucaccgggaccggcgugcugaccgagagcaacaagaaguuccugccguuccagcaguucgggcgcgacaucgccgacacgaccgacgcgguccgcgacccccagacccuggagauccucgacaucacccccugcagcuucggcgggguguccgugaucacgccgggcaccaacaccagcaaccaggucgccgugcuguaccaggacgugaacugcaccgagguccccguggccauccacgccgaccagcugacgcccaccuggcggguguacuccaccggcagcaacgucuuccagacccgcgccgggugccucaucggcgcggagcacgugaacaacuccuacgagugcgacauccccaucggggccggcaucugcgccagcuaccagacgcagaccaacuccccgcggcgcgcccggagcguggcgucccagagcaucaucgccuacaccaugucccugggcgccgagaacagcgucgccuacuccaacaacagcaucgccauccccaccaacuucacgaucuccgugaccaccgagauccugcccgugagcaugaccaagacgagcgucgacugcaccauguacaucugcggggacuccaccgagugcagcaaccuccugcugcaguacggcuccuucugcacccagcucaaccgcgcgcugacggggaucgccguggagcaggacaagaacacccagcaggucuucgcccaggugaagcagaucuacaagacgcccccgaucaaggacuucggcggguucaacuucagccagauccugcccgaccccuccaagcccagcaagcgguccuucaucgaggaccuccuguucaacaaggugacccuggccgacgccggcuucaucaagcaguacggcgacugccucggggacaucgcggcccgcgaccugaucugcgcccagaaguucaacggccugaccgugcucccgccccugcugaccgacgagaugaucgcccaguacaccagcgcccuccuggcggggaccaucacguccggcuggaccuucggggccggcgccgcccugcagauccccuucgcgaugcagauggccuaccgguucaacggcaucggggucacccagaacgugcucuacgagaaccagaagcugaucgccaaccaguucaacagcgccaucggcaagauccaggacucccugagcuccaccgccagcgcgcucgggaagcugcaggacguggucaaccagaacgcccaggcccugaacacgcucgugaagcagcuguccagcaacuucggcgccaucuccagcgugcugaacgacauccucucccgccuggacaaggucgaggccgaggugcagaucgaccggcugaucaccgggcgccuccagagccugcagaccuacgugacccagcagcugauccgggcggccgagauccgcgccagcgccaaccucgccgcgaccaagauguccgagugcguccugggccagagcaagcggguggacuucugcggcaagggguaccaccugauguccuucccccagagcgccccgcacggcguggucuuccuccacgugacguacguccccgcccaggagaagaacuucaccaccgcccccgcgaucugccacgacgggaaggcccacuucccccgcgagggcguguucguguccaacgggacccacugguucgucacgcagcggaacuucuacgagccgcagaucaucaccaccgacaacaccuucgugagcggcaacugcgacguggucaucggcaucgugaacaacacgguguacgacccccugcagcccgagcuggacuccuucaaggaggagcucgacaaguacuucaagaaccacaccagccccgacgucgaccugggggacaucuccggcaucaacgccagcguggugaacauccagaaggagaucgaccgccugaacgaggucgccaagaaccucaacgagucccugaucgaccugcaggagcucgggaaguacgagcaguacaucaaguggccgugguacaucuggcugggcuucaucgccggccugaucgcgaucgugauggugaccaucaugcucugcugcaugaccagcugcugcuccugccugaaggggugcugcagcugcggcuccugcugcaaguucgacgaggacgacagcgagcccguccugaagggggugaagcuccacuacacgugaggacuagucccuguucccagagcccacuuuuuuuucuuuuuuugaaauaaaauagccugucuuucagaucucaaaggcucuuuucagagccaccaaaaaaaaaaaaaaaaaaaaaaaaaaaaaaaaaaaaaaaaaaaaaaaaaaaaaaaaaaaaaaaaaaaaaaaaaaaaaaaaaaaaaaaaaaaaaaaaaaaaa

SEQ ID NO: 12299 - RNA, 4094 nt, Artificial Sequence
  SARS-CoV-2/France/HF1805/2020__EPI_ISL_414628 spike protein mRNA gc (1-1273)
aggagagucccgcagucggcguccagcggcucugcuuguucgugugugugucguugcaggccuuauucaagcuuaccauguucguguuccugguccuccugccccuggugagcucccagugcgugaaccucaccacccgcacgcagcugccgcccgccuacaccaacagcuucacccggggcgucuacuaccccgacaagguguuccgcuccagcgugcugcacuccacccaggaccucuuccugcccuucuucagcaacgucacgugguuccacgccauccacguguccgggaccaacggcaccaagcgguucgacaacccggugcugcccuucaacgacggggucuacuucgcgagcaccgagaaguccaacaucauccgcggcuggaucuucgggacgacccucgacagcaagacccagucccugcugaucgugaacaacgccaccaacguggucaucaaggugugcgaguuccaguucugcaacgaccccuuccucggcguguacuaccacaagaacaacaagagcuggauggaguccgaguuccgggucuacagcuccgccaacaacugcacguucgaguacgugagccagcccuuccugauggaccuggagggcaagcaggggaacuucaagaaccuccgcgaguucguguucaagaacaucgacggcuacuucaagaucuacuccaagcacaccccgaucaaccugguccgggaccugccccagggguucagcgcccucgagccccugguggaccugcccaucggcaucaacaucacccgcuuccagacccuccuggcccugcaccgguccuaccucacgccgggggacagcagcuccggcuggaccgcgggcgccgccgccuacuacgugggguaccugcagccccgcaccuuccugcucaaguacaacgagaacggcaccaucacggacgcggucgacugcgcccuggacccccugagcgagaccaagugcacccucaaguccuucaccguggagaaggggaucuaccagacgagcaacuuccgggugcagcccaccgaguccaucguccgcuucccgaacaucaccaaccugugccccuucggcgagguguucaacgccacccgguucgccagcgucuacgccuggaaccgcaagcggaucuccaacugcguggcggacuacagcgugcuguacaacuccgccagcuucuccacguucaagugcuacggcgucagccccaccaagcucaacgaccugugcuucaccaacguguacgccgacuccuucgugauccgcggggacgagguccggcagaucgcccccggccagaccgggaagaucgccgacuacaacuacaagcugccggacgacuucacgggcugcgugaucgcguggaacagcaacaaccucgacuccaaggucgggggcaacuacaacuaccuguaccgccuguuccgcaagagcaaccucaagcccuucgagcgggacaucuccaccgagaucuaccaggccggcagcacccccugcaacgggguggagggcuucaacugcuacuucccccugcaguccuacggguuccagccgaccaacggcgugggguaccagcccuaccggguggucgugcugagcuucgagcuccugcacgcccccgccacggugugcggccccaagaaguccaccaaccuggucaagaacaagugcgugaacuucaacuucaacggccucaccgggaccggcgugcugaccgagagcaacaagaaguuccugccguuccagcaguucgggcgcgacaucgccgacacgaccgacgcgguccgcgacccccagacccuggagauccucgacaucacccccugcagcuucggcgggguguccgugaucacgccgggcaccaacaccagcaaccaggucgccgugcuguaccagggcgugaacugcaccgagguccccguggccauccacgccgaccagcugacgcccaccuggcggguguacuccaccgggagcaacgucuuccagacccgcgccggcugccucaucggggcggagcacgugaacaacuccuacgagugcgacauccccaucggcgccggcaucugcgccagcuaccagacgcagaccaacuccccgcggcgcgcccggagcguggcgucccagagcaucaucgccuacaccaugucccugggggccgagaacagcgucgccuacuccaacaacagcaucgccauccccaccaacuucacgaucuccgugaccaccgagauccugcccgugagcaugaccaagacgagcgucgacugcaccauguacaucugcggcgacuccaccgagugcagcaaccuccugcugcaguacggguccuucugcacccagcucaaccgcgcgcugacgggcaucgccguggagcaggacaagaacacccaggagguguucgcccaggucaagcagaucuacaagacgcccccgaucaaggacuucgggggcuucaacuucagccagauccugcccgaccccuccaagcccagcaagcgguccuucaucgaggaccuccuguucaacaaggugacccuggccgacgccggcuucaucaagcaguacggggacugccucggcgacaucgcggcccgcgaccugaucugcgcccagaaguucaacgggcugaccgugcucccgccccugcugaccgacgagaugaucgcccaguacaccagcgcccuccuggcgggcaccaucacguccggguggaccuucggcgccggcgccgcccugcagauccccuucgcgaugcagauggccuaccgguucaacgggaucggcgucacccagaacgugcucuacgagaaccagaagcugaucgccaaccaguucaacagcgccaucgggaagauccaggacucccugagcuccaccgccagcgcgcucggcaagcugcaggacguggucaaccagaacgcccaggcccugaacacgcucgugaagcagcuguccagcaacuucggggccaucuccagcgugcugaacgacauccucucccgccuggacaaggucgaggccgaggugcagaucgaccggcugaucaccggccgccuccagagccugcagaccuacgugacccagcagcugauccgggcggccgagauccgcgccagcgccaaccucgccgcgaccaagauguccgagugcguccugggccagagcaagcggguggacuucugcgggaagggcuaccaccugauguccuucccccagagcgccccgcacgggguggucuuccuccacgugacguacguccccgcccaggagaagaacuucaccaccgcccccgcgaucugccacgacggcaaggcccacuucccccgcgaggggguguucguguccaacggcacccacugguucgucacgcagcggaacuucuacgagccgcagaucaucaccaccgacaacaccuucgugagcggcaacugcgacguggucaucgggguggugaacaacacggucuacgacccccugcagcccgagcuggacuccuucaaggaggagcucgacaaguacuucaagaaccacaccagccccgacguggaccugggcgacaucuccgggaucaacgccagcguggucaacauccagaaggagaucgaccgccugaacgagguggccaagaaccucaacgagucccugaucgaccugcaggagcucggcaaguacgagcaguacaucaaguggccgugguacaucuggcugggcuucaucgccgggcugaucgcgaucgugauggucaccaucaugcucugcugcaugaccagcugcugcuccugccugaagggcugcugcagcugcggguccugcugcaaguucgacgaggacgacagcgagcccgugcugaagggcgugaagcuccacuacacgugaggacuagucccuguucccagagcccacuuuuuuuucuuuuuuugaaauaaaauagccugucuuucagaucucaaaggcucuuuucagagccaccaaaaaaaaaaaaaaaaaaaaaaaaaaaaaaaaaaaaaaaaaaaaaaaaaaaaaaaaaaaaaaaaaaaaaaaaaaaaaaaaaaaaaaaaaaaaaaaaaaaaa

SEQ ID NO: 12300 - RNA, 4094 nt, Artificial Sequence
  SARS-CoV-2/Netherlands/ZuidHolland_9/2020__EPI_ISL_414445 spike protein mRNA gc (1-1273)
aggagagucccgcagucggcguccagcggcucugcuuguucgugugugugucguugcaggccuuauucaagcuuaccauguucguguuccugguccuccugccccuggugagcucccagugcgugaaccucaccacccgcacgcagcugccgcccgccuacaccaacagcuucacccggggcgucuacuaccccgacaagguguuccgcuccagcgugcugcacuccacccaggaccucuuccugcccuucuucagcaacgucacgugguuccacgccauccacguguccgggaccaacggcaccaagcgguucgacaacccggugcugcccuucaacgacggggucuacuucgcgagcaccgagaaguccaacaucauccgcggcuggaucuucgggacgacccucgacagcaagacccagucccugcugaucgugaacaacgccaccaacguggucaucaaggugugcgaguuccaguucugcaacgaccccuuccucggcguguacuaccacaagaacaacaagagcuggauggaguccgaguuccgggucuacagcuccgccaacaacugcacguucgaguacgugagccagcccuuccugauggaccuggagggcaagcaggggaacuucaagaaccuccgcgaguucguguucaagaacaucgacggcuacuucaagaucuacuccaagcacaccccgaucaaccugguccgggaccugccccagggguucagcgcccucgagccccugguggaccugcccaucggcaucaacaucacccgcuuccagacccuccuggcccugcaccgguccuaccucacgccgggggacagcagcuccggcuggaccgcgggcgccgccgccuacuacgugggguaccugcagccccgcaccuuccugcucaaguacaacgagaacggcaccaucacggacgcggucgacugcgcccuggacccccugagcgagaccaagugcacccucaaguccuucaccguggagaaggggaucuaccagacgagcaacuuccgggugcagcccaccgaguccaucguccgcuucccgaacaucaccaaccugugccccuucggcgagguguucaacgccacccgguucgccagcgucuacgccuggaaccgcaagcggaucuccaacugcguggcggacuacagcgugcuguacaacuccgccagcuucuccacguucaagugcuacggcgucagccccaccaagcucaacgaccugugcuucaccaacguguacgccgacuccuucgugauccgcggggacgagguccggcagaucgcccccggccagaccgggaagaucgccgacuacaacuacaagcugccggacgacuucacgggcugcgugaucgcguggaacagcaacaaccucgacuccaaggucgggggcaacuacaacuaccuguaccgccuguuccgcaagagcaaccucaagcccuucgagcgggacaucuccaccgagaucuaccaggccggcagcacccccugcaacgggguggagggcuucaacugcuacuucccccugcaguccuacggguuccagccgaccaacggcgugggguaccagcccuaccggguggucgugcugagcuucgagcuccugcacgcccccgccacggugugcggccccaagaaguccaccaaccuggucaagaacaagugcgugaacuucaacuucaacggccucaccgggaccggcgugcugaccgagagcaacaagaaguuccugccguuccagcaguucgggcgcgacaucgccgacacgaccgacgcgguccgcgacccccagacccuggagauccucgacaucacccccugcagcuucggcgggguguccgugaucacgccgggcaccaacaccagcaaccaggucgccgugcuguaccagggcgugaacugcaccgagguccccguggccauccacgccgaccagcugacgcccaccuggcggguguacuccaccgggagcaacgucuuccagacccgcgccggcugccucaucggggcggagcacgugaacaacuccuacgagugcgacauccccaucggcgccggcaucugcgccagcuaccagacgcagaccaacuccccgcggcgcgcccggagcguggcgucccagagcaucaucgccuacaccaugucccugggggccgagaacagcgucgccuacuccaacaacagcaucgccauccccaccaacuucacgaucuccgugaccaccgagauccugcccgugagcaugaccaagacgagcgucgacugcaccauguacaucugcggcgacuccaccgagugcagcaaccuccugcugcaguacggguccuucugcacccagcucaaccgcgcgcugacgggcaucgccguggagcaggacaagaacacccaggagguguucgcccaggucaagcagaucuacaagacgcccccgaucaaggacuucgggggcuucaacuucagccagauccugcccgaccccuccaagcccagcaagcgguccuucaucgaggaccuccuguucaacaaggugacccuggccgacgccggcuucaucaagcaguacggggacugccucggcgacaucgcggcccgcgaccugaucugcgugcagaaguucaacgggcugaccguccucccgccccugcugaccgacgagaugaucgcccaguacaccagcgcccuccuggccggcaccaucacguccggguggaccuucggcgcgggcgccgcccugcagauccccuucgccaugcagauggcguaccgguucaacgggaucggcgugacccagaacgugcucuacgagaaccagaagcugaucgccaaccaguucaacagcgccaucgggaagauccaggacucccugagcuccaccgccagcgcccucggcaagcugcaggacgucgugaaccagaacgcgcaggcccugaacacgcucgugaagcagcuguccagcaacuucggggccaucuccagcguccugaacgacauccucucccgccuggacaagguggaggccgaggugcagaucgaccggcugaucaccggccgccuccagagccugcagaccuacgucacccagcagcugauccgggccgcggagauccgcgccagcgccaaccucgccgccaccaagauguccgagugcgugcugggccagagcaagcggguggacuucugcgggaagggcuaccaccugauguccuucccccagagcgcgccgcacggggucguguuccuccacgucacguacgugcccgcccaggagaagaacuucaccaccgcccccgccaucugccacgacggcaaggcgcacuucccccgcgaggggguguucgucuccaacggcacccacugguucgugacgcagcggaacuucuacgagccgcagaucaucaccaccgacaacaccuucgugagcggcaacugcgacgucgugaucgggaucgugaacaacacggucuacgacccccugcagcccgagcuggacuccuucaaggaggagcucgacaaguacuucaagaaccacaccagccccgacguggaccugggcgacaucuccgggaucaacgccagcguggucaacauccagaaggagaucgaccgccugaacgagguggccaagaaccucaacgagucccugaucgaccugcaggagcucggcaaguacgagcaguacaucaaguggccgugguacaucuggcugggcuucaucgccgggcugaucgccaucgugauggucaccaucaugcucugcugcaugaccagcugcugcuccugccugaagggcugcugcagcugcggguccugcugcaaguucgacgaggacgacagcgagcccgugcugaagggcgugaagcuccacuacacgugaggacuagucccuguucccagagcccacuuuuuuuucuuuuuuugaaauaaaauagccugucuuucagaucucaaaggcucuuuucagagccaccaaaaaaaaaaaaaaaaaaaaaaaaaaaaaaaaaaaaaaaaaaaaaaaaaaaaaaaaaaaaaaaaaaaaaaaaaaaaaaaaaaaaaaaaaaaaaaaaaaaaa

SEQ ID NO: 12301 - RNA, 4094 nt, Artificial Sequence
  SARS-CoV-2/Finland/FIN03032020A/2020__EPI_ISL_413602 spike protein mRNA gc (1-1273)
aggagagucccgcagucggcguccagcggcucugcuuguucgugugugugucguugcaggccuuauucaagcuuaccauguucguguuccugguccuccugccccuggugagcucccagugcgugaaccucaccacccgcacgcagcugccgcccgccuacaccaacagcuucacccggggcgucuacuaccccgacaagguguuccgcuccagcgugcugcacuccacccaggaccucuuccugcccuucuucagcaacgucacgugguuccacgccauccacguguccgggaccaacggcaccaagcgguucgacaacccggugcugcccuucaacgacggggucuacuucgcgagcaccgagaaguccaacaucauccgcggcuggaucuucgggacgacccucgacagcaagacccagucccugcugaucgugaacaacgccaccaacguggucaucaaggugugcgaguuccaguucugcaacgaccccuuccucggcguguacuaccacaagaacaacaagagcuggauggaguccgaguuccgggucuacagcuccgccaacaacugcacguucgaguacgugagccagcccuuccugauggaccuggagggcaagcaggggaacuucaagaaccuccgcgaguucguguucaagaacaucgacggcuacuucaagaucuacuccaagcacaccccgaucaaccugguccgggaccugccccagggguucagcgcccucgagccccugguggaccugcccaucggcaucaacaucacccgcuuccagacccuccuggcccugcaccgguccuaccucacgccgggggacagcagcuccggcuggaccgcgggcgccgccgccuacuacgugggguaccugcagccccgcaccuuccugcucaaguacaacgagaacggcaccaucacggacgcggucgacugcgcccuggacccccugagcgagaccaagugcacccucaaguccuucaccguggagaaggggaucuaccagacgagcaacuuccgggugcagcccaccgaguccaucguccgcuucccgaacaucaccaaccugugccccuucggcgagguguucaacgccacccgguucgccagcgucuacgccuggaaccgcaagcggaucuccaacugcguggcggacuacagcgugcuguacaacuccgccagcuucuccacguucaagugcuacggcgucagccccaccaagcucaacgaccugugcuucaccaacguguacgccgacuccuucgugauccgcggggacgagguccggcagaucgcccccggccagaccgggaagaucgccgacuacaacuacaagcugccggacgacuucacgggcugcgugaucagcuggaacuccaacaaccucgacagcaaggucgggggcaacuacaacuaccuguaccgccuguuccggaaguccaaccucaagcccuucgagcgcgacaucagcaccgagaucuaccaggcgggcuccacccccugcaacgggguggagggcuucaacugcuacuucccccugcagagcuacggguuccagccgaccaacggcgugggguaccagcccuaccggguggucgugcugagcuucgagcuccugcacgcccccgccacggugugcggccccaagaaguccaccaaccuggucaagaacaagugcgugaacuucaacuucaacggccucaccgggaccggcgugcugaccgagagcaacaagaaguuccugccguuccagcaguucgggcgcgacaucgccgacacgaccgacgccguccgcgacccccagacccuggagauccucgacaucacccccugcuccuucggcggggugagcgugaucacgccgggcaccaacaccuccaaccaggucgcggugcuguaccagggcgugaacugcaccgagguccccguggccauccacgccgaccagcugacgcccaccuggcggguguacagcaccggguccaacgucuuccagacccgcgccggcugccucaucggggccgagcacgugaacaacagcuacgagugcgacauccccaucggcgcgggcaucugcgccuccuaccagacgcagaccaacagcccgcggcgcgcccgguccguggccagccaguccaucaucgcguacaccaugagccugggggccgagaacuccgucgccuacagcaacaacuccaucgccauccccaccaacuucacgaucagcgugaccaccgagauccugcccgugagcaugaccaagacguccgucgacugcaccauguacaucugcggcgacagcaccgagugcuccaaccuccugcugcaguacgggagcuucugcacccagcucaaccgcgcccugacgggcaucgcgguggagcaggacaagaacacccaggagguguucgcccaggucaagcagaucuacaagacgcccccgaucaaggacuucgggggcuucaacuucucccagauccugcccgaccccagcaagcccuccaagcggagcuucaucgaggaccuccuguucaacaaggugacccuggccgacgccggcuucaucaagcaguacggggacugccucggcgacaucgccgcgcgcgaccugaucugcgcccagaaguucaacgggcugaccgugcucccgccccugcugaccgacgagaugaucgcccaguacaccuccgcccuccuggccggcaccaucacgagcggguggaccuucggcgcgggcgccgcccugcagauccccuucgccaugcagauggcguaccgguucaacgggaucggcgucacccagaacgugcucuacgagaaccagaagcugaucgccaaccaguucaacuccgccaucgggaagauccaggacagccuguccagcaccgccuccgcccucggcaagcugcaggacguggucaaccagaacgcgcaggcccugaacacgcucgugaagcagcugagcuccaacuucggggccaucagcuccgugcugaacgacauccucagccgccuggacaaggucgaggccgaggugcagaucgaccggcugaucaccggccgccuccagagccugcagaccuacgugacccagcagcugauccgggccgcggagauccgcgccuccgccaaccucgccgccaccaagaugagcgagugcguccugggccaguccaagcggguggacuucugcgggaagggcuaccaccugaugagcuucccccaguccgcgccgcacgggguggucuuccuccacgugacguacguccccgcccaggagaagaacuucaccaccgcccccgccaucugccacgacggcaaggcgcacuucccccgcgaggggguguucgugagcaacggcacccacugguucgucacgcagcggaacuucuacgagccgcagaucaucaccaccgacaacaccuucguguccggcaacugcgacguggucaucgggaucgugaacaacacgguguacgacccccugcagcccgagcuggacagcuucaaggaggagcucgacaaguacuucaagaaccacaccucccccgacgucgaccugggcgacaucagcgggaucaacgccuccguggugaacauccagaaggagaucgaccgccugaacgaggucgccaagaaccucaacgagagccugaucgaccugcaggagcucggcaaguacgagcaguacaucaaguggccgugguacaucuggcugggcuucaucgccgggcugaucgccaucgugauggugaccaucaugcucugcugcaugaccuccugcugcagcugccugaagggcugcugcuccugcgggagcugcugcaaguucgacgaggacgacuccgagcccguccugaagggcgugaagcuccacuacacgugaggacuagucccuguucccagagcccacuuuuuuuucuuuuuuugaaauaaaauagccugucuuucagaucucaaaggcucuuuucagagccaccaaaaaaaaaaaaaaaaaaaaaaaaaaaaaaaaaaaaaaaaaaaaaaaaaaaaaaaaaaaaaaaaaaaaaaaaaaaaaaaaaaaaaaaaaaaaaaaaaaaaa

SEQ ID NO: 12302 - RNA, 4094 nt, Artificial Sequence
  SARS-CoV-2/France/GE1977/2020__EPI_ISL_414632 spike protein mRNA gc (1-1273)
aggagagucccgcagucggcguccagcggcucugcuuguucgugugugugucguugcaggccuuauucaagcuuaccauguucguguuccugguccuccugccccuggugagcucccagugcgugaaccucaccacccgcacgcagcugccgcccgccuacaccaacagcuucacccggggcgucuacuaccccgacaagguguuccgcuccagcgugcugcacuccacccaggaccucuuccugcccuucuucagcaacgucacgugguuccacgccauccacguguccgggaccaacggcaccaagcgguucgacaacccggugcugcccuucaacgacggggucuacuucgcgagcaccgagaaguccaacaucauccgcggcuggaucuucgggacgacccucgacagcaagacccagucccugcugaucgugaacaacgccaccaacguggucaucaaggugugcgaguuccaguucugcaacgaccccuuccucggcguguacuaccacaagaacaacaagagcuggauggaguccgaguuccgggucuacagcuccgccaacaacugcacguucgaguacgugagccagcccuuccugauggaccuggagggcaagcaggggaacuucaagaaccuccgcgaguucguguucaagaacaucgacggcuacuucaagaucuacuccaagcacaccccgaucaaccugguccgggaccugccccagggguucagcgcccucgagccccugguggaccugcccaucggcaucaacaucacccgcuuccagacccuccuggcccugcaccgguccuaccucacgccgggggacagcagcuccggcuggaccgcgggcgccgccgccuacuacgugggguaccugcagccccgcaccuuccugcucaaguacaacgagaacggcaccaucacggacgcggucgacugcgcccuggacccccugagcgagaccaagugcacccucaaguccuucaccguggagaaggggaucuaccagacgagcaacuuccgggugcagcccaccgaguccaucguccgcuucccgaacaucaccaaccugugccccuucggcgagguguucaacgccacccgguucgccagcgucuacgccuggaaccgcaagcggaucuccaacugcguggcggacuacagcgugcuguacaacuccgccagcuucuccacguucaagugcuacggcgucagccccaccaagcucaacgaccugugcuucaccaacguguacgccgacuccuucgugauccgcggggacgagguccggcagaucgcccccggccagaccgggaagaucgccgacuacaacuacaagcugccggacgacuucacgggcugcgugaucgcguggaacagcaacaaccucgacuccaaggucgggggcaacuacaacuaccuguaccgccuguuccgcaagagcaaccucaagcccuucgagcgggacaucuccaccgagaucuaccaggccggcagcacccccugcaacgggguggagggcuucaacugcuacuucccccugcaguccuacggguuccagccgaccaacggcgugggguaccagcccuaccggguggucgugcugagcuucgagcuccugcacgcccccgccacggugugcggccccaagaaguccaccaaccuggucaagaacaagugcgugaacuucaacuucaacggccucaccgggaccggcgugcugaccgagagcaacaagaaguuccugccguuccagcaguucgggcgcgacaucgccgacacgaccgacgcgguccgcgacccccagacccuggagauccucgacaucacccccugcagcuucggcgggguguccgugaucacgccgggcaccaacaccagcaaccaggucgccgugcuguaccagggcgugaacugcaccgagguccccguggccauccacgccgaccagcugacgcccaccuggcggguguacuccaccgggagcaacgucuuccagacccgcgccggcugccucaucggggcggagcacgugaacaacuccuacgagugcgacauccccaucggcgccggcaucugcgccagcuaccagacgcagaccaacuccccgcggcgcgcccggagcguggcgucccagagcaucaucgccuacaccaugucccugggggccgagaacagcgucgccuacuccaacaacagcaucgccauccccaccaacuucacgaucuccgugaccaccgagauccugcccgugagcaugaccaagacgagcgucgacugcaccauguacaucugcggcgacuccaccgagugcagcaaccuccugcugcaguacggguccuucugcacccagcucaaccgcgcgcugacgggcaucgccguggagcaggacaagaacacccaggagguguucgcccaggucaagcagaucuacaagacgcccccgaucaaggacuucgggggcuucaacuucagccagauccugcccgaccccuccaagcccagcaagcgguccuucaucgaggaccuccuguucaacaaggugacccuggccgacgccggcuucaucaagcaguacggggacugccucggcgacaucgcggcccgcgaccugaucugcgcccagaaguucaacgggcugaccgugcucccgccccugcugaccgacgagaugaucgcccaguacaccagcgcccuccuggcgggcaccaucacguccggguggaccuucggcgccggcgccgcccugcagauccccuucgcgaugcagauggccuaccgguucaacgggaucggcgucacccagaacgugcucuacgagaaccagaagcugaucgccaaccaguucaacagcgccaucgggaagauccaggacucccuguucagcaccgccuccgcgcucggcaagcugcaggacguggucaaccagaacgcccaggcccugaacacgcucgugaagcagcugagcuccaacuucggggccaucagcuccgugcugaacgacauccucagccgccuggacaaggucgaggccgaggugcagaucgaccggcugaucaccggccgccuccagucccugcagaccuacgugacccagcagcugauccgggcggccgagauccgcgccagcgccaaccucgccgcgaccaagaugagcgagugcguccugggccaguccaagcggguggacuucugcgggaagggcuaccaccugaugagcuucccccaguccgccccgcacgggguggucuuccuccacgugacguacguccccgcccaggagaagaacuucaccaccgcccccgcgaucugccacgacggcaaggcccacuucccccgcgaggggguguucgugagcaacggcacccacugguucgucacgcagcggaacuucuacgagccgcagaucaucaccaccgacaacaccuucguguccggcaacugcgacguggucaucgggaucgugaacaacacgguguacgacccccugcagcccgagcuggacagcuucaaggaggagcucgacaaguacuucaagaaccacaccucccccgacgucgaccugggcgacaucagcgggaucaacgccuccguggugaacauccagaaggagaucgaccgccugaacgaggucgccaagaaccucaacgagagccugaucgaccugcaggagcucggcaaguacgagcaguacaucaaguggccgugguacaucuggcugggcuucaucgccgggcugaucgcgaucgugauggugaccaucaugcucugcugcaugaccuccugcugcagcugccugaagggcugcugcuccugcgggagcugcugcaaguucgacgaggacgacuccgagcccguccugaagggcgugaagcuccacuacacgugaggacuagucccuguucccagagcccacuuuuuuuucuuuuuuugaaauaaaauagccugucuuucagaucucaaaggcucuuuucagagccaccaaaaaaaaaaaaaaaaaaaaaaaaaaaaaaaaaaaaaaaaaaaaaaaaaaaaaaaaaaaaaaaaaaaaaaaaaaaaaaaaaaaaaaaaaaaaaaaaaaaaa

SEQ ID NO: 12303 - RNA, 4094 nt, Artificial Sequence
  SARS-CoV-2/Finland/FIN-313/2020__EPI_ISL_414641 spike protein mRNA gc (1-1273)
aggagagucccgcagucggcguccagcggcucugcuuguucgugugugugucguugcaggccuuauucaagcuuaccauguucguguuccugguccuccugccccuggugagcucccagugcgugaaccucaccacccgcacgcagcugccgcccgccuacaccaacagcuucacccggggcgucuacuaccccgacaagguguuccgcuccagcgugcugcacuccacccaggaccucuuccugcccuucuucagcaacgucacgugguuccacgccauccacguguccgggaccaacggcaccaagcgguucgacaacccggugcugcccuucaacgacggggucuacuucgcgagcaccgagaaguccaacaucauccgcggcuggaucuucgggacgacccucgacagcaagacccagucccugcugaucgugaacaacgccaccaacguggucaucaaggugugcgaguuccaguucugcaacgaccccuuccucggcguguacuaccacaagaacaacaagagcuggauggaguccgaguuccgggucuacagcuccgccaacaacugcacguucgaguacgugagccagcccuuccugauggaccuggagggcaagcaggggaacuucaagaaccuccgcgaguucguguucaagaacaucgacggcuacuucaagaucuacuccaagcacaccccgaucaaccugguccgggaccugccccagggguucagcgcccucgagccccugguggaccugcccaucggcaucaacaucacccgcuucaagacccuccuggcccugcaccgguccuaccucacgccgggggacagcagcuccggcuggaccgcgggcgccgccgccuacuacgugggguaccugcagccccgcaccuuccugcucaaguacaacgagaacggcaccaucacggacgcggucgacugcgcccuggacccccugagcgagaccaagugcacccucaaguccuucaccguggagaaggggaucuaccagacgagcaacuuccgggugcagcccaccgaguccaucguccgcuucccgaacaucaccaaccugugccccuucggcgagguguucaacgccacccgguucgccagcgucuacgccuggaaccgcaagcggaucuccaacugcguggcggacuacagcgugcuguacaacuccgccagcuucuccacguucaagugcuacggcgucagccccaccaagcucaacgaccugugcuucaccaacguguacgccgacuccuucgugauccgcggggacgagguccggcagaucgcccccggccagaccgggaagaucgccgacuacaacuacaagcugccggacgacuucacgggcugcgugaucgcguggaacagcaacaaccucgacuccaaggucgggggcaacuacaacuaccuguaccgccuguuccgcaagagcaaccucaagcccuucgagcgggacaucuccaccgagaucuaccaggccggcagcacccccugcaacgggguggagggcuucaacugcuacuucccccugcaguccuacggguuccagccgaccaacggcgugggguaccagcccuaccggguggucgugcugagcuucgagcuccugcacgcccccgccacggugugcggccccaagaaguccaccaaccuggucaagaacaagugcgugaacuucaacuucaacggccucaccgggaccggcgugcugaccgagagcaacaagaaguuccugccguuccagcaguucgggcgcgacaucgccgacacgaccgacgcgguccgcgacccccagacccuggagauccucgacaucacccccugcagcuucggcgggguguccgugaucacgccgggcaccaacaccagcaaccaggucgccgugcuguaccagggcgugaacugcaccgagguccccguggccauccacgccgaccagcugacgcccaccuggcggguguacuccaccgggagcaacgucuuccagacccgcgccggcugccucaucggggcggagcacgugaacaacuccuacgagugcgacauccccaucggcgccggcaucugcgccagcuaccagacgcagaccaacuccccgcggcgcgcccggagcguggcgucccagagcaucaucgccuacaccaugucccugggggccgagaacagcgucgccuacuccaacaacagcaucgccauccccaccaacuucacgaucuccgugaccaccgagauccugcccgugagcaugaccaagacgagcgucgacugcaccauguacaucugcggcgacuccaccgagugcagcaaccuccugcugcaguacggguccuucugcacccagcucaaccgcgcgcugacgggcaucgccguggagcaggacaagaacacccaggagguguucgcccaggucaagcagaucuacaagacgcccccgaucaaggacuucgggggcuucaacuucagccagauccugcccgaccccuccaagcccagcaagcgguccuucaucgaggaccuccuguucaacaaggugacccuggccgacgccggcuucaucaagcaguacggggacugccucggcgacaucgcggcccgcgaccugaucugcgcccagaaguucaacgggcugaccgugcucccgccccugcugaccgacgagaugaucgcccaguacaccagcgcccuccuggcgggcaccaucacguccggguggaccuucggcgccggcgccgcccugcagauccccuucgcgaugcagauggccuaccgguucaacgggaucggcgucacccagaacgugcucuacgagaaccagaagcugaucgccaaccaguucaacagcgccaucgggaagauccaggacucccugagcuccaccgccagcgcgcucggcaagcugcaggacguggucaaccagaacgcccaggcccugaacacgcucgugaagcagcuguccagcaacuucggggccaucuccagcgugcugaacgacauccucucccgccuggacaaggucgaggccgaggugcagaucgaccggcugaucaccggccgccuccagagccugcagaccuacgugacccagcagcugauccgggcggccgagauccgcgccagcgccaaccucgccgcgaccaagauguccgagugcguccugggccagagcaagcggguggacuucugcgggaagggcuaccaccugauguccuucccccagagcgccccgcacgggguggucuuccuccacgugacguacguccccgcccaggagaagaacuucaccaccgcccccgcgaucugccacgacggcaaggcccacuucccccgcgaggggguguucguguccaacggcacccacugguucgucacgcagcggaacuucuacgagccgcagaucaucaccaccgacaacaccuucgugagcggcaacugcgacguggucaucgggaucgugaacaacacgguguacgacccccugcagcccgagcuggacuccuucaaggaggagcucgacaaguacuucaagaaccacaccagccccgacgucgaccugggcgacaucuccgggaucaacgccagcguggugaacauccagaaggagaucgaccgccugaacgaggucgccaagaaccucaacgagucccugaucgaccugcaggagcucggcaaguacgagcaguacaucaaguggccgugguacaucuggcugggcuucaucgccgggcugaucgcgaucgugauggugaccaucaugcucugcugcaugaccagcugcugcuccugccugaagggcugcugcagcugcggguccugcugcaaguucgacgaggacgacagcgagcccguccugaagggcgugaagcuccacuacacgugaggacuagucccuguucccagagcccacuuuuuuuucuuuuuuugaaauaaaauagccugucuuucagaucucaaaggcucuuuucagagccaccaaaaaaaaaaaaaaaaaaaaaaaaaaaaaaaaaaaaaaaaaaaaaaaaaaaaaaaaaaaaaaaaaaaaaaaaaaaaaaaaaaaaaaaaaaaaaaaaaaaaa

SEQ ID NO: 12304 - RNA, 4094 nt, Artificial Sequence
  SARS-CoV-2/Netherlands/ZuidHolland_2/2020__EPI_ISL_414556 spike protein mRNA gc (1-1273)
aggagagucccgcagucggcguccagcggcucugcuuguucgugugugugucguugcaggccuuauucaagcuuaccauguucguguuccugguccuccugccccuggugagcucccagugcgugaaccucaccacccgcacgcagcugccgcccgccuacaccaacagcuucacccggggcgucuacuaccccgacaagguguuccgcuccagcgugcugcacuccacccaggaccucuuccugcccuucuucagcaacgucacgugguuccacgccauccacguguccgggaccaacggcaccaagcgguucgacaacccggugcugcccuucaacgacggggucuacuucgcgagcaccgagaaguccaacaucauccgcggcuggaucuucgggacgacccucgacagcaagacccagucccugcugaucgugaacaacgccaccaacguggucaucaaggugugcgaguuccaguucugcaacgaccccuuccucggcguguacuaccacaagaacaacaagagcuggauggaguccgaguuccgggucuacagcuccgccaacaacugcacguucgaguacgugagccagcccuuccugauggaccuggagggcaagcaggggaacuucaagaaccuccgcgaguucguguucaagaacaucgacggcuacuucaagaucuacuccaagcacaccccgaucaaccugguccgggaccugccccagggguucagcgcccucgagccccugguggaccugcccaucggcaucaacaucacccgcuuccagacccuccuggcccugcaccgguccuaccucacgccgggggacagcagcuccggcuggaccgcgggcgccgccgccuacuacgugggguaccugcagccccgcaccuuccugcucaaguacaacgagaacggcaccaucacggacgcggucgacugcgcccuggacccccugagcgagaccaagugcacccucaaguccuucaccguggagaaggggaucuaccagacgagcaacuuccgggugcagcccaccgaguccaucguccgcuucccgaacaucaccaaccugugccccuucggcgagguguucaacgccacccgguucgccagcgucuacgccuggaaccgcaagcggaucuccaacugcguggcggacuacagcgugcuguacaacuccgccagcuucuccacguucaagugcuacggcgucagccccaccaagcucaacgaccugugcuucaccaacguguacgccgacuccuucgugauccgcggggacgagguccggcagaucgcccccggccagaccgggaagaucgccgacuacaacuacaagcugccggacgacuucacgggcugcgugaucgcguggaacagcaacaaccucgacuccaaggucgggggcaacuacaacuaccuguaccgccuguuccgcaagagcaaccucaagcccuucgagcgggacaucuccaccgagaucuaccaggccggcagcacccccugcaacgggguggagggcuucaacugcuacuucccccugcaguccuacggguuccagccgaccaacggcgugggguaccagcccuaccggguggucgugcugagcuucgagcuccugcacgcccccgccacggugugcggccccaagaaguccaccaaccuggucaagaacaagugcgugaacuucaacuucaacggccucaccgggaccggcgugcugaccgagagcaacaagaaguuccugccguuccagcaguucgggcgcgacaucgccgacacgaccgacgcgguccgcgacccccagacccuggagauccucgacaucacccccugcagcuucggcgggguguccgugaucacgccgggcaccaacaccagcaaccaggucgccgugcuguaccagggcgugaacugcaccgagguccccguggccauccacgccgaccagcugacgcccaccuggcggguguacuccaccgggagcaacgucuuccagacccgcgccggcugccucaucggggcggagcacgugaacaacuccuacgagugcgacauccccaucggcgccggcaucugcgccagcuaccagacgcagaccaacuccccgcggcgcgcccggagcguggcgucccagagcaucaucgccuacaccaugucccugggggccgagaacagcgucgccuacuccaacaacagcaucgccauccccaccaacuucacgaucuccgugaccaccgagauccugcccgugagcaugaccaagacgagcgucgacugcaccauguacaucugcggcgacuccaccgagugcagcaaccuccugcugcaguacggguccuucugcacccagcucaaccgcgcgcugacgggcaucgcccuggagcaggacaagaacacccaggagguguucgcccaggugaagcagaucuacaagacgcccccgaucaaggacuucgggggcuucaacuucagccagauccuccccgaccccuccaagcccagcaagcgguccuucaucgaggaccugcuguucaacaaggucacccucgccgacgccggcuucaucaagcaguacggggacugccugggcgacaucgcggcccgcgaccugaucugcgcccagaaguucaacgggcucaccgugcugccgccccugcucaccgacgagaugaucgcccaguacaccagcgcccugcuggcgggcaccaucacguccggguggaccuucggcgccggcgccgcccuccagauccccuucgcgaugcagauggccuaccgguucaacgggaucggcgugacccagaacguccuguacgagaaccagaagcugaucgccaaccaguucaacagcgccaucgggaagauccaggacucccucagcuccaccgccagcgcgcugggcaagcugcaggacguggugaaccagaacgcccaggcccucaacacgcuggucaagcagcuguccagcaacuucggggccaucuccagcgugcucaacgacauccugucccgccuggacaagguggaggccgagguccagaucgaccggcucaucaccggccgccugcagagccugcagaccuacgugacccagcagcucauccgggcggccgagauccgcgccagcgccaaccuggccgcgaccaagauguccgagugcgugcugggccagagcaagcgggucgacuucugcgggaagggcuaccaccucauguccuucccccagagcgccccgcacggggugguguuccugcacgucacguacgugcccgcccaggagaagaacuucaccaccgcccccgcgaucugccacgacggcaaggcccacuucccccgcgagggggucuucguguccaacggcacccacugguucgugacgcagcggaacuucuacgagccgcagaucaucaccaccgacaacaccuucgucagcggcaacugcgacguggugaucgggaucgucaacaacacgguguacgacccccugcagcccgagcucgacuccuucaaggaggagcuggacaaguacuucaagaaccacaccagccccgacguggaccugggcgacaucuccgggaucaacgccagcgucgugaacauccagaaggagaucgaccgccucaacgagguggccaagaaccugaacgagucccugaucgaccuccaggagcugggcaaguacgagcaguacaucaaguggccgugguacaucuggcugggcuucaucgccgggcucaucgcgaucgucauggugaccaucaugcugugcugcaugaccagcugcugcuccugccugaagggcugcugcagcugcggguccugcugcaaguucgacgaggacgacagcgagcccgugcucaagggcgucaagcugcacuacacgugaggacuagucccuguucccagagcccacuuuuuuuucuuuuuuugaaauaaaauagccugucuuucagaucucaaaggcucuuuucagagccaccaaaaaaaaaaaaaaaaaaaaaaaaaaaaaaaaaaaaaaaaaaaaaaaaaaaaaaaaaaaaaaaaaaaaaaaaaaaaaaaaaaaaaaaaaaaaaaaaaaaaa

SEQ ID NO: 12305 - RNA, 4094 nt, Artificial Sequence
  SARS-CoV-2/USA/WA-UW31/2020__EPI_ISL_414618 spike protein mRNA gc (1-1273)
aggagagucccgcagucggcguccagcggcucugcuuguucgugugugugucguugcaggccuuauucaagcuuaccauguucguguuccugguccuccugccccuggugagcucccagugcgugaaccucaccacccgcacgcagcugccgcccgccuacaccaacagcuucacccggggcgucuacuaccccgacaagguguuccgcuccagcgugcugcacuccacccaggaccucuuccugcccuucuucagcaacgucacgugguuccacgccauccacguguccgggaccaacggcaccaagcgguucgacaacccggugcugcccuucaacgacggggucuacuucgcgagcaccgagaaguccaacaucauccgcggcuggaucuucgggacgacccucgacagcaagacccagucccugcugaucgugaacaacgccaccaacguggucaucaaggugugcgaguuccaguucugcaacgaccccuuccucggcguguacuaccacaagaacaacaagagcuggauggaguccgaguuccgggucuacagcuccgccaacaacugcacguucgaguacgugagccagcccuuccugauggaccuggagggcaagcaggggaacuucaagaaccuccgcgaguucguguucaagaacaucgacggcuacuucaagaucuacuccaagcacaccccgaucaaccugguccgggaccugccccagggguucagcgcccucgagccccugguggaccugcccaucggcaucaacaucacccgcuuccagacccuccuggcccugcaccgguccuaccucacgccgggggacagcagcuccggcuggaccgcgggcgccgccgccuacuacgugggguaccugcagccccgcaccuuccugcucaaguacaacgagaacggcaccaucacggacgcggucgacugcgcccuggacccccugagcgagaccaagugcacccucaaguccuucaccguggagaaggggaucuaccagacgagcaacuuccgggugcagcccaccgaguccaucguccgcuucccgaacaucaccaaccugugccccuucggcgagguguucaacgccacccgguucgccagcgucuacgccuggaaccgcaagcggaucuccaacugcguggcggacuacagcgugcuguacaacuccgccagcuucuccacguucaagugcuacggcgucagccccaccaagcucaacgaccugugcuucaccaacguguacgccgacuccuucgugauccgcggggacgagguccggcagaucgcccccggccagaccgggaagaucgccgacuacaacuacaagcugccggacgacuucacgggcugcgugaucgcguggaacagcaacaaccucgacuccaaggucgggggcaacuacaacuaccuguaccgccuguuccgcaagagcaaccucaagcccuucgagcgggacaucuccaccgagaucuaccaggccggcagcacccccugcaacggggccgagggcuucaacugcuacuucccccugcaguccuacggguuccagccgaccaacggcgugggguaccagcccuaccggguggugguccugagcuucgagcuccugcacgcccccgccacggugugcggccccaagaaguccaccaaccuggugaagaacaagugcgucaacuucaacuucaacggccucaccgggaccggcgugcugaccgagagcaacaagaaguuccugccguuccagcaguucgggcgcgacaucgcggacacgaccgacgccgugcgcgacccccagacccuggagauccucgacaucacccccugcagcuucggcggggucuccgugaucacgccgggcaccaacaccagcaaccagguggccguccuguaccaggacgugaacugcaccgaggugcccgucgccauccacgccgaccagcugacgcccaccuggcggguguacuccaccggcagcaacguguuccagacccgcgcggggugccucaucggcgccgagcacgucaacaacuccuacgagugcgacauccccaucggggccggcaucugcgccagcuaccagacgcagaccaacuccccgcggcgcgcgcggagcguggccucccagagcaucaucgccuacaccaugucccugggcgccgagaacagcguggccuacuccaacaacagcaucgcgauccccaccaacuucacgaucuccgucaccaccgagauccugcccgugagcaugaccaagacgagcguggacugcaccauguacaucugcggggacuccaccgagugcagcaaccuccugcugcaguacggcuccuucugcacccagcucaaccgcgcccugacggggaucgccgucgagcaggacaagaacacccaggagguguucgcccaggugaagcagaucuacaagacgcccccgaucaaggacuucggcggguucaacuucagccagauccugcccgaccccuccaagcccagcaagcgguccuucaucgaggaccuccuguucaacaaggucacccuggccgacgcgggcuucaucaagcaguacggcgacugccucggggacaucgccgcccgcgaccugaucugcgcccagaaguucaacggccugaccgugcucccgccccugcugaccgacgagaugaucgcccaguacaccagcgcgcuccuggccgggaccaucacguccggcuggaccuucggggccggcgccgcgcugcagauccccuucgccaugcagauggccuaccgguucaacggcaucggggugacccagaacguccucuacgagaaccagaagcugaucgccaaccaguucaacagcgccaucggcaagauccaggacucccugagcuccaccgcgagcgcccucgggaagcugcaggacguggugaaccagaacgcccaggcccugaacacgcucgucaagcagcuguccagcaacuucggcgccaucuccagcgugcugaacgacauccucucccgccuggacaagguggaggcggagguccagaucgaccggcugaucaccgggcgccuccagagccugcagaccuacgugacccagcagcugauccgggccgccgagauccgcgccagcgccaaccucgcggccaccaagauguccgagugcgugcugggccagagcaagcgggucgacuucugcggcaagggguaccaccugauguccuucccccagagcgccccgcacggcgugguguuccuccacgucacguacgugcccgcccaggagaagaacuucaccaccgcgcccgccaucugccacgacgggaaggcccacuucccccgcgagggcgucuucguguccaacgggacccacugguucgugacgcagcggaacuucuacgagccgcagaucaucaccaccgacaacaccuucgucagcggcaacugcgacguggugaucggcaucgucaacaacacgguguacgacccccugcagcccgagcuggacuccuucaaggaggagcucgacaaguacuucaagaaccacaccagccccgacguggaccugggggacaucuccggcaucaacgccagcgucgugaacauccagaaggagaucgaccgccugaacgagguggccaagaaccucaacgagucccugaucgaccugcaggagcucgggaaguacgagcaguacaucaaguggccgugguacaucuggcugggcuucaucgcgggccugaucgccaucgucauggugaccaucaugcucugcugcaugaccagcugcugcuccugccugaaggggugcugcagcugcggcuccugcugcaaguucgacgaggacgacagcgagcccgugcugaagggggucaagcuccacuacacgugaggacuagucccuguucccagagcccacuuuuuuuucuuuuuuugaaauaaaauagccugucuuucagaucucaaaggcucuuuucagagccaccaaaaaaaaaaaaaaaaaaaaaaaaaaaaaaaaaaaaaaaaaaaaaaaaaaaaaaaaaaaaaaaaaaaaaaaaaaaaaaaaaaaaaaaaaaaaaaaaaaaaa

SEQ ID NO: 12306 - RNA, 4094 nt, Artificial Sequence
  SARS-CoV-2/South Korea/SNU01/2020__EPI_ISL_411929 spike protein mRNA gc (1-1273)
aggagagucccgcagucggcguccagcggcucugcuuguucgugugugugucguugcaggccuuauucaagcuuaccauguucguguuccugguccuccugccccuggugagcucccagugcgugaaccucaccacccgcacgcagcugccgcccgccuacaccaacagcuucacccggggcgucuacuaccccgacaagguguuccgcuccagcgugcugcacuccacccaggaccucuuccugcccuucuucagcaacgucacgugguuccacgccauccacguguccgggaccaacggcaccaagcgguucgacaacccggugcugcccuucaacgacggggucuacuucgcgagcaccgagaaguccaacaucauccgcggcuggaucuucgggacgacccucgacagcaagacccagucccugcugaucgugaacaacgccaccaacguggucaucaaggugugcgaguuccaguucugcaacgaccccuuccucggcguguacuaccacaagaacaacaagagcuggauggaguccgaguuccgggucuacagcuccgccaacaacugcacguucgaguacgugagccagcccuuccugauggaccuggagggcaagcaggggaacuucaagaaccuccgcgaguucguguucaagaacaucgacggcuacuucaagaucuacuccaagcacaccccgaucaaccugguccgggaccugccccagggguucugggcccucgagccccugguggaccugcccaucggcaucaacaucacccgcuuccagacccuccuggcccugcaccggagcuaccucacgccgggggacuccagcagcggcuggaccgcgggcgccgccgccuacuacgugggguaccugcagccccgcaccuuccugcucaaguacaacgagaacggcaccaucacggacgcggucgacugcgcccuggacccccuguccgagaccaagugcacccucaagagcuucaccguggagaaggggaucuaccagacguccaacuuccgggugcagcccaccgagagcaucguccgcuucccgaacaucaccaaccugugccccuucggcgagguguucaacgccacccgguucgccuccgucuacgccuggaaccgcaagcggaucagcaacugcguggcggacuacuccgugcuguacaacagcgccuccuucagcacguucaagugcuacggcgucucccccaccaagcucaacgaccugugcuucaccaacguguacgccgacagcuucgugauccgcggggacgagguccggcagaucgcccccggccagaccgggaagaucgccgacuacaacuacaagcugccggacgacuucacgggcugcgugaucgcguggaacuccaacaaccucgacagcaaggucgggggcaacuacaacuaccuguaccgccuguuccggaaguccaaccucaagcccuucgagcgcgacaucagcaccgagaucuaccaggccggcuccacccccugcaacgggguggagggcuucaacugcuacuucccccugcagagcuacggguuccagccgaccaacggcgugggguaccagcccuaccggguggucgugcuguccuucgagcuccugcacgcccccgccacggugugcggccccaagaaguccaccaaccuggucaagaacaagugcgugaacuucaacuucaacggccucaccgggaccggcgugcugaccgagagcaacaagaaguuccugccguuccagcaguucgggcgcgacaucgccgacacgaccgacgcgguccgcgacccccagacccuggagauccucgacaucacccccugcagcuucggcggggugagcgugaucacgccgggcaccaacaccuccaaccaggucgccgugcuguaccaggacgugaacugcaccgagguccccguggccauccacgccgaccagcugacgcccaccuggcggguguacagcaccggcuccaacgucuuccagacccgcgccgggugccucaucggcgcggagcacgugaacaacagcuacgagugcgacauccccaucggggccggcaucugcgccuccuaccagacgcagaccaacagcccgcggcgcgcccgguccguggcgagccaguccaucaucgccuacaccaugagccugggcgccgagaacuccgucgccuacagcaacaacuccaucgccauccccaccaacuucacgaucagcgugaccaccgagauccugcccguguccaugaccaagacgagcgucgacugcaccauguacaucugcggggacagcaccgagugcuccaaccuccugcugcaguacggcagcuucugcacccagcucaaccgcgcgcugacggggaucgccguggagcaggacaagaacacccaggagguguucgcccaggucaagcagaucuacaagacgcccccgaucaaggacuucggcggguucaacuucucccagauccugcccgaccccagcaagcccuccaagcggagcuucaucgaggaccuccuguucaacaaggugacccuggccgacgccggcuucaucaagcaguacggcgacugccucggggacaucgcggcccgcgaccugaucugcgcccagaaguucaacggccugaccgugcucccgccccugcugaccgacgagaugaucgcccaguacaccuccgcccuccuggcggggaccaucacgagcggcuggaccuucggggccggcgccgcccugcagauccccuucgcgaugcagauggccuaccgguucaacggcaucggggucacccagaacgugcucuacgagaaccagaagcugaucgccaaccaguucaacuccgccaucggcaagauccaggacagccuguccagcaccgccuccgcgcucgggaagcugcaggacguggucaaccagaacgcccaggcccugaacacgcucgugaagcagcugagcuccaacuucggcgccaucagcuccgugcugaacgacauccucagccgccuggacaaggucgaggccgaggugcagaucgaccggcugaucaccgggcgccuccagucccugcagaccuacgugacccagcagcugauccgggcggccgagauccgcgccagcgccaaccucgccgcgaccaagaugagcgagugcguccugggccaguccaagcggguggacuucugcggcaagggguaccaccugaugagcuucccccaguccgccccgcacggcguggucuuccuccacgugacguacguccccgcccaggagaagaacuucaccaccgcccccgcgaucugccacgacgggaaggcccacuucccccgcgagggcguguucgugagcaacgggacccacugguucgucacgcagcggaacuucuacgagccgcagaucaucaccaccgacaacaccuucguguccggcaacugcgacguggucaucggcaucgugaacaacacgguguacgacccccugcagcccgagcuggacagcuucaaggaggagcucgacaaguacuucaagaaccacaccucccccgacgucgaccugggggacaucagcggcaucaacgccuccguggugaacauccagaaggagaucgaccgccugaacgaggucgccaagaaccucaacgagagccugaucgaccugcaggagcucgggaaguacgagcaguacaucaaguggccgugguacaucuggcugggcuucaucgccggccugaucgcgaucgugauggugaccaucaugcucugcugcaugaccuccugcugcagcugccugaaggggugcugcuccugcggcagcugcugcaaguucgacgaggacgacuccgagcccguccugaagggggugaagcuccacuacacgugaggacuagucccuguucccagagcccacuuuuuuuucuuuuuuugaaauaaaauagccugucuuucagaucucaaaggcucuuuucagagccaccaaaaaaaaaaaaaaaaaaaaaaaaaaaaaaaaaaaaaaaaaaaaaaaaaaaaaaaaaaaaaaaaaaaaaaaaaaaaaaaaaaaaaaaaaaaaaaaaaaaaa

SEQ ID NO: 12307 - RNA, 4094 nt, Artificial Sequence
  SARS-CoV-2/China/WF0004/2020__EPI_ISL_413694 spike protein mRNA gc (1-1273)
aggagagucccgcagucggcguccagcggcucugcuuguucgugugugugucguugcaggccuuauucaagcuuaccauguucguguuccugguccuccugccccuggugagcucccagugcgugaaccucaccacccgcacgcagcugccgcccgccuacaccaacagcuucacccggggcgucuacuaccccgacaagguguuccgcuccagcgugcugcacuccacccaggaccucuuccugcccuucuucagcaacgucacgugguuccacgccauccacguguccgggaccaacggcaccaagcgguucgacaacccggugcugcccuucaacgacggggucuacuucgcgagcaccgagaaguccaacaucauccgcggcuggaucuucgggacgacccucgacagcaagacccagucccugcugaucgugaacaacgccaccaacguggucaucaaggugugcgaguuccaguucugcaacgaccccuuccucggcguguacuaccacaagaacaacaagagcuggacggaguccgaguuccgggucuacagcuccgccaacaacugcaccuucgaguacgugagccagcccuuccugauggaccuggagggcaagcaggggaacuucaagaaccuccgcgaguucguguucaagaacaucgacggcuacuucaagaucuacuccaagcacaccccgaucaaccugguccgggaccugccccagggguucagcgcccucgagccccugguggaccugcccaucggcaucaacaucacccgcuuccagacgcuccuggcccugcaccgguccuaccucaccccgggggacagcagcuccggcuggaccgcgggcgccgccgccuacuacgugggguaccugcagccccgcaccuuccugcucaaguacaacgagaacggcacgaucaccgacgcggucgacugcgcccuggacccccugagcgagaccaagugcacccucaaguccuucacgguggagaaggggaucuaccagaccagcaacuuccgggugcagcccaccgaguccaucguccgcuucccgaacaucaccaaccugugccccuucggcgagguguucaacgccacgcgguucgccagcgucuacgccuggaaccgcaagcggaucuccaacugcguggcggacuacagcgugcuguacaacuccgccagcuucuccaccuucaagugcuacggcgucagccccaccaagcucaacgaccugugcuucaccaacguguacgccgacuccuucgugauccgcggggacgagguccggcagaucgcccccggccagacggggaagaucgccgacuacaacuacaagcugccggacgacuucaccggcugcgugaucgcguggaacagcaacaaccucgacuccaaggucgggggcaacuacaacuaccuguaccgccuguuccgcaagagcaaccucaagcccuucgagcgggacaucuccaccgagaucuaccaggccggcagcacccccugcaacgggguggagggcuucaacugcuacuucccccugcaguccuacggguuccagccgacgaacggcgugggguaccagcccuaccggguggucgugcugagcuucgagcuccugcacgcccccgccaccgugugcggccccaagaaguccaccaaccuggucaagaacaagugcgugaacuucaacuucaacggccucaccgggaccggcgugcugacggagagcaacaagaaguuccugccguuccagcaguucgggcgcgacaucgccgacaccaccgacgcgguccgcgacccccagacccuggagauccucgacaucacgcccugcagcuucggcgggguguccgugaucaccccgggcaccaacaccagcaaccaggucgccgugcuguaccaggacgugaacugcacggagguccccguggccauccacgccgaccagcugacccccaccuggcggguguacuccaccggcagcaacgucuuccagacgcgcgccgggugccucaucggcgcggagcacgugaacaacuccuacgagugcgacauccccaucggggccggcaucugcgccagcuaccagacccagaccaacuccccgcggcgcgcccggagcguggcgucccagagcaucaucgccuacaccaugucccugggcgccgagaacagcgucgccuacuccaacaacagcaucgccauccccacgaacuucaccaucuccgugaccaccgagauccugcccgugagcaugacgaagaccagcgucgacugcaccauguacaucugcggggacuccaccgagugcagcaaccuccugcugcaguacggcuccuucugcacgcagcucaaccgcgcgcugaccgggaucgccguggagcaggacaagaacacccaggagguguucgcccaggucaagcagaucuacaagacgcccccgaucaaggacuucggcggguucaacuucagccagauccugcccgaccccuccaagcccagcaagcgguccuucaucgaggaccuccuguucaacaaggugacccuggccgacgccggcuucaucaagcaguacggcgacugccucggggacaucgcggcccgcgaccugaucugcgcccagaaguucaacggccugaccgugcucccgccccugcugaccgacgagaugaucgcccaguacaccagcgcccuccuggcggggacgaucaccuccggcuggaccuucggggccggcgccgcccugcagauccccuucgcgaugcagauggccuaccgguucaacggcaucggggucacccagaacgugcucuacgagaaccagaagcugaucgccaaccaguucaacagcgccaucggcaagauccaggacucccugagcuccacggccagcgcgcucgggaagcugcaggacguggucaaccagaacgcccaggcccugaacacccucgugaagcagcuguccagcaacuucggcgccaucuccagcgugcugaacgacauccucucccgccuggacaaggucgaggccgaggugcagaucgaccggcugaucaccgggcgccuccagagccugcagaccuacgugacccagcagcugauccgggcggccgagauccgcgccagcgccaaccucgccgcgacgaagauguccgagugcguccugggccagagcaagcgguucgacuucugcggcaagggguaccaccugauguccuucccccagagcgccccgcacggcgugguguuccuccacgucaccuacgugcccgcccaggagaagaacuucaccaccgcccccgcgaucugccacgacgggaaggcccacuucccccgcgagggcgucuucguguccaacgggacgcacugguucgugacccagcggaacuucuacgagccgcagaucaucaccaccgacaacacguucgucagcggcaacugcgacguggugaucggcaucgucaacaacaccguguacgacccccugcagcccgagcuggacuccuucaaggaggagcucgacaaguacuucaagaaccacaccagccccgacguggaccugggggacaucuccggcaucaacgccagcgucgugaacauccagaaggagaucgaccgccugaacgagguggccaagaaccucaacgagucccugaucgaccugcaggagcucgggaaguacgagcaguacaucaaguggccgugguacaucuggcugggcuucaucgccggccugaucgcgaucgucauggugaccaucaugcucugcugcaugacgagcugcugcuccugccugaaggggugcugcagcugcggcuccugcugcaaguucgacgaggacgacagcgagcccgugcugaagggggucaagcuccacuacaccugaggacuagucccuguucccagagcccacuuuuuuuucuuuuuuugaaauaaaauagccugucuuucagaucucaaaggcucuuuucagagccaccaaaaaaaaaaaaaaaaaaaaaaaaaaaaaaaaaaaaaaaaaaaaaaaaaaaaaaaaaaaaaaaaaaaaaaaaaaaaaaaaaaaaaaaaaaaaaaaaaaaaa

SEQ ID NO: 12308 - RNA, 4094 nt, Artificial Sequence
  SARS-CoV-2/China/WF0028/2020__EPI_ISL_413791 spike protein mRNA gc (1-1273)
aggagagucccgcagucggcguccagcggcucugcuuguucgugugugugucguugcaggccuuauucaagcuuaccauguucguguuccugguccuccugccccuggugagcucccagugcgugaaccucaccacccgcacgcagcugccgcccgccuacaccaacagcuucacccggggcgucuacuaccccgacaagguguuccgcuccagcgugcugcacuccacccaggaccucuuccugcccuucuucagcaacgucacgugguuccacgccauccacguguccgggaccaacggcaccaagcgguucgacaacccggugcugcccuucaacgacggggucuacuucgcgagcaccgagaaguccaacaucauccgcggcuggaucuucgggacgacccucgacagcaagacccagucccugcugaucgugaacaacgccaccaacguggucaucaaggugugcgaguuccaguucugcaacgaccccuuccucggcguguacuaccacaagaacaacaagagcuggauggaguccgaguuccgggucuacagcuccgccaacaacugcacguucgaguacgugagccagcccuuccugauggaccuggagggcaagcaggggaacuucaagaaccuccgcgaguucguguucaagaacaucgacggcuacuucaagaucuacuccaagcacaccccgaucaaccugguccgggaccugccccagggguucagcgcccucgagccccugguggaccugcccaucggcaucaacaucacccgcuuccagacccuccuggcccugcaccgguccuaccucacgccgggggacagcagcuccggcuggaccgcgggcgccgccgccuacuacgugggguaccugcagccccgcaccuuccugcucaaguacaacgagaacggcaccaucacggacgcggucgacugcgcccuggacccccugagcgagaccaagugcacccucaaguccuucaccguggagaaggggaucuaccagacgagcaacuuccgggugcagcccaccgaguccaucguccgcuucccgaacaucaccaaccugugccccuucggcgagguguucaacgccacccgguucgccagcgucuacgccuggaaccgcaagcggaucuccaacugcguggcggacuacagcgugcuguacaacuccgccagcuucuccacguucaagugcuacggcgucagccccaccaagcucaacgaccugugcuucaccaacguguacgccgacuccuucgugauccgcggggacgagguccggcagaucgcccccggccagaccgggaagaucgccgacuacaacuacaagcugccggacgacuucacgggcugcgugaucgcguggaacagcaacaaccucgacuccaaggucgggggcaacuacaacuaccuguaccgccuguuccgcaagagcaaccucaagcccuucgagcgggacaucuccaccgagaucuaccaggccggcagcacccccugcaacgggguggagggcuucaacugcuacuucccccugcaguccuacggguuccagccgaccaacggcgugggguaccagcccuaccggguggucgugcugagcuucgagcuccugcacgcccccgccacggugugcggccccaagaaguccaccaaccuggucaagaacaagugcgugaacuucaacuucaacggccucaccgggaccggcgugcugaccgagagcaacaagaaguuccugccguuccagcaguucgggcgcgacaucgccgacacgaccgacgcgguccgcgacccccagacccuggagauccucgacaucacccccugcagcuucggcgggguguccgugaucacgccgggcaccaacaccagcaaccaggucgccgugcuguaccaggacgugaacugcaccgagguccccguggccauccacgccgaccagcugacgcccaccuggcggguguacuccaccggcagcaacgucuuccagacccgcgccgggugccucaucggcgcggagcacgugaacaacuccuacgagugcgacauccccaucggggccggcaucugcgccagcuaccagacgcagaccaacuccccgcggcgcgcccggagcguggcgucccagagcaucaucgccuacaccaugucccugggcgccgagaacagcgucgccuacuccaacaacagcaucgccauccccaccaacuucacgaucuccgugaccaccgagauccugcccgugagcaugaccaagacgagcgucgacugcaccauguacaucugcggggacuccaccgagugcagcaaccuccugcugcaguacggcuccuucugcacccagcucaaccgcgcgcugacggggaucgccguggagcaggacaagaacacccaggagguguucgcccaggucaagcagaucuacaagacgcccccgaucaaggacuucggcggguucaacuucagccagauccugcccgaccccuccaagcccagcaagcgguccuucaucgaggaccuccuguucaacaaggugacccuggccgacgccggcuucaucaagcaguacggcgacugccucggggacaucgcggcccgcgaccugaucugcgcccagaaguucaacggccugaccgugcucccgccccugcugaccgacgagaugaucgcccaguacaccagcgcccuccuggcggggaccaucacguccggcuggaccuucggggccggcgccgcccugcagauccccuucgcgaugcagauggccuaccgguucaacggcaucggggucacccagaacgugcucuacgagaaccagaagcugaucgccaaccaguucaacagcgccaucggcaagauccaggacucccugagcuccaccgccagcgcgcucgggaagcugcaggacguggucaaccagaacgcccaggcccugaacacgcucgugaagcagcuguccagcaacuucggcgccaucuccagcgugcugaacgacauccucucccgccuggacaaggucgaggccgaggugcagaucgaccggcugaucaccgggcgccuccagagccugcagaccuacgugacccagcagcugauccgggcggccgagauccgcgccagcgccaaccucgccgcgaccaagauguccgagugcguccugggccagagcaagcggguggacuucugcggcaagggguaccaccugauguccuucccccagagcgccccgcacggcguggucuuccuccacgugacguacguccccgcccaggagaagaacuucaccaccgcccccgcgaucugccacgacgggaaggcccacuucccccgcgagggcguguucguguccaacgggacccacugguucgucacgcagcggaacuucuacgagccgcagaucaucaccaccgacaacaccuucgugagcggcaacugcgacguggucaucggcaucgugaacaacacgguguacgacccccugcagcccgagcuggaguccuucaaggaggagcucgacaaguacuucaagaaccacaccagccccgacgucgaccugggggacaucuccggcaucaacgccagcguggugaacauccagaaggagaucgaccgccugaacgaggucgccaagaaccucaacgagucccugaucgaccugcaggagcucgggaaguacgagcaguacaucaaguggccgugguacaucuggcugggcuucaucgccggccugaucgcgaucgugauggugaccaucaugcucugcugcaugaccagcugcugcuccugccugaaggggugcugcagcugcggcuccugcugcaaguucgacgaggacgacagcgagcccguccugaagggggugaagcuccacuacacgugaggacuagucccuguucccagagcccacuuuuuuuucuuuuuuugaaauaaaauagccugucuuucagaucucaaaggcucuuuucagagccaccaaaaaaaaaaaaaaaaaaaaaaaaaaaaaaaaaaaaaaaaaaaaaaaaaaaaaaaaaaaaaaaaaaaaaaaaaaaaaaaaaaaaaaaaaaaaaaaaaaaaa

SEQ ID NO: 12309 - RNA, 4094 nt, Artificial Sequence
  SARS-CoV-2/2019-nCoV/USA-CruiseA-18/2020__MT159716.1 spike protein mRNA gc (1-1273)
aggagagucccgcagucggcguccagcggcucugcuuguucgugugugugucguugcaggccuuauucaagcuuaccauguucguguuccugguccuccugccccuggugagcucccagugcgugaaccucaccacccgcacgcagcugccgcccgccuacaccaacagcuucacccggggcgucuacuaccccgacaagguguuccgcuccagcgugcugcacuccacccaggaccucuuccugcccuucuucagcaacgucacgugguuccacgccauccacguguccgggaccaacggcaccaagcgguucgacaacccggugcugcccuucaacgacggggucuacuucgcgagcaccgagaaguccaacaucauccgcggcuggaucuucgggacgacccucgacagcaagacccagucccugcugaucgugaacaacgccaccaacguggucaucaaggugugcgaguuccaguucugcaacgaccccuuccucggcguguacuaccacaagaacaacaagagcuggauggaguccgagcugcgggucuacagcuccgccaacaacugcacguucgaguacgugagccagcccuuccugauggaccucgagggcaagcaggggaacuucaagaaccugcgcgaguucguguucaagaacaucgacggcuacuucaagaucuacuccaagcacaccccgaucaaccugguccgggaccucccccagggguucagcgcccuggagccccugguggaccuccccaucggcaucaacaucacccgcuuccagacccugcuggcccuccaccgguccuaccugacgccgggggacagcagcuccggcuggaccgcgggcgccgccgccuacuacgugggguaccugcagccccgcaccuuccuccugaaguacaacgagaacggcaccaucacggacgcggucgacugcgcccuggacccccucagcgagaccaagugcacccugaaguccuucaccguggagaaggggaucuaccagacgagcaacuuccgggugcagcccaccgaguccaucguccgcuucccgaacaucaccaaccugugccccuucggcgagguguucaacgccacccgguucgccagcgucuacgccuggaaccgcaagcggaucuccaacugcguggcggacuacagcgugcucuacaacuccgccagcuucuccacguucaagugcuacggcgucagccccaccaagcugaacgaccugugcuucaccaacguguacgccgacuccuucgugauccgcggggacgagguccggcagaucgcccccggccagaccgggaagaucgccgacuacaacuacaagcucccggacgacuucacgggcugcgugaucgcguggaacagcaacaaccuggacuccaaggucgggggcaacuacaacuaccuguaccgccucuuccgcaagagcaaccugaagcccuucgagcgggacaucuccaccgagaucuaccaggccggcagcacccccugcaacgggguggagggcuucaacugcuacuucccccugcaguccuacggguuccagccgaccaacggcgugggguaccagcccuaccggguggucgugcucagcuucgagcugcugcacgcccccgccacggugugcggccccaagaaguccaccaaccucgucaagaacaagugcgugaacuucaacuucaacggccugaccgggaccggcgugcugaccgagagcaacaagaaguuccugccguuccagcaguucgggcgcgacaucgccgacacgaccgacgcgguccgcgacccccagacccucgagauccuggacaucacccccugcagcuucggcgggguguccgugaucacgccgggcaccaacaccagcaaccaggucgccgugcuguaccaggacgugaacugcaccgagguccccguggccauccacgccgaccagcucacgcccaccuggcggguguacuccaccggcagcaacgucuuccagacccgcgccgggugccugaucggcgcggagcacgugaacaacuccuacgagugcgacauccccaucggggccggcaucugcgccagcuaccagacgcagaccaacuccccgcggcgcgcccggagcguggcgucccagagcaucaucgccuacaccaugucccugggcgccgagaacagcgucgccuacuccaacaacagcaucgccauccccaccaacuucacgaucuccgugaccaccgagauccuccccgugagcaugaccaagacgagcgucgacugcaccauguacaucugcggggacuccaccgagugcagcaaccugcugcuccaguacggcuccuucugcacccagcugaaccgcgcgcugacggggaucgccguggagcaggacaagaacacccaggagguguucgcccaggucaagcagaucuacaagacgcccccgaucaaggacuucggcggguucaacuucagccagauccuccccgaccccuccaagcccagcaagcgguccuucaucgaggaccugcuguucaacaaggugacccucgccgacgccggcuucaucaagcaguacggcgacugccugggggacaucgcggcccgcgaccugaucugcgcccagaaguucaacggccucaccgugcugccgccccugcucaccgacgagaugaucgcccaguacaccagcgcccugcuggcggggaccaucacguccggcuggaccuucggggccggcgccgcccuccagauccccuucgcgaugcagauggccuaccgguucaacggcaucggggucacccagaacgugcuguacgagaaccagaagcugaucgccaaccaguucaacagcgccaucggcaagauccaggacucccucagcuccaccgccagcgcgcuggggaagcugcaggacguggucaaccagaacgcccaggcccucaacacgcuggugaagcagcuguccagcaacuucggcgccaucuccagcgugcucaacgacauccugucccgccuggacaaggucgaggccgaggugcagaucgaccggcucaucaccgggcgccugcagagccugcagaccuacgugacccagcagcucauccgggcggccgagauccgcgccagcgccaaccuggccgcgaccaagauguccgagugcguccugggccagagcaagcggguggacuucugcggcaagggguaccaccucauguccuucccccagagcgccccgcacggcguggucuuccugcacgugacguacguccccgcccaggagaagaacuucaccaccgcccccgcgaucugccacgacgggaaggcccacuucccccgcgagggcguguucguguccaacgggacccacugguucgucacgcagcggaacuucuacgagccgcagaucaucaccaccgacaacaccuucgugagcggcaacugcgacguggucaucggcaucgugaacaacacgguguacgacccccugcagcccgagcucgacuccuucaaggaggagcuggacaaguacuucaagaaccacaccagccccgacgucgaccugggggacaucuccggcaucaacgccagcguggugaacauccagaaggagaucgaccgccucaacgaggucgccaagaaccugaacgagucccugaucgaccuccaggagcuggggaaguacgagcaguacaucaaguggccgugguacaucuggcugggcuucaucgccggccucaucgcgaucgugauggugaccaucaugcugugcugcaugaccagcugcugcuccugccugaaggggugcugcagcugcggcuccugcugcaaguucgacgaggacgacagcgagcccguccucaagggggugaagcugcacuacacgugaggacuagucccuguucccagagcccacuuuuuuuucuuuuuuugaaauaaaauagccugucuuucagaucucaaaggcucuuuucagagccaccaaaaaaaaaaaaaaaaaaaaaaaaaaaaaaaaaaaaaaaaaaaaaaaaaaaaaaaaaaaaaaaaaaaaaaaaaaaaaaaaaaaaaaaaaaaaaaaaaaaaa

SEQ ID NO: 12310 - RNA, 4094 nt, Artificial Sequence
  SARS-CoV-2/SARS-CoV-2/Yunnan-01/human/2020/CHN__MT049951.1 spike protein mRNA gc (1-1273)
aggagagucccgcagucggcguccagcggcucugcuuguucgugugugugucguugcaggccuuauucaagcuuaccauguucguguuccugguccuccugccccuggugagcucccagugcgugaaccucaccacccgcacgcagcugccgcccgccaacaccaacagcuucacccggggcgucuacuaccccgacaagguguuccgcuccagcgugcugcacuccacccaggaccucuuccugcccuucuucagcaacgucacgugguuccacgccauccacguguccgggaccaacggcaccaagcgguucgacaacccggugcugcccuucaacgacggggucuacuucgcgagcaccgagaaguccaacaucauccgcggcuggaucuucgggacgacccucgacagcaagacccagucccugcugaucgugaacaacgccaccaacguggucaucaaggugugcgaguuccaguucugcaacgaccccuuccucggcguguacuaccacaagaacaacaagagcuggauggaguccgaguuccgggucuacagcuccgccaacaacugcacguucgaguacgugagccagcccuuccugauggaccuggagggcaagcaggggaacuucaagaaccuccgcgaguucguguucaagaacaucgacggcuacuucaagaucuacuccaagcacaccccgaucaaccugguccgggaccugccccagggguucagcgcccucgagccccugguggaccugcccaucggcaucaacaucacccgcuuccagacccuccuggcccugcaccgguccuaccucacgccgggggacagcagcuccggcuggaccgcgggcgccgccgccuacuacgugggguaccugcagccccgcaccuuccugcucaaguacaacgagaacggcaccaucacggacgcggucgacugcgcccuggacccccugagcgagaccaagugcacccucaaguccuucaccguggagaaggggaucuaccagacgagcaacuuccgggugcagcccaccgaguccaucguccgcuucccgaacaucaccaaccugugccccuucggcgagguguucaacgccacccgguucgccagcgucuacgccuggaaccgcaagcggaucuccaacugcguggcggacuacagcgugcuguacaacuccgccagcuucuccacguucaagugcuacggcgucagccccaccaagcucaacgaccugugcuucaccaacguguacgccgacuccuucgugauccgcggggacgagguccggcagaucgcccccggccagaccgggaagaucgccgacuacaacuacaagcugccggacgacuucacgggcugcgugaucgcguggaacagcaacaaccucgacuccaaggucgggggcaacuacaacuaccuguaccgccuguuccgcaagagcaaccucaagcccuucgagcgggacaucuccaccgagaucuaccaggccggcagcacccccugcaacgggguggagggcuucaacugcuacuucccccugcaguccuacggguuccagccgaccaacggcgugggguaccagcccuaccggguggucgugcugagcuucgagcuccugcacgcccccgccacggugugcggccccaagaaguccaccaaccuggucaagaacaagugcgugaacuucaacuucaacggccucaccgggaccggcgugcugaccgagagcaacaagaaguuccugccguuccagcaguucgggcgcgacaucgccgacacgaccgacgcgguccgcgacccccagacccuggagauccucgacaucacccccugcagcuucggcgggguguccgugaucacgccgggcaccaacaccagcaaccaggucgccgugcuguaccaggacgugaacugcaccgagguccccguggccauccacgccgaccagcugacgcccaccuggcggguguacuccaccggcagcaacgucuuccagacccgcgccgggugccucaucggcgcggagcacgugaacaacuccuacgagugcgacauccccaucggggccggcaucugcgccagcuaccagacgcagaccaacuccccgcggcgcgcccggagcguggcgucccagagcaucaucgccuacaccaugucccugggcgccgagaacagcgucgccuacuccaacaacagcaucgccauccccaccaacuucacgaucuccgugaccaccgagauccugcccgugagcaugaccaagacgagcgucgacugcaccauguacaucugcggggacuccaccgagugcagcaaccuccugcugcaguacggcuccuucugcacccagcucaaccgcgcgcugacggggaucgccguggagcaggacaagaacacccaggagguguucgcccaggucaagcagaucuacaagacgcccccgaucaaggacuucggcggguucaacuucagccagauccugcccgaccccuccaagcccagcaagcgguccuucaucgaggaccuccuguucaacaaggugacccuggccgacgccggcuucaucaagcaguacggcgacugccucggggacaucgcggcccgcgaccugaucugcgcccagaaguucaacggccugaccgugcucccgccccugcugaccgacgagaugaucgcccaguacaccagcgcccuccuggcggggaccaucacguccggcuggaccuucggggccggcgccgcccugcagauccccuucgcgaugcagauggccuaccgguucaacggcaucggggucacccagaacgugcucuacgagaaccagaagcugaucgccaaccaguucaacagcgccaucggcaagauccaggacucccugagcuccaccgccagcgcgcucgggaagcugcaggacguggucaaccagaacgcccaggcccugaacacgcucgugaagcagcuguccagcaacuucggcgccaucuccagcgugcugaacgacauccucucccgccuggacaaggucgaggccgaggugcagaucgaccggcugaucaccgggcgccuccagagccugcagaccuacgugacccagcagcugauccgggcggccgagauccgcgccagcgccaaccucgccgcgaccaagauguccgagugcguccugggccagagcaagcggguggacuucugcggcaagggguaccaccugauguccuucccccagagcgccccgcacggcguggucuuccuccacgugacguacguccccgcccaggagaagaacuucaccaccgcccccgcgaucugccacgacgggaaggcccacuucccccgcgagggcguguucguguccaacgggacccacugguucgucacgcagcggaacuucuacgagccgcagaucaucaccaccgacaacaccuucgugagcggcaacugcgacguggucaucggcaucgugaacaacacgguguacgacccccugcagcccgagcuggacuccuucaaggaggagcucgacaaguacuucaagaaccacaccagccccgacgucgaccugggggacaucuccggcaucaacgccagcguggugaacauccagaaggagaucgaccgccugaacgaggucgccaagaaccucaacgagucccugaucgaccugcaggagcucgggaaguacgagcaguacaucaaguggccgugguacaucuggcugggcuucaucgccggccugaucgcgaucgugauggugaccaucaugcucugcugcaugaccagcugcugcuccugccugaaggggugcugcagcugcggcuccugcugcaaguucgacgaggacgacagcgagcccguccugaagggggugaagcuccacuacacgugaggacuagucccuguucccagagcccacuuuuuuuucuuuuuuugaaauaaaauagccugucuuucagaucucaaaggcucuuuucagagccaccaaaaaaaaaaaaaaaaaaaaaaaaaaaaaaaaaaaaaaaaaaaaaaaaaaaaaaaaaaaaaaaaaaaaaaaaaaaaaaaaaaaaaaaaaaaaaaaaaaaaa

SEQ ID NO: 12311 - RNA, 4094 nt, Artificial Sequence
  SARS-CoV-2/USA/WA-UW292/2020__EPI_ISL_418077 spike protein mRNA gc (1-1273)
aggagagucccgcagucggcguccagcggcucugcuuguucgugugugugucguugcaggccuuauucaagcuuaccauguucguguuccugguccuccugccccuggugagcucccagugcgugaaccucaccacccgcacgcagcugccgcccgccuacaccaacagcuucacccggggcgucuacuaccccgacaagguguuccgcuccagcgugcugcacuccacccaggaccucuuccugcccuucuucagcaacgucacgugguuccacgccauccacguguccgggaccaacggcaccaagcgguucgacaacccggugcugcccuucaacgacggggucuacuucgcgagcaccgagaaguccaacaucauccgcggcuggaucuucgggacgacccucgacagcaagacccagucccugcugaucgugaacaacgccaccaacguggucaucaaggugugcgaguuccaguucugcaacgaccccuuccucggcguguacuaccacaagaacaacaagagcuggauggaguccgaguuccgggucuacagcuccgccaacaacugcacguucgaguacgugagccagcccuuccugauggaccuggagggcaagcaggggaacuucaagaaccuccgcgaguucguguucaagaacaucgacggcuacuucaagaucuacuccaagcacaccccgaucaaccugguccgggaccugccccagggguucagcgcccucgagccccugguggaccugcccaucggcaucaacaucacccgcuuccagacccuccuggcccugcaccgguccuaccucacgccgggggacagcagcuccggcuggaccgcgggcgccgccgccuacuacgugggguaccugcagccccgcaccuuccugcucaaguacaacgagaacggcaccaucacggacgcggucgacugcgcccuggacccccugagcgagaccaagugcacccucaaguccuucaccguggagaaggggaucuaccagacgagcaacuuccgggugcagcccaccgaguccaucguccgcuucccgaacaucaccaaccugugccccuucggcgagguguucaacgccacccgguucgccagcgucuacgccuggaaccgcaagcggaucuccaacugcguggcggacuacagcgugcuguacaacuccgccagcuucuccacguucaagugcuacggcgucagccccaccaagcucaacgaccugugcuucaccaacguguacgccgacuccuucgugauccgcggggacgagguccggcagaucgcccccggccagaccgggaagaucgccgacuacaacuacaagcugccggacgacuucacgggcugcgugaucgcguggaacagcaacaaccucgacuccaaggucgggggcaacuacaacuaccuguaccgccuguuccgcaagagcaaccucaagcccuucgagcgggacaucuccaccgagaucuaccaggccagcuccacccccugcaacggcguggagggguucaacugcuacuucccccugcagagcuacggcuuccagccgaccaacggggugggcuaccagcccuaccggguggucgugcugagcuucgagcuccugcacgcccccgccacggugugcgggcccaagaaguccaccaaccuggucaagaacaagugcgugaacuucaacuucaacggccucaccggcaccggggugcugaccgagagcaacaagaaguuccugccguuccagcaguucggccgcgacaucgccgacacgaccgacgcgguccgcgacccccagacccuggagauccucgacaucacccccugcuccuucgggggcgugagcgugaucacgccggggaccaacaccuccaaccaggucgccgugcuguaccaggacgugaacugcaccgagguccccguggccauccacgccgaccagcugacgcccaccuggcggguguacagcaccggcuccaacgucuuccagacccgcgccggcugccucaucggggcggagcacgugaacaacagcuacgagugcgacauccccaucggcgccgggaucugcgccuccuaccagacgcagaccaacagcccgcggcgcgcccgguccguggcgagccaguccaucaucgccuacaccaugagccugggcgccgagaacuccgucgccuacagcaacaacuccaucgccauccccaccaacuucacgaucagcgugaccaccgagauccugcccgugagcaugaccaagacguccgucgacugcaccauguacaucugcggcgacagcaccgagugcuccaaccuccugcugcaguacgggagcuucugcacccagcucaaccgcgcgcugacgggcaucgccguggagcaggacaagaacacccaggagguguucgcccaggucaagcagaucuacaagacgcccccgaucaaggacuucgggggcuucaacuucucccagauccugcccgaccccagcaagcccuccaagcggagcuucaucgaggaccuccuguucaacaaggugacccuggccgacgccggguucaucaagcaguacggcgacugccucggcgacaucgcggcccgcgaccugaucugcgcccagaaguucaacgggcugaccgugcucccgccccugcugaccgacgagaugaucgcccaguacaccuccgcccuccuggcgggcaccaucacgagcggguggaccuucggcgccggggccgcccugcagauccccuucgcgaugcagauggccuaccgguucaacggcaucggcgucacccagaacgugcucuacgagaaccagaagcugaucgccaaccaguucaacuccgccaucgggaagauccaggacagccuguccagcaccgccuccgcgcucggcaagcugcaggacguggucaaccagaacgcccaggcccugaacacgcucgugaagcagcugagcuccaacuucggggccaucagcuccgugcugaacgacauccucagccgccuggacaaggucgaggccgaggugcagaucgaccggcugaucaccggccgccuccagagccugcagaccuacgugacccagcagcugauccgggcggccgagauccgcgccuccgccaaccucgccgcgaccaagaugagcgagugcguccuggggcaguccaagcggguggacuucugcggcaagggcuaccaccugaugagcuucccccaguccgccccgcacgggguggucuuccuccacgugacguacguccccgcccaggagaagaacuucaccaccgcccccgcgaucugccacgacggcaaggcccacuucccccgcgaggggguguucgugagcaacggcacccacugguucgucacgcagcggaacuucuacgagccgcagaucaucaccaccgacaacaccuucguguccgggaacugcgacguggucaucggcaucgugaacaacacgguguacgacccccugcagcccgagcuggacagcuucaaggaggagcucgacaaguacuucaagaaccacaccucccccgacgucgaccugggcgacaucagcgggaucaacgccuccguggugaacauccagaaggagaucgaccgccugaacgaggucgccaagaaccucaacgagagccugaucgaccugcaggagcucggcaaguacgagcaguacaucaaguggccgugguacaucuggcugggguucaucgccggccugaucgcgaucgugauggugaccaucaugcucugcugcaugaccuccugcugcagcugccugaagggcugcugcuccugcgggagcugcugcaaguucgacgaggacgacuccgagcccguccugaagggcgugaagcuccacuacacgugaggacuagucccuguucccagagcccacuuuuuuuucuuuuuuugaaauaaaauagccugucuuucagaucucaaaggcucuuuucagagccaccaaaaaaaaaaaaaaaaaaaaaaaaaaaaaaaaaaaaaaaaaaaaaaaaaaaaaaaaaaaaaaaaaaaaaaaaaaaaaaaaaaaaaaaaaaaaaaaaaaaaa

SEQ ID NO: 12312 - RNA, 4094 nt, Artificial Sequence
  SARS-CoV-2/Iceland/192/2020__EPI_ISL_417819 spike protein mRNA gc (1-1273)
aggagagucccgcagucggcguccagcggcucugcuuguucgugugugugucguugcaggccuuauucaagcuuaccauguucguguucuucguccugcucccccuggugagcucccagugcgugaaccugaccacccgcacgcagcucccgcccgccuacaccaacagcuucacccggggcgucuacuaccccgacaagguguuccgcuccagcgugcugcacuccacccaggaccuguuccuccccuucuucagcaacgucacgugguuccacgccauccacguguccgggaccaacggcaccaagcgguucgacaacccggugcugcccuucaacgacggggucuacuucgcgagcaccgagaaguccaacaucauccgcggcuggaucuucgggacgacccuggacagcaagacccagucccuccugaucgugaacaacgccaccaacguggucaucaaggugugcgaguuccaguucugcaacgaccccuuccugggcguguacuaccacaagaacaacaagagcuggauggaguccgaguuccgggucuacagcuccgccaacaacugcacguucgaguacgugagccagcccuuccucauggaccuggagggcaagcaggggaacuucaagaaccugcgcgaguucguguucaagaacaucgacggcuacuucaagaucuacuccaagcacaccccgaucaaccucguccgggaccugccccagggguucagcgcccuggagccccucguggaccugcccaucggcaucaacaucacccgcuuccagacccugcucgcccugcaccgguccuaccugacgccgggggacagcagcuccggcuggaccgcgggcgccgccgccuacuacgugggguaccuccagccccgcaccuuccugcugaaguacaacgagaacggcaccaucacggacgcggucgacugcgcccucgacccccugagcgagaccaagugcacccugaaguccuucaccguggagaaggggaucuaccagacgagcaacuuccgggugcagcccaccgaguccaucguccgcuucccgaacaucaccaaccucugccccuucggcgagguguucaacgccacccgguucgccagcgucuacgccuggaaccgcaagcggaucuccaacugcguggcggacuacagcgugcuguacaacuccgccagcuucuccacguucaagugcuacggcgucagccccaccaagcugaacgaccucugcuucaccaacguguacgccgacuccuucgugauccgcggggacgagguccggcagaucgcccccggccagaccgggaagaucgccgacuacaacuacaagcugccggacgacuucacgggcugcgugaucgcguggaacagcaacaaccuggacuccaaggucgggggcaacuacaacuaccucuaccgccuguuccgcaagagcaaccugaagcccuucgagcgggacaucuccaccgagaucuaccaggccggcagcacccccugcaacgggguggagggcuucaacugcuacuucccccuccaguccuacggguuccagccgaccaacggcgugggguaccagcccuaccggguggucgugcugagcuucgagcugcuccacgcccccgccacggugugcggccccaagaaguccaccaaccuggucaagaacaagugcgugaacuucaacuucaacggccugaccgggaccggcgugcucaccgagagcaacaagaaguuccugccguuccagcaguucgggcgcgacaucgccgacacgaccgacgcgguccgcgacccccagacccuggagauccuggacaucacccccugcagcuucggcgggguguccgugaucacgccgggcaccaacaccagcaaccaggucgccgugcucuaccagggcgugaacugcaccgagguccccguggccauccacgccgaccagcugacgcccaccuggcggguguacuccaccgggagcaacgucuuccagacccgcgccggcugccugaucggggcggagcacgugaacaacuccuacgagugcgacauccccaucggcgccggcaucugcgccagcuaccagacgcagaccaacuccccgcggcgcgcccggagcguggcgucccagagcaucaucgccuacaccaugucccucggggccgagaacagcgucgccuacuccaacaacagcaucgccauccccaccaacuucacgaucuccgugaccaccgagauccugcccgugagcaugaccaagacgagcgucgacugcaccauguacaucugcggcgacuccaccgagugcagcaaccugcuccugcaguacggguccuucugcacccagcugaaccgcgcgcucacgggcaucgccguggagcaggacaagaacacccaggagguguucgcccaggucaagcagaucuacaagacgcccccgaucaaggacuucgggggcuucaacuucagccagauccugcccgaccccuccaagcccagcaagcgguccuucaucgaggaccuccuguucaacaaggugacccuggccgacgccggcuucaucaagcaguacggggacugccugggcgacaucgcggcccgcgaccucaucugcgcccagaaguucaacgggcugaccgugcugccgccccuccugaccgacgagaugaucgcccaguacaccagcgcccugcucgcgggcaccaucacguccggguggaccuucggcgccggcgccgcccugcagauccccuucgcgaugcagauggccuaccgguucaacgggaucggcgucacccagaacgugcuguacgagaaccagaagcucaucgccaaccaguucaacagcgccaucgggaagauccaggacucccugagcuccaccgccagcgcgcugggcaagcuccaggacguggucaaccagaacgcccaggcccugaacacgcuggugaagcagcucuccagcaacuucggggccaucuccagcgugcugaacgacauccugucccgccucgacaaggucgaggccgaggugcagaucgaccggcugaucaccggccgccugcagagccuccagaccuacgugacccagcagcugauccgggcggccgagauccgcgccagcgccaaccuggccgcgaccaagauguccgagugcguccucggccagagcaagcggguggacuucugcgggaagggcuaccaccugauguccuucccccagagcgccccgcacgggguggucuuccugcacgugacguacguccccgcccaggagaagaacuucaccaccgcccccgcgaucugccacgacggcaaggcccacuucccccgcgaggggguguucguguccaacggcacccacugguucgucacgcagcggaacuucuacgagccgcagaucaucaccaccgacaacaccuucgugagcggcaacugcgacguggucaucgggaucgugaacaacacgguguacgacccccuccagcccgagcuggacuccuucaaggaggagcuggacaaguacuucaagaaccacaccagccccgacgucgaccucggcgacaucuccgggaucaacgccagcguggugaacauccagaaggagaucgaccgccugaacgaggucgccaagaaccugaacgagucccucaucgaccugcaggagcugggcaaguacgagcaguacaucaaguggccgugguacaucuggcucggcuucaucgccgggcugaucgcgaucgugauggugaccaucaugcugugcugcaugaccagcugcugcuccugccucaagggcugcugcagcugcggguccugcugcaaguucgacgaggacgacagcgagcccguccugaagggcgugaagcugcacuacacgugaggacuagucccuguucccagagcccacuuuuuuuucuuuuuuugaaauaaaauagccugucuuucagaucucaaaggcucuuuucagagccaccaaaaaaaaaaaaaaaaaaaaaaaaaaaaaaaaaaaaaaaaaaaaaaaaaaaaaaaaaaaaaaaaaaaaaaaaaaaaaaaaaaaaaaaaaaaaaaaaaaaaa

SEQ ID NO: 12313 - RNA, 4094 nt, Artificial Sequence
  SARS-CoV-2/Belgium/ULG-6939/2020__EPI_ISL_417020 spike protein mRNA gc (1-1273)
aggagagucccgcagucggcguccagcggcucugcuuguucgugugugugucguugcaggccuuauucaagcuuaccauguucguguuccugguccuccugccccuggugagcucccagugcgugaaccucaccacccgcacgcagcugccgcccgccuacaccaacagcuucacccggggcgucuacuaccccgacaagguguuccgcuccagcgugcugcacuccacccaggaccucuuccugcccuucuucagcaacgucacgugguuccacgccauccacguguccgggaccaacggcaccaagcgguucgacaacccggugcugcccuucaacgacggggucuacuucgcgagcaccgagaaguccaacaucauccgcggcuggaucuucgggacgacccucgacagcaagacccagucccugcugaucgugaacaacgccaccaacguggucaucaaggugugcgaguuccaguucugcaacgaccccuuccucggcguguacuaccacaagaacaacaagagcuggauggaguccgaguuccgggucuacagcuccgccaacaacugcacguucgaguacgugagccagcccuuccugauggaccuggagggcaagcaggggaacuucaagaaccuccgcgaguucguguucaagaacaucgacggcuacuucaagaucuacuccaagcacaccccgaucaaccugguccgggaccugccccagggguucagcgcccucgagccccugguggaccugcccaucggcaucaacaucacccgcuuccagacccuccuggcccugcaccgguccuaccucacgccgggggacagcagcuccggcuggaccgcgggcgccgccgccuacuacgugggguaccugcagccccgcaccuuccugcucaaguacaacgagaacggcaccaucacggacgcggucgacugcgcccuggacccccugagcgagaccaagugcacccucaaguccuucaccguggagaaggggaucuaccagacgagcaacuuccgggugcagcccaccgaguccaucguccgcuucccgaacaucaccaaccugugccccuucggcgagguguucaacgccacccgguucgccagcgucuacgccuggaaccgcaagcggaucuccaacugcguggcggacuacagcgugcuguacaacuccgccagcuucuccacguucaagugcuacggcgucagccccaccaagcucaacgaccugugcuucaccaacguguacgccgacuccuucgugauccgcggggacgagguccggcagaucgcccccggccagaccgggaagaucgccgacuacaacuacaagcugccggacgacuucacgggcugcgugaucgcguggaacagcaacaaccucgacuccaaggucgggggcaacuacaacuaccuguaccgccuguuccgcaagagcaaccucaagcccuucgagcgggacaucuccaccgagaucuaccaggccggcagcacccccugcaacgggguggagggcuucaacugcuacuucccccugcaguccuacggguuccagccgaccaacggcgugggguaccagcccuaccggguggucgugcugagcuucgagcuccugcacgcccccgccacggugugcggccccaagaaguccaccaaccuggucaagaacaagugcgugaacuucaacuucaacggccucaccgggaccggcgugcugaccgagagcaacaagaaguuccugccguuccagcaguucgggcgcgacaucgccgacacgaccgacgcgguccgcgacccccagacccuggagauccucgacaucacccccugcagcuucggcgggguguccgugaucacgccgggcaccaacaccagcaaccaggucgccgugcuguaccagggcgugaacugcaccgagguccccguggccauccacgccgaccagcugacgcccaccuggcggguguacuccaccgggagcaacgucuuccagacccgcgccggcugccucaucggggcggagcacgugaacaacuccuacgagugcgacauccccaucggcgccggcaucugcgccagcuaccagacgcagaccaacuccccgcggcgcgcccggagcguggcgucccagagcaucaucgccuacaccaugucccugggggccgagaacagcgucguguacuccaacaacagcaucgccauccccaccaacuucacgaucuccgugaccaccgagauccugcccgucagcaugaccaagacgagcguggacugcaccauguacaucugcggcgacuccaccgagugcagcaaccuccugcugcaguacggguccuucugcacccagcucaaccgcgcccugacgggcaucgcgguggagcaggacaagaacacccaggaggucuucgcccaggugaagcagaucuacaagacgcccccgaucaaggacuucgggggcuucaacuucagccagauccugcccgaccccuccaagcccagcaagcgguccuucaucgaggaccuccuguucaacaaggugacccuggccgacgccggcuucaucaagcaguacggggacugccucggcgacaucgccgcgcgcgaccugaucugcgcccagaaguucaacgggcugaccguccucccgccccugcugaccgacgagaugaucgcccaguacaccagcgcccuccuggccggcaccaucacguccggguggaccuucggcgcgggcgccgcccugcagauccccuucgccaugcagauggcguaccgguucaacgggaucggcgugacccagaacgugcucuacgagaaccagaagcugaucgccaaccaguucaacagcgccaucgggaagauccaggacucccugagcuccaccgccagcgcccucggcaagcugcaggacgucgugaaccagaacgcgcaggcccugaacacgcucgugaagcagcuguccagcaacuucggggccaucuccagcguccugaacgacauccucucccgccuggacaagguggaggccgaggugcagaucgaccggcugaucaccggccgccuccagagccugcagaccuacgucacccagcagcugauccgggccgcggagauccgcgccagcgccaaccucgccgccaccaagauguccgagugcgugcugggccagagcaagcggguggacuucugcgggaagggcuaccaccugauguccuucccccagagcgcgccgcacggggucguguuccuccacgucacguacgugcccgcccaggagaagaacuucaccaccgcccccgccaucugccacgacggcaaggcgcacuucccccgcgaggggguguucgucuccaacggcacccacugguucgugacgcagcggaacuucuacgagccgcagaucaucaccaccgacaacaccuucgugagcggcaacugcgacgucgugaucgggaucgugaacaacacggucuacgacccccugcagcccgagcuggacuccuucaaggaggagcucgacaaguacuucaagaaccacaccagccccgacguggaccugggcgacaucuccgggaucaacgccagcguggucaacauccagaaggagaucgaccgccugaacgagguggccaagaaccucaacgagucccugaucgaccugcaggagcucggcaaguacgagcaguacaucaaguggccgugguacaucuggcugggcuucaucgccgggcugaucgccaucgugauggucaccaucaugcucugcugcaugaccagcugcugcuccugccugaagggcugcugcagcugcggguccugcugcaaguucgacgaggacgacagcgagcccgugcugaagggcgugaagcuccacuacacgugaggacuagucccuguucccagagcccacuuuuuuuucuuuuuuugaaauaaaauagccugucuuucagaucucaaaggcucuuuucagagccaccaaaaaaaaaaaaaaaaaaaaaaaaaaaaaaaaaaaaaaaaaaaaaaaaaaaaaaaaaaaaaaaaaaaaaaaaaaaaaaaaaaaaaaaaaaaaaaaaaaaaa

SEQ ID NO: 12314 - RNA, 4094 nt, Artificial Sequence
  SARS-CoV-2/France/HF2496/2020__EPI_ISL_418231 spike protein mRNA gc (1-1273)
aggagagucccgcagucggcguccagcggcucugcuuguucgugugugugucguugcaggccuuauucaagcuuaccauguucguguuccugguccuccugccccuggugagcucccagugcgugaaccucaccacccgcacgcagcugccgcccgccuacaccaacagcuucacccggggcgucuacuaccccgacaagguguuccgcuccagcgugcugcacuccacccaggaccucuuccugcccuucuucagcaacgucacgugguuccacgccauccacguguccgggaccaacggcaccaagcgguucgacaacccggugcugcccuucaacgacggggucuacuucgcgagcaccgagaaguccaacaucauccgcggcuggaucuucgggacgacccucgacagcaagacccagucccugcugaucgugaacaacgccaccaacguggucaucaaggugugcgaguuccaguucugcaacgaccccuuccucggcguguacuaccacaagaacaacaagagcuggauggaguccgaguuccgggucuacagcuccgccaacaacugcacguucgaguacgugagccagcccuuccugauggaccuggagggcaagcaggggaacuucaagaaccuccgcgaguucguguucaagaacaucgacggcuacuucaagaucuacuccaagcacaccccgaucaaccugguccgggaccugccccagggguucagcgcccucgagccccugguggaccugcccaucggcaucaacaucacccgcuuccagacccuccuggcccugcaccgguccuaccucacgccgggggacagcagcuccggcuggaccgcgggcgccgccgccuacuacgugggguaccugcagccccgcaccuuccugcucaaguacaacgagaacggcaccaucacggacgcggucgacugcgcccuggacccccugagcgagaccaagugcacccucaaguccuucaccguggagaaggggaucuaccagacgagcaacuuccgggugcagcccaccgaguccaucguccgcuucccgaacaucaccaaccugugccccuucggcgagguguucaacgccacccgguucgccagcgucuacgccuggaaccgcaagcggaucuccaacugcguggcggacuacagcgugcuguacaacuccgccagcuucuccacguucaagugcuacggcgucagccccaccaagcucaacgaccugugcuucaccaacguguacgccgacuccuucgugauccgcggggacgagguccggcagaucgcccccggccagaccgggaagaucgccgacuacaacuacaagcugccggacgacuucacgggcugcgugaucgcguggaacagcaacaaccucgacuccaaggucgggggcaacuacaacuaccuguaccgccuguuccgcaagagcaaccucaagcccuucgagcgggacaucuccaccgagaucuaccaggccggcagcacccccugcaacgggguggagggcuucaacugcuacuucccccugcaguccuacggguuccagccgaccaacggcgugggguaccagcccuaccggguggucgugcugagcuucgagcuccugcacgcccccgccacggugugcggccccaagaaguccaccaaccuggucaagaacaagugcgugaacuucaacuucaacggccucaccgggaccggcgugcugaccgagagcaacaagaaguuccugccguuccagcaguucgggcgcgacaucgccgacacgaccgacgcgguccgcgacccccagacccuggagauccucgacaucacccccugcagcuucggcgggguguccgugaucacgccgggcaccaacaccagcaaccaggucgccgugcuguaccagggcgugaacugcaccgagguccccguggccauccacgccgaccagcugacgcccaccuggcggguguacuccaccgggagcaacgucuuccagacccgcgccggcugccucaucggggcggagcacgugaacaacuccuacgagugcgacauccccaucggcgccggcaucugcgccagcuaccagacgcagaccaacuccccgcggcgcgcccggagcguggcgucccagagcaucaucgccuacaccaugucccugggggccgagaacagcgucgccuacuccaacaacagcaucgccauccccaccaacuucacgaucuccgugaccaccgagauccugcccgugagcaugaccaagacgagcgucgacugcaccauguacaucugcggcgacuccaccgagugcagcaaccuccugcugcaguacggguccuucugcacccagcucaaccgcgcgcugacgggcaucgccguggagcaggacaagaacacccaggagguguucgcccaggucaagcagaucuacaagacgcccccgaucaaggacuucgggggcuucaacuucagccagauccugcccgaccccuccaagcccagcaagcgguccuucaucgaggaccuccuguucaacaaggugacccuggccgacgccggcuucaucaagcaguacggggacugccucggcgacaucguggcgcgcgaccugaucugcgcccagaaguucaacgggcugaccguccucccgccccugcugaccgacgagaugaucgcccaguacaccagcgcccuccuggccggcaccaucacguccggguggaccuucggcgcgggcgccgcccugcagauccccuucgccaugcagauggcguaccgguucaacgggaucggcgugacccagaacgugcucuacgagaaccagaagcugaucgccaaccaguucaacagcgccaucgggaagauccaggacucccugagcuccaccgccagcgcccucggcaagcugcaggacgucgugaaccagaacgcgcaggcccugaacacgcucgugaagcagcuguccagcaacuucggggccaucuccagcguccugaacgacauccucucccgccuggacaagguggaggccgaggugcagaucgaccggcugaucaccggccgccuccagagccugcagaccuacgucacccagcagcugauccgggccgcggagauccgcgccagcgccaaccucgccgccaccaagauguccgagugcgugcugggccagagcaagcggguggacuucugcgggaagggcuaccaccugauguccuucccccagagcgcgccgcacggggucguguuccuccacgucacguacgugcccgcccaggagaagaacuucaccaccgcccccgccaucugccacgacggcaaggcgcacuucccccgcgaggggguguucgucuccaacggcacccacugguucgugacgcagcggaacuucuacgagccgcagaucaucaccaccgacaacaccuucgugagcggcaacugcgacgucgugaucgggaucgugaacaacacggucuacgacccccugcagcccgagcuggacuccuucaaggaggagcucgacaaguacuucaagaaccacaccagccccgacguggaccugggcgacaucuccgggaucaacgccagcguggucaacauccagaaggagaucgaccgccugaacgagguggccaagaaccucaacgagucccugaucgaccugcaggagcucggcaaguacgagcaguacaucaaguggccgugguacaucuggcugggcuucaucgccgggcugaucgccaucgugauggucaccaucaugcucugcugcaugaccagcugcugcuccugccugaagggcugcugcagcugcggguccugcugcaaguucgacgaggacgacagcgagcccgugcugaagggcgugaagcuccacuacacgugaggacuagucccuguucccagagcccacuuuuuuuucuuuuuuugaaauaaaauagccugucuuucagaucucaaaggcucuuuucagagccaccaaaaaaaaaaaaaaaaaaaaaaaaaaaaaaaaaaaaaaaaaaaaaaaaaaaaaaaaaaaaaaaaaaaaaaaaaaaaaaaaaaaaaaaaaaaaaaaaaaaaa

SEQ ID NO: 12315 - RNA, 4094 nt, Artificial Sequence
  SARS-CoV-2/USA/WA-UW291/2020__EPI_ISL_418076 spike protein mRNA gc (1-1273)
aggagagucccgcagucggcguccagcggcucugcuuguucgugugugugucguugcaggccuuauucaagcuuaccauguucguguuccugguccuccugccccuggugagcucccagugcgugaaccucaccacccgcacgcagcugccgcccgccuacaccaacagcuucacccggggcgucuacuaccccgacaagguguuccgcuccagcgugcugcacuccacccaggaccucuuccugcccuucuucagcaacgucacgugguuccacgccauccacguguccgggaccaacggcaccaagcgguucgacaacccggugcugcccuucaacgacggggucuacuucgcgagcaccgagaaguccaacaucauccgcggcuggaucuucgggacgacccucgacagcaagacccagucccugcugaucgugaacaacgccaccaacguggucaucaaggugugcgaguuccaguucugcaacgaccccuuccucggcguguacuaccacaagaacaacaagagcuggauggaguccgaguuccgggucuacagcuccgccaacaacugcacguucgaguacgugagccagcccuuccugauggaccuggagggcaagcaggggaacuucaagaaccuccgcgaguucguguucaagaacaucgacggcuacuucaagaucuacuccaagcacaccccgaucaaccugguccgggaccugccccagggguucagcgcccucgagccccugguggaccugcccaucggcaucaacaucacccgcuuccagacccuccuggcccugcaccgguccuaccucacgccgggggacagcagcuccggcuggaccgcgggcgccgccgccuacuacgugggguaccugcagccccgcaccuuccugcucaaguacaacgagaacggcaccaucacggacgcggucgacugcgcccuggacccccugagcgagaccaagugcacccucaaguccuucaccguggagaaggggaucuaccagacgagcaacuuccgggugcagcccaccgaguccaucguccgcuucccgaacaucaccaaccugugccccuucggcgagguguucaacgccacccgguucgccagcgucuacgccuggaaccgcaagcggaucuccaacugcguggcggacuacagcgugcuguacaacuccgccagcuucuccacguucaagugcuacggcgucagccccaccaagcucaacgaccugugcuucaccaacguguacgccgacuccuucgugauccgcggggacgagguccggcagaucgcccccggccagaccgggaagaucgccgacuacaacuacaagcugccggacgacuucacgggcugcgugaucgcguggaacagcaacaaccucgacuccaaggucgggggcaacuacaacuaccuguaccgccuguuccgcaagagcaaccucaagcccuucgagcgggacaucuccaccgagaucuaccaggccggcagcacccccugcaacgggguggagggcuucaacugcuacuucccccugcaguccuacggguuccagccgaccaacggcgugggguaccagcccuaccggguggucgugcugagcuucgagcuccugcacgcccccgccacggugugcggccccaagaaguccaccaaccuggucaagaacaagugcgugaacuucaacuucaacggccucaccgggaccggcgugcugaccgagagcaacaagaaguuccugccguuccagcaguucgggcgcgacaucgccgacacgaccgacgcgguccgcgacccccagacccuggagauccucgacaucacccccugcagcuucggcgggguguccgugaucacgccgggcaccaacaccagcaaccaggucgccgugcuguaccagggcgugaacugcaccgagguccccguggccauccacgccgaccagcugacgcccaccuggcggguguacuccaccgggagcaacgucuuccagacccgcgccggcugccucaucggggcggagcacgugaacaacuccuacgagugcgacauccccaucggcgccggcaucugcgccagcuaccagacgcagaccaacuccccgcggcgcgcccggagcguggcgucccagagcaucaucgccuacaccaugucccugggggccgagaacagcgucgccuacuccaacaacagcaucgccauccccaccaacuucacgaucuccgugaccaccgagauccugcccgugagcaugaccaagacgagcgucgacugcaccauguacaucugcggcgacuccaccgagugcagcaaccuccugcugcaguacggguccuucugcacccagcucaaccgcgcgcugacgggcaucgccguggagcaggacaagaacacccaggagguguucgcccaggucaagcagaucuacaagacgcccccgaucaaggacuucgggggcuucaacuucagccagauccugcccgaccccuccaagcccagcaagcgguccuucaucgaggaccuccuguucaacaaggugacccuggccgacgccggcuucaucaagcaguacggggacugccucggcgacaucgcggcccgcgaccugaucugcgcccagaaguucaacgggcugaccgugcucccgccccugcugaccgacgagaugaucgcccaguacaccagcgcccuccuggcgggcaccaucacguccggguggaccuucggcgccggcgccgcccugcagauccccuucgcgaugcagauggccuaccgguucaacgggaucggcgucacccagaacgugcucuacgagaaccagaagcugaucgccaaccaguucaacagcgccaucgggaagauccaguacucccugagcuccaccgccagcgcgcucggcaagcugcaggacguggucaaccagaacgcccaggcccugaacacgcucgugaagcagcuguccagcaacuucggggccaucuccagcgugcugaacgacauccucucccgccuggacaaggucgaggccgaggugcagaucgaccggcugaucaccggccgccuccagagccugcagaccuacgugacccagcagcugauccgggcggccgagauccgcgccagcgccaaccucgccgcgaccaagauguccgagugcguccugggccagagcaagcggguggacuucugcgggaagggcuaccaccugauguccuucccccagagcgccccgcacgggguggucuuccuccacgugacguacguccccgcccaggagaagaacuucaccaccgcccccgcgaucugccacgacggcaaggcccacuucccccgcgaggggguguucguguccaacggcacccacugguucgucacgcagcggaacuucuacgagccgcagaucaucaccaccgacaacaccuucgugagcggcaacugcgacguggucaucgggaucgugaacaacacgguguacgacccccugcagcccgagcuggacuccuucaaggaggagcucgacaaguacuucaagaaccacaccagccccgacgucgaccugggcgacaucuccgggaucaacgccagcguggugaacauccagaaggagaucgaccgccugaacgaggucgccaagaaccucaacgagucccugaucgaccugcaggagcucggcaaguacgagcaguacaucaaguggccgugguacaucuggcugggcuucaucgccgggcugaucgcgaucgugauggugaccaucaugcucugcugcaugaccagcugcugcuccugccugaagggcugcugcagcugcggguccugcugcaaguucgacgaggacgacagcgagcccguccugaagggcgugaagcuccacuacacgugaggacuagucccuguucccagagcccacuuuuuuuucuuuuuuugaaauaaaauagccugucuuucagaucucaaaggcucuuuucagagccaccaaaaaaaaaaaaaaaaaaaaaaaaaaaaaaaaaaaaaaaaaaaaaaaaaaaaaaaaaaaaaaaaaaaaaaaaaaaaaaaaaaaaaaaaaaaaaaaaaaaaa

SEQ ID NO: 12316 - RNA, 4094 nt, Artificial Sequence
  SARS-CoV-2/Portugal/PT0034/2020__EPI_ISL_418019 spike protein mRNA gc (1-1273)
aggagagucccgcagucggcguccagcggcucugcuuguucgugugugugucguugcaggccuuauucaagcuuaccauguucguguuccugguccuccugccccuggugagcucccagugcgugaaccucaccacccgcacgcagcugccgcccgccuacaccaacagcuucacccggggcgucuacuaccccgacaagguguuccgcuccagcgugcugcacuccacccaggaccucuuccugcccuucuucagcaacgucacgugguuccacgccauccacguguccgggaccaacggcaccaagcgguucgacaacccggugcugcccuucaacgacggggucuacuucgcgagcaccgagaaguccaacaucauccgcggcuggaucuucgggacgacccucgacagcaagacccagucccugcugaucgugaacaacgccaccaacguggucaucaaggugugcgaguuccaguucugcaacgaccccuuccucggcguguacuaccacaagaacaacaagagcuggauggaguccgaguuccgggucuacagcuccgccaacaacugcacguucgaguacgugagccagcccuuccugauggaccuggagggcaagcaggggaacuucaagaaccuccgcgaguucguguucaagaacaucgacggcuacuucaagaucuacuccaagcacaccccgaucaaccugguccgggaccugccccagggguucagcgcccucgagccccugguggaccugcccaucggcaucaacaucacccgcuuccagacccuccuggcccugcaccgguccuaccucacgccgggggacagcagcuccggcuggaccgcgggcgccgccgccuacuacgugggguaccugcagccccgcaccuuccugcucaaguacaacgagaacggcaccaucacggacgcggucgacugcgcccuggacccccugagcgagaccaagugcacccucaaguccuucaccguggagaaggggaucuaccagacgagcaacuuccgggugcagcccaccgaguccaucguccgcuucccgaacaucaccaaccugugccccuucggcgagguguucaacgccacccgguucgccagcgucuacgccuggaaccgcaagcggaucuccaacugcguggcggacuacagcgugcuguacaacuccgccagcuucuccacguucaagugcuacggcgucagccccaccaagcucaacgaccugugcuucaccaacguguacgccgacuccuucgugauccgcggggacgagguccggcagaucgcccccggccagaccgggaagaucgccgacuacaacuacaagcugccggacgacuucacgggcugcgugaucgcguggaacagcaacaaccucgacuccaaggucgggggcaacuacaacuaccuguaccgccuguuccgcaagagcaaccucaagcccuucgagcgggacaucuccaccgagaucuaccaggccggcagcacccccugcaacgggguggagggcuucaacugcuacuucccccugcaguccuacggguuccagccgaccaacggcgugggguaccagcccuaccggguggucgugcugagcuucgagcuccugcacgcccccgccacggugugcggccccaagaaguccaccaaccuggucaagaacaagugcgugaacuucaacuucaacggccucaccgggaccggcgugcugaccgagagcaacaagaaguuccugccguuccagcaguucgggcgcgacaucgccgacacgaccgacgcgguccgcgacccccagacccuggagauccucgacaucacccccugcagcuucggcgggguguccgugaucacgccgggcaccaacaccagcaaccaggucgccgugcuguaccagggcgugaacugcaccgagguccccguggccauccacgccgaccagcugacgcccaccuggcggguguacuccaccgggagcaacgucuuccagacccgcgccggcugccucaucggggcggagcacgugaacaacuccuacgagugcgacauccccaucggcgccggcaucugcgccagcuaccagacgcagaccaacuccccgcggcgcgcccggagcguggcgucccagagcaucaucgccuacaccaugucccugggggccgagaacagcgucgccuacuccaacaacagcaucgccauccccaccaacuucacgaucuccgugaccaccgagauccugcccgugagcaugaccaagacgagcgucgacugcaccauguacaucugcggcgacuccaccgagugcagcaaccuccugcugcaguacggguccuucugcacccagcucaaccgcgcgcugacgggcaucgccguggagcaggacaagaacacccaggagguguucgcccaggucaagcagaucuacaagacgcccccgaucaaggacuucgggggcuucaacuucagccagauccugcccgaccccuccaagcccagcaagcgguccuucaucgaggaccuccuguucaacaaggugacccuggccgacgccggcuucaucaagcaguacggggacugccucggcgacaucgcggcccgcgaccugaucugcgcccagaaguucaacgggcugaccgugcucccgccccugcugaccgacgagaugaucgcccaguacaccagcgcccuccuggcgggcaccaucacguccggguggaccuucggcgccggcgccgcccugcagauccccuucgcgaugcagauggccuaccgguucaacgggaucggcgucacccagaacgugcucuacgagaaccagaagcugaucgccaaccaguucaacagcgccaucgggaagauccaggacucccugagcuccaccgccagcgcgcucggcaagcugcaggacguggucaaccagaacgcccaggcccugaacacgcucgugaagcagcuguccagcaacuucggggccaucuccagcgugcugaacgacauccucucccgccuggacaaggucgaggccgaggugcagaucgaccggcugaucaccggccgccuccagagccugcagaccuacgugacccagcagcugauccgggcggccgagauccgcgccagcgccaaccucgccgcgaccaagauguccgagugcguccugggccagagcaagcggguggacuucugcgggaagggcuaccaccugauguccuucccccagagcgccccgcacgggguggucuuccuccacgugacguacguccccgcccaggagaagaacuucaccaccgcccccgcgaucugccacgacggcaaggcccacuucccccgcgaggggguguucguguccaacggcacccacugguucgucacgcagcggaacuucuacgagccgcagaucaucaccaccgacaacaccuucgugagcggcaacugcgacguggucaucgggaucgugaacaacacgguguacgacccccugcagcccgagcuggacuccuucaaggaggagcucgacaaguacuucaagaaccacaccagccccgacgucgaccugggcgacaucuccgggaucaacgccagcguggugaacauccagaaggagaucgaccgccugaacgaggucgccaagaaccucaacgagucccugaucgaccugcaggagcucggcaaguacgagcaguacaucaaguggccgugguacaucuggcugggcuucaucgccgggcugaucgcgaucgugauggugaccaucaugcucugcugcaucaccagcugcugcuccugccugaagggcugcugcagcugcggguccugcugcaaguucgacgaggacgacagcgagcccguccugaagggcgugaagcuccacuacacgugaggacuagucccuguucccagagcccacuuuuuuuucuuuuuuugaaauaaaauagccugucuuucagaucucaaaggcucuuuucagagccaccaaaaaaaaaaaaaaaaaaaaaaaaaaaaaaaaaaaaaaaaaaaaaaaaaaaaaaaaaaaaaaaaaaaaaaaaaaaaaaaaaaaaaaaaaaaaaaaaaaaaa

SEQ ID NO: 12317 - RNA, 4094 nt, Artificial Sequence
  SARS-CoV-2/Iceland/202/2020__EPI_ISL_417750 spike protein mRNA gc (1-1273)
aggagagucccgcagucggcguccagcggcucugcuuguucgugugugugucguugcaggccuuauucaagcuuaccauguucguguuccugguccuccugccccuggugagcucccagugcgugaaccucaccacccgcacgcagcugccgcccgccuacaccaacagcuucacccggggcgucuacuaccccgacaagguguuccgcuccagcgugcugcacuccacccaggaccucuuccugcccuucuucagcaacgucacgugguuccacgccauccacguguccgggaccaacggcaccaagcgguucgacaacccggugcugcccuucaacgacggggucuacuucgcgagcaccgagaaguccaacaucauccgcggcuggaucuucgggacgacccucgacagcaagacccagucccugcugaucgugaacaacgccaccaacguggucaucaaggugugcgaguuccaguucugcaacgaccccuuccucggcguguacuaccacaagaacaacaagagcuggauggaguccgaguuccgggucuacagcuccgccaacaacugcacguucgaguacgugagccagcccuuccugauggaccuggagggcaagcaggggaacuucaagaaccuccgcgaguucguguucaagaacaucgacggcuacuucaagaucuacuccaagcacaccccgaucaaccugguccgggaccugccccagggguucagcgcccucgagccccugguggaccugcccaucggcaucaacaucacccgcuuccagacccuccuggcccugcaccgguccuaccucacgccgggggacagcagcuccggcuggaccgcgggcgccgccgccuacuacgugggguaccugcagccccgcaccuuccugcucaaguacaacgagaacggcaccaucacggacgcggucgacugcgcccuggacccccugagcgagaccaagugcacccucaaguccuucaccguggagaaggggaucuaccagacgagcaacuuccgggugcagcccaccgaguccaucguccgcuucccgaacaucaccaaccugugccccuucggcgagguguucaacgccacccgguucgccagcgucuacgccuggaaccgcaagcggaucuccaacugcguggcggacuacagcgugcuguacaacuccgccagcuucuccacguucaagugcuacggcgucagccccaccaagcucaacgaccugugcuucaccaacguguacgccgacuccuucgugauccgcggggacgagguccggcagaucgcccccggccagaccgggaagaucgccgacuacaacuacaagcugccggacgacuucacgggcugcgugaucgcguggaacagcaacaaccucgacuccaaggucgggggcaacuacaacuaccuguaccgccuguuccgcaagagcaaccucaagcccuucgagcgggacaucuccaccgagaucuaccaggccggcagcacccccugcaacgggguggagggcuucaacugcuacuucccccugcaguccuacggguuccagccgaccaacggcgugggguaccagcccuaccggguggucgugcugagcuucgagcuccugcacgcccccgccacggugugcggccccaagaaguccaccaaccuggucaagaacaagugcgugaacuucaacuucaacggccucaccgggaccggcgugcugaccgagagcaacaagaaguuccugccguuccagcaguucgggcgcgacaucgccgacacgaccgacgcgguccgcgacccccagacccuggagauccucgacaucacccccugcagcuucggcgggguguccgugaucacgccgggcaccaacaccagcaaccaggucgccgugcuguaccaggacgugaacugcaccgagguccccguggccauccacgccgaccagcugacgcccaccuggcggguguacuccaccggcagcaacgucuuccagacccgcgccgggugccucaucggcgcggagcacgugaacaacuccuacgagugcgacauccccaucggggccggcaucugcgccagcuaccagacgcagaccaacuccccgcggcgcgcccggagcguggcgucccagagcaucaucgccuacaccaugucccugggcgccgagaacagcgucgccuacuccaacaacagcaucgccauccccaccaacuucacgaucuccgugaccaccgagauccugcccgugagcaugaccaagacgagcgucgacugcaccauguacaucugcggggacuccaccgagugcagcaaccuccugcugcaguacggcuccuucugcacccagcucaaccgcgcgcugacggggaucgccguggagcaggacaagaacacccaggagguguucgcccaggucaagcagaucuacaagacgcccccgaucaaggacuucggcggguucaacuucagccagauccugcccgaccccuccaagcccagcaagcgguccuucaucgaggaccuccuguucaacaaggugacccuggccgacgccggcuucaucaagcaguacggcgacugccucggggacaucgcggcccgcgaccugaucugcgcccagaaguucaacggccugaccgugcucccgccccugcugaccgacgagaugaucgcccaguacaccagcgcccuccuggcggggaccaucacguccggcuggaccuucggggccggcgccgcccugcagauccccuucgcgaugcagauggccuaccgguucaacggcaucggggucacccagaacgugcucuacgagaaccagaagcugaucgccaaccaguucaacagcgccaucggcaagauccaggacucccugagcuccaccgccagcgcgcucgggaagcugcaggacguggucaaccagaacgcccaggcccugaacacgcucgugaagcagcuguccagcaacuucggcgccaucuccagcgugcugaacgacauccucucccgccuggacaaggucgaggccgaggugcagaucgaccggcugaucaccgggcgccuccagagccugcagaccuacgugacccagcagcugauccgggcggccgagauccgcgccagcgccaaccucgccgcgaccaagauguccgagugcguccugggccagagcaagcggguggacuucugcggcaagggguaccaccugauguccuucccccagagcgccccgcacggcguggucuuccuccacgugacguacguccccgcccaggagaagaacuucaccaccgcccccgcgaucugccacgacgggaaggcccacuucccccgcgagggcguguucguguccaacgggacccacugguucgucacgcagcggaacuucuacgagccgcagaucaucaccaccgacaacaccuucgugagcggcaacugcgacguggucaucggcaucgugaacaacacgguguacgacccccugcagcccgagcuggacuccuucaaggaggagcucgacaaguacuucaagaaccacaccagccccgacgucgaccugggggacaucccgggcaucaacgccuccguggugaacauccagaaggagaucgaccgccugaacgaggucgccaagaaccucaacgagagccugaucgaccugcaggagcucgggaaguacgagcaguacaucaaguggcccugguacaucuggcugggcuucaucgccggccugaucgcgaucgugauggugaccaucaugcucugcugcaugaccuccugcugcagcugccugaaggggugcugcuccugcggcagcugcugcaaguucgacgaggacgacuccgagcccguccugaagggggugaagcuccacuacacgugaggacuagucccuguucccagagcccacuuuuuuuucuuuuuuugaaauaaaauagccugucuuucagaucucaaaggcucuuuucagagccaccaaaaaaaaaaaaaaaaaaaaaaaaaaaaaaaaaaaaaaaaaaaaaaaaaaaaaaaaaaaaaaaaaaaaaaaaaaaaaaaaaaaaaaaaaaaaaaaaaaaaa

SEQ ID NO: 12318 - RNA, 4094 nt, Artificial Sequence
  SARS-CoV-2/USA/WA-UW261/2020__EPI_ISL_418046 spike protein mRNA gc (1-1273)
aggagagucccgcagucggcguccagcggcucugcuuguucgugugugugucguugcaggccuuauucaagcuuaccauguucguguuccugguccuccugccccuggugagcucccagugcgugaaccucaccacccgcacgcagcugccgcccgccuacaccaacagcuucacccggggcgucuacuaccccgacaagguguuccgcuccagcgugcugcacuccacccaggaccucuuccugcccuucuucagcaacgucacgugguuccacgccauccacguguccgggaccaacggcaccaagcgguucgacaacccggugcugcccuucaacgacggggucuacuucgcgagcaccgagaaguccaacaucauccgcggcuggaucuucgggacgacccucgacagcaagacccagucccugcugaucgugaacaacgccaccaacguggucaucaaggugugcgaguuccaguucugcaacgaccccuuccucggcguguacuaccacaagaacaacaagagcuggauggaguccgaguuccgggucuacagcuccgccaacaacugcacguucgaguacgugagccagcccuuccugauggaccuggagggcaagcaggggaacuucaagaaccuccgcgaguucguguucaagaacaucgacggcuacuucaagaucuacuccaagcacaccccgaucaaccugguccgggaccugccccagggguucagcgcccucgagccccugguggaccugcccaucggcaucaacaucacccgcuuccagacccuccuggcccugcaccgguccuaccucacgccgggggacagcagcuccggcuggaccgcgggcgccgccgccuacuacgugggguaccugcagccccgcaccuuccugcucaaguacaacgagaacggcaccaucacggacgcggucgacugcgcccuggacccccugagcgagaccaagugcacccucaaguccuucaccguggagaaggggaucuaccagacgagcaacuuccgggugcagcccaccgaguccaucguccgcuucccgaacaucaccaaccugugccccuucggcgagguguucaacgccacccgguucacgagcgucuacgccuggaaccgcaagcggaucuccaacugcguggccgacuacagcgugcuguacaacuccgcgagcuucuccaccuucaagugcuacggcgucagccccaccaagcucaacgaccugugcuucaccaacguguacgccgacuccuucgugauccgcggggacgagguccggcagaucgcccccggccagacggggaagaucgccgacuacaacuacaagcugccggacgacuucaccggcugcgugaucgccuggaacagcaacaaccucgacuccaaggucgggggcaacuacaacuaccuguaccgccuguuccgcaagagcaaccucaagcccuucgagcgggacaucuccaccgagaucuaccaggcgggcagcacccccugcaacgggguggagggcuucaacugcuacuucccccugcaguccuacggguuccagccgacgaacggcgugggguaccagcccuaccggguggucgugcugagcuucgagcuccugcacgcccccgccaccgugugcggccccaagaaguccaccaaccuggucaagaacaagugcgugaacuucaacuucaacggccucaccgggaccggcgugcugacggagagcaacaagaaguuccugccguuccagcaguucgggcgcgacaucgccgacaccaccgacgccguccgcgacccccagacccuggagauccucgacaucacgcccugcagcuucggcgggguguccgugaucaccccgggcaccaacaccagcaaccaggucgcggugcuguaccaggacgugaacugcacggagguccccguggccauccacgccgaccagcugacccccaccuggcggguguacuccaccggcagcaacgucuuccagacgcgcgccgggugccucaucggcgccgagcacgugaacaacuccuacgagugcgacauccccaucggggcgggcaucugcgccagcuaccagacccagaccaacuccccgcggcgcgcccggagcguggccucccagagcaucaucgcguacaccaugucccugggcgccgagaacagcgucgccuacuccaacaacagcaucgccauccccacgaacuucaccaucuccgugaccaccgagauccugcccgugagcaugacgaagaccagcgucgacugcaccauguacaucugcggggacuccaccgagugcagcaaccuccugcugcaguacggcuccuucugcacgcagcucaaccgcgcccugaccgggaucgcgguggagcaggacaagaacacccaggagguguucgcccaggucaagcagaucuacaagacgcccccgaucaaggacuucggcggguucaacuucagccagauccugcccgaccccuccaagcccagcaagcgguccuucaucgaggaccuccuguucaacaaggugacccuggccgacgccggcuucaucaagcaguacggcgacugccucggggacaucgccgcgcgcgaccugaucugcgcccagaaguucaacggccugaccgugcucccgccccugcugaccgacgagaugaucgcccaguacaccagcgcccuccuggccgggacgaucaccuccggcuggaccuucggggcgggcgccgcccugcagauccccuucgccaugcagauggcguaccgguucaacggcaucggggucacccagaacgugcucuacgagaaccagaagcugaucgccaaccaguucaacagcgccaucggcaagauccaggacucccugagcuccacggccagcgcccucgggaagcugcaggacguggucaaccagaacgcgcaggcccugaacacccucgugaagcagcuguccagcaacuucggcgccaucuccagcgugcugaacgacauccucucccgccuggacaaggucgaggccgaggugcagaucgaccggcugaucaccgggcgccuccagagccugcagaccuacgugacccagcagcugauccgggccgcggagauccgcgccagcgccaaccucgccgccacgaagauguccgagugcguccugggccagagcaagcggguggacuucugcggcaagggguaccaccugauguccuucccccagagcgcgccgcacggcguggucuuccuccacgugaccuacguccccgcccaggagaagaacuucaccaccgcccccgccaucugccacgacgggaaggcgcacuucccccgcgagggcguguucguguccaacgggacgcacugguucgucacccagcggaacuucuacgagccgcagaucaucaccaccgacaacacguucgugagcggcaacugcgacguggucaucggcaucgugaacaacaccguguacgacccccugcagcccgagcuggacuccuucaaggaggagcucgacaaguacuucaagaaccacaccagccccgacgucgaccugggggacaucuccggcaucaacgccagcguggugaacauccagaaggagaucgaccgccugaacgaggucgccaagaaccucaacgagucccugaucgaccugcaggagcucgggaaguacgagcaguacaucaaguggccgugguacaucuggcugggcuucaucgccggccugaucgccaucgugauggugaccaucaugcucugcugcaugacgagcugcugcuccugccugaaggggugcugcagcugcggcuccugcugcaaguucgacgaggacgacagcgagcccguccugaagggggugaagcuccacuacaccugaggacuagucccuguucccagagcccacuuuuuuuucuuuuuuugaaauaaaauagccugucuuucagaucucaaaggcucuuuucagagccaccaaaaaaaaaaaaaaaaaaaaaaaaaaaaaaaaaaaaaaaaaaaaaaaaaaaaaaaaaaaaaaaaaaaaaaaaaaaaaaaaaaaaaaaaaaaaaaaaaaaaa

SEQ ID NO: 12319 - RNA, 4094 nt, Artificial Sequence
  SARS-CoV-2/Portugal/PT0035/2020__EPI_ISL_418020 spike protein mRNA gc (1-1273)
aggagagucccgcagucggcguccagcggcucugcuuguucgugugugugucguugcaggccuuauucaagcuuaccauguucguguuccugguccuccugccccuggugagcucccagugcgugaaccucaccacccgcacgcagcugccgcccgccuacaccaacagcuucacccggggcgucuacuaccccgacaagguguuccgcuccagcgugcugcacuccacccaggaccucuuccugcccuucuucagcaacgucacgugguuccacgccauccacguguccgggaccaacggcaccaagcgguucgacaacccggugcugcccuucaacgacggggucuacuucgcgagcaccgagaaguccaacaucauccgcggcuggaucuucgggacgacccucgacagcaagacccagucccugcugaucgugaacaacgccaccaacguggucaucaaggugugcgaguuccaguucugcaacgaccccuuccucggcguguacuaccacaagaacaacaagagcuggauggaguccgaguuccgggucuacagcuccgccaacaacugcacguucgaguacgugagccagcccuuccugauggaccuggagggcaagcaggggaacuucaagaaccuccgcgaguucguguucaagaacaucgacggcuacuucaagaucuacuccaagcacaccccgaucaaccugguccgggaccugccccagggguucagcgcccucgagccccugguggaccugcccaucggcaucaacaucacccgcuuccagacccuccuggcccugcaccgguccuaccucacgccgggggacagcagcuccggcuggaccgcgggcgccgccgccuacuacgugggguaccugcagccccgcaccuuccugcucaaguacaacgagaacggcaccaucacggacgcggucgacugcgcccuggacccccugagcgagaccaagugcacccucaaguccuucaccguggagaaggggaucuaccagacgagcaacuuccgggugcagcccaccgaguccaucguccgcuucccgaacaucaccaaccugugccccuucggcgagguguucaacgccacccgguucgccagcgucuacgccuggaaccgcaagcggaucuccaacugcguggcggacuacagcgugcuguacaacuccgccagcuucuccacguucaagugcuacggcgucagccccaccaagcucaacgaccugugcuucaccaacguguacgccgacuccuucgugauccgcggggacgagguccggcagaucgcccccggccagaccgggaagaucgccgacuacaacuacaagcugccggacgacuucacgggcugcgugaucgcguggaacagcaacaaccucgacuccaaggucgggggcaacuacaacuaccuguaccgccuguuccgcaagagcaaccucaagcccuucgagcgggacaucuccaccgagaucuaccaggccggcagcacccccugcaacgggguggagggcuucaacugcuacuucccccugcaguccuacggguuccagccgaccaacggcgugggguaccagcccuaccggguggucgugcugagcuucgagcuccugcacgcccccgccacggugugcggccccaagaaguccaccaaccuggucaagaacaagugcgugaacuucaacuucaacggccucaccgggaccggcgugcugaccgagagcaacaagaaguuccugccguuccagcaguucgggcgcgacaucgccgacacgaccgacgcgguccgcgacccccagacccuggagauccucgacaucacccccugcagcuucggcgggguguccgugaucacgccgggcaccaacaccagcaaccaggucgccgugcuguaccaggacgugaacugcaccgagguccccguggccauccacgccgaccagcugacgcccaccuggcggguguacuccaccggcagcaacgucuuccagacccgcgccgggugccucaucggcgcggagcacgugaacaacuccuacgagugcgacauccccaucggggccggcaucugcgccagcuaccagacgcagaccaacuccccgcggcgcgcccggagcguggcgucccagagcaucaucgccuacaccaugucccugggcgccgagaacagcgucgccuacuccaacaacagcaucgccauccccaccaacuucacgaucuccgugaccaccgagauccugcccgugagcaugaccaagacgagcgucgacugcaccauguacaucugcggggacuccaccgagugcagcaaccuccugcugcaguacggcuccuucugcacccagcucaaccgcgcgcugacggggaucgccguggagcaggacaagaacacccaggagguguucgcccaggucaagcagaucuacaagacgcccccgaucaaggacuucggcggguucaacuucagccagauccugcccgaccccuccaagcccagcaagcgguccuucaucgaggaccuccuguucaacaaggugacccuggccgacgccggcuucaucaagcaguacggcgacugccucggggacaucagcgcgcgcgaccugaucugcgcccagaaguucaacggccugaccgugcucccgccccugcugaccgacgagaugaucgcccaguacaccuccgcccuccuggccgggaccaucacgagcggcuggaccuucggggcgggcgccgcccugcagauccccuucgccaugcagauggcguaccgguucaacggcaucggggucacccagaacgugcucuacgagaaccagaagcugaucgccaaccaguucaacuccgccaucggcaagauccaggacagccuguccagcaccgccuccgcccucgggaagcugcaggacguggucaaccagaacgcgcaggcccugaacacgcucgugaagcagcugagcuccaacuucggcgccaucagcuccgugcugaacgacauccucagccgccuggacaaggucgaggccgaggugcagaucgaccggcugaucaccgggcgccuccagagccugcagaccuacgugacccagcagcugauccgggccgcggagauccgcgccuccgccaaccucgccgccaccaagaugagcgagugcguccugggccaguccaagcggguggacuucugcggcaagggguaccaccugaugagcuucccccaguccgcgccgcacggcguggucuuccuccacgugacguacguccccgcccaggagaagaacuucaccaccgcccccgccaucugccacgacgggaaggcgcacuucccccgcgagggcguguucgugagcaacgggacccacugguucgucacgcagcggaacuucuacgagccgcagaucaucaccaccgacaacaccuucguguccggcaacugcgacguggucaucggcaucgugaacaacacgguguacgacccccugcagcccgagcuggacagcuucaaggaggagcucgacaaguacuucaagaaccacaccucccccgacgucgaccugggggacaucagcggcaucaacgccuccguggugaacauccagaaggagaucgaccgccugaacgaggucgccaagaaccucaacgagagccugaucgaccugcaggagcucgggaaguacgagcaguacaucaaguggccgugguacaucuggcugggcuucaucgccggccugaucgccaucgugauggugaccaucaugcucugcugcaugaccuccugcugcagcugccugaaggggugcugcuccugcggcagcugcugcaaguucgacgaggacgacuccgagcccguccugaagggggugaagcuccacuacacgugaggacuagucccuguucccagagcccacuuuuuuuucuuuuuuugaaauaaaauagccugucuuucagaucucaaaggcucuuuucagagccaccaaaaaaaaaaaaaaaaaaaaaaaaaaaaaaaaaaaaaaaaaaaaaaaaaaaaaaaaaaaaaaaaaaaaaaaaaaaaaaaaaaaaaaaaaaaaaaaaaaaaa

SEQ ID NO: 12320 - RNA, 4094 nt, Artificial Sequence
  SARS-CoV-2/USA/NY-NYUMC7/2020__EPI_ISL_418192 spike protein mRNA gc (1-1273)
aggagagucccgcagucggcguccagcggcucugcuuguucgugugugugucguugcaggccuuauucaagcuuaccauguucguguuccugguccuccugccccuggugagcucccagugcgugaaccucaccacccgcacgcagcugccgcccgccuacaccaacagcuucacccggggcgucuacuaccccgacaagguguuccgcuccagcgugcugcacuccacccaggaccucuuccugcccuucuucagcaacgucacgugguuccacgccauccacguguccgggaccaacggcaccaagcgguucgacaacccggugcugcccuucaacgacggggucuacuucgcgagcaccgagaaguccaacaucauccgcggcuggaucuucgggacgacccucgacagcaagacccagucccugcugaucgugaacaacgccaccaacguggucaucaaggugugcgaguuccaguucugcaacgaccccuuccucggcguguaccaccacaagaacaacaagagcuggauggaguccgaguuccgggucuacagcuccgccaacaacugcacguucgaguacgugagccagcccuuccugauggaccuggagggcaagcaggggaacuucaagaaccuccgcgaguucguguucaagaacaucgacggcuacuucaagaucuacuccaagcacaccccgaucaaccugguccgggaccugccccagggguucagcgcccucgagccccugguggaccugcccaucggcaucaacaucacccgcuuccagacccuccuggcccugcaccgguccuaccucacgccgggggacagcagcuccggcuggaccgcgggcgccgccgccuacuacgugggguaccugcagccccgcaccuuccugcucaaguacaacgagaacggcaccaucacggacgcggucgacugcgcccuggacccccugagcgagaccaagugcacccucaaguccuucaccguggagaaggggaucuaccagacgagcaacuuccgggugcagcccaccgaguccaucguccgcuucccgaacaucaccaaccugugccccuucggcgagguguucaacgccacccgguucgccagcgucuacgccuggaaccgcaagcggaucuccaacugcguggcggacuacagcgugcuguacaacuccgccagcuucuccacguucaagugcuacggcgucagccccaccaagcucaacgaccugugcuucaccaacguguacgccgacuccuucgugauccgcggggacgagguccggcagaucgcccccggccagaccgggaagaucgccgacuacaacuacaagcugccggacgacuucacgggcugcgugaucgcguggaacagcaacaaccucgacuccaaggucgggggcaacuacaacuaccuguaccgccuguuccgcaagagcaaccucaagcccuucgagcgggacaucuccaccgagaucuaccaggccggcagcacccccugcaacgggguggagggcuucaacugcuacuucccccugcaguccuacggguuccagccgaccaacggcgugggguaccagcccuaccggguggucgugcugagcuucgagcuccugcacgcccccgccacggugugcggccccaagaaguccaccaaccuggucaagaacaagugcgugaacuucaacuucaacggccucaccgggaccggcgugcugaccgagagcaacaagaaguuccugccguuccagcaguucgggcgcgacaucgccgacacgaccgacgcgguccgcgacccccagacccuggagauccucgacaucacccccugcagcuucggcgggguguccgugaucacgccgggcaccaacaccagcaaccaggucgccgugcuguaccagggcgugaacugcaccgagguccccguggccauccacgccgaccagcugacgcccaccuggcggguguacuccaccgggagcaacgucuuccagacccgcgccggcugccucaucggggcggagcacgugaacaacuccuacgagugcgacauccccaucggcgccggcaucugcgccagcuaccagacgcagaccaacuccccgcggcgcgcccggagcguggcgucccagagcaucaucgccuacaccaugucccugggggccgagaacagcgucgccuacuccaacaacagcaucgccauccccaccaacuucacgaucuccgugaccaccgagauccugcccgugagcaugaccaagacgagcgucgacugcaccauguacaucugcggcgacuccaccgagugcagcaaccuccugcugcaguacggguccuucugcacccagcucaaccgcgcgcugacgggcaucgccguggagcaggacaagaacacccaggagguguucgcccaggucaagcagaucuacaagacgcccccgaucaaggacuucgggggcuucaacuucagccagauccugcccgaccccuccaagcccagcaagcgguccuucaucgaggaccuccuguucaacaaggugacccuggccgacgccggcuucaucaagcaguacggggacugccucggcgacaucgcggcccgcgaccugaucugcgcccagaaguucaacgggcugaccgugcucccgccccugcugaccgacgagaugaucgcccaguacaccagcgcccuccuggcgggcaccaucacguccggguggaccuucggcgccggcgccgcccugcagauccccuucgcgaugcagauggccuaccgguucaacgggaucggcgucacccagaacgugcucuacgagaaccagaagcugaucgccaaccaguucaacagcgccaucgggaagauccaggacucccugagcuccaccgccagcgcgcucggcaagcugcaggacguggucaaccagaacgcccaggcccugaacacgcucgugaagcagcuguccagcaacuucggggccaucuccagcgugcugaacgacauccucucccgccuggacaaggucgaggccgaggugcagaucgaccggcugaucaccggccgccuccagagccugcagaccuacgugacccagcagcugauccgggcggccgagauccgcgccagcgccaaccucgccgcgaccaagauguccgagugcguccugggccagagcaagcggguggacuucugcgggaagggcuaccaccugauguccuucccccagagcgccccgcacgggguggucuuccuccacgugacguacguccccgcccaggagaagaacuucaccaccgcccccgcgaucugccacgacggcaaggcccacuucccccgcgaggggguguucguguccaacggcacccacugguucgucacgcagcggaacuucuacgagccgcagaucaucaccaccgacaacaccuucgugagcggcaacugcgacguggucaucgggaucgugaacaacacgguguacgacccccugcagcccgagcuggacuccuucaaggaggagcucgacaaguacuucaagaaccacaccagccccgacgucgaccugggcgacaucuccgggaucaacgccagcguggugaacauccagaaggagaucgaccgccugaacgaggucgccaagaaccucaacgagucccugaucgaccugcaggagcucggcaaguacgagcaguacaucaaguggccgugguacaucuggcugggcuucaucgccgggcugaucgcgaucgugauggugaccaucaugcucugcugcaugaccagcugcugcuccugccugaagggcugcugcagcugcggguccugcugcaaguucgacgaggacgacagcgagcccguccugaagggcgugaagcuccacuacacgugaggacuagucccuguucccagagcccacuuuuuuuucuuuuuuugaaauaaaauagccugucuuucagaucucaaaggcucuuuucagagccaccaaaaaaaaaaaaaaaaaaaaaaaaaaaaaaaaaaaaaaaaaaaaaaaaaaaaaaaaaaaaaaaaaaaaaaaaaaaaaaaaaaaaaaaaaaaaaaaaaaaaa

SEQ ID NO: 12321 - RNA, 4094 nt, Artificial Sequence
  SARS-CoV-2/Iceland/189/2020__EPI_ISL_417709 spike protein mRNA gc (1-1273)
aggagagucccgcagucggcguccagcggcucugcuuguucgugugugugucguugcaggccuuauucaagcuuaccauguucguguuccugguccuccugccccuggugagcucccagugcgugaaccucaccacccgcacgcagcugccgcccgccuacaccaacagcuucacccggggcgucuacuaccccgacaagguguuccgcuccagcgugcugcacuccacccaggaccucuuccugcccuucuucagcaacgucacgugguuccacgccauccacguguccgggaccaacggcaccaagcgguucgacaacccggugcugcccuucaacgacggggucuacuucgcgagcaccgagaaguccaacaucauccgcggcuggaucuucgggacgacccucgacagcaagacccagucccugcugaucgugaacaacgccaccaacguggucaucaaggugugcgaguuccaguucugcaacgaccccuuccucggcguguacuaccacaagaacaacaagagcuggauggaguccgaguuccgggucuacagcuccgccaacaacugcacguucgaguacgugagccagcccuuccugauggaccuggagggcaagcaggggaacuucaagaaccuccgcgaguucguguucaagaacaucgacggcuacuucaagaucuacuccaagcacaccccgaucaaccugguccgggaccugccccagggguucagcgcccucgagccccugguggaccugcccaucggcaucaacaucacccgcuuccagacccuccuggcccugcaccgguccuaccucacgccgggggacagcagcuccggcuggaccgcgggcgccgccgccuacuacgugggguaccugcagccccgcaccuuccugcucaaguacaacgagaacggcaccaucacggacgcggucgacugcgcccuggacccccugagcgagaccaagugcacccucaaguccuucaccguggagaaggggaucuaccagacgagcaacuuccgggugcagcccaccgaguccaucguccgcuucccgaacaucaccaaccugugccccuucggcgagguguucaacgccacccgguucgccagcgucuacgccuggaaccgcaagcggaucuccaacugcguggcggacuacagcgugcuguacaacuccgccagcuucuccacguucaagugcuacggcgucagccccaccaagcucaacgaccugugcuucaccaacguguacgccgacuccuucgugauccgcggggacgagguccggcagaucgcccccggccagaccgggaagaucgccgacuacaacuacaagcugccggacgacuucacgggcugcgugaucgcguggaacagcaacaaccucgacuccaaggucgggggcaacuacaacuaccuguaccgccuguuccgcaagagcaaccucaagcccuucgagcgggacaucuccaccgagaucuaccaggccggcagcacccccugcaacgggguggagggcuucaacugcuacuucccccugcaguccuacggguuccagccgaccaacggcgugggguaccagcccuaccggguggucgugcugagcuucgagcuccugcacgcccccgccacggugugcggccccaagaaguccaccaaccuggucaagaacaagugcgugaacuucaacuucaacggccucaccgggaccggcgugcugaccgagagcaacaagaaguuccugccguuccagcaguucgggcgcgacaucgccgacacgaccgacgcgguccgcgacccccagacccuggagauccucgacaucacccccugcagcuucggcgggguguccgugaucacgccgggcaccaacaccagcaaccaggucgccgugcuguaccagggcgugaacugcaccgagguccccguggccauccacgccgaccagcugacgcccaccuggcggguguacuccaccgggagcaacgucuuccagacccgcgccggcugccucaucggggcggagcacgugaacaacuccuacgagugcgacauccccaucggcgccggcaucugcgccagcuaccagacgcagaccaacuccccgcggcgcgcccggagcguggcgucccagagcaucaucgccuacaccaugucccugggggccgagaacagcgucgccuacuccaacaacagcaucgccauccccaccaacuucacgaucuccgugaccaccgagauccugcccgugagcaugaccaagacgagcgucgacugcaccauguacaucugcggcgacuccaccgagugcagcaaccuccugcugcaguacggguccuucugcacccagcucaaccgcgcgcugacgggcaucgccguggagcaggacaagaacacccaggagguguucgcccaggucaagcagaucuacaagacgcccccgaucaaggacuucgggggcuucaacuucagccagauccugcccgaccccuccaagcccagcaagcgguccuucaucgaggaccuccuguucaacaaggugacccuggccgacgccggcuucaccaagcaguacggggacugccucggcgacaucgcggcccgcgaccugaucugcgcccagaaguucaacgggcugaccgugcucccgccccugcugaccgacgagaugaucgcccaguacaccagcgcccuccuggcgggcacgaucaccuccggguggaccuucggcgccggcgccgcccugcagauccccuucgcgaugcagauggccuaccgguucaacgggaucggcgucacccagaacgugcucuacgagaaccagaagcugaucgccaaccaguucaacagcgccaucgggaagauccaggacucccugagcuccacggccagcgcgcucggcaagcugcaggacguggucaaccagaacgcccaggcccugaacacccucgugaagcagcuguccagcaacuucggggccaucuccagcgugcugaacgacauccucucccgccuggacaaggucgaggccgaggugcagaucgaccggcugaucaccggccgccuccagagccugcagaccuacgugacccagcagcugauccgggcggccgagauccgcgccagcgccaaccucgccgcgacgaagauguccgagugcguccugggccagagcaagcggguggacuucugcgggaagggcuaccaccugauguccuucccccagagcgccccgcacgggguggucuuccuccacgugaccuacguccccgcccaggagaagaacuucaccaccgcccccgcgaucugccacgacggcaaggcccacuucccccgcgaggggguguucguguccaacggcacgcacugguucgucacccagcggaacuucuacgagccgcagaucaucaccaccgacaacacguucgugagcggcaacugcgacguggucaucgggaucgugaacaacaccguguacgacccccugcagcccgagcuggacuccuucaaggaggagcucgacaaguacuucaagaaccacaccagccccgacgucgaccugggcgacaucuccgggaucaacgccagcguggugaacauccagaaggagaucgaccgccugaacgaggucgccaagaaccucaacgagucccugaucgaccugcaggagcucggcaaguacgagcaguacaucaaguggccgugguacaucuggcugggcuucaucgccgggcugaucgcgaucgugauggugaccaucaugcucugcugcaugacgagcugcugcuccugccugaagggcugcugcagcugcggguccugcugcaaguucgacgaggacgacagcgagcccguccugaagggcgugaagcuccacuacaccugaggacuagucccuguucccagagcccacuuuuuuuucuuuuuuugaaauaaaauagccugucuuucagaucucaaaggcucuuuucagagccaccaaaaaaaaaaaaaaaaaaaaaaaaaaaaaaaaaaaaaaaaaaaaaaaaaaaaaaaaaaaaaaaaaaaaaaaaaaaaaaaaaaaaaaaaaaaaaaaaaaaaa

SEQ ID NO: 12322 - RNA, 4094 nt, Artificial Sequence
  SARS-CoV-2/Australia/NSW56/2020__EPI_ISL_417408 spike protein mRNA gc (1-1273)
aggagagucccgcagucggcguccagcggcucugcuuguucgugugugugucguugcaggccuuauucaagcuuaccauguucguguuccugguccuccugccccuggugagcucccagugcgugaaccucaccacccgcacgcagcugccgcccgccuacaccaacagcuucacccggggcgucuacuaccccgacaagguguuccgcuccagcgugcugcacuccacccaggaccucuuccugcccuucuucagcaacgucacgugguuccacgccauccacguguccgggaccaacggcaccaagcgguucgacaacccggugcugcccuucaacgacggggucuacuucgcgagcaccgagaaguccaacaucauccgcggcuggaucuucgggacgacccucgacagcaagacccagucccugcugaucgugaacaacgccaccaacguggucaucaaggugugcgaguuccaguucugcaacgaccccuuccucggcguguacuaccacaagaacaacaagagcuggauggaguccgaguuccgggucuacagcuccgccaacaacugcacguucgaguacgugagccagcccuuccugauggaccuggagggcaagcaggggaacuucaagaaccuccgcgaguucguguucaagaacaucgacggcuacuucaagaucuacuccaagcacaccccgaucaaccugguccgggaccugccccagggguucagcgcccucgagccccugguggaccugcccaucggcaucaacaucacccgcuuccagacccuccuggcccugcaccgguccuaccucacgccgggggacagcagcuccggcuggaccgcgggcgccgccgccuacuacgugggguaccugcagccccgcaccuuccugcucaaguacaacgagaacggcaccaucacggacgcggucgacugcgcccuggacccccugagcgagaccaagugcacccucaaguccuucaccguggagaaggggaucuaccagacgagcaacuuccgggugcagcccaccgaguccaucguccgcuucccgaacaucaccaaccugugccccuucggcgagguguucaacgccacccgguucgccagcgucuacgccuggaaccgcaagcggaucuccaacugcguggcggacuacagcgugcuguacaacuccgccagcuucuccacguucaagugcuacggcgucagccccaccaagcucaacgaccugugcuucaccaacguguacgccgacuccuucgugauccgcggggacgagguccggcagaucgcccccggccagaccgggaagaucgccgacuacaacuacaagcugccggacgacuucacgggcugcgugaucgcguggaacagcaacaaccucgacuccaaggucgggggcaacuacaacuaccuguaccgccuguuccgcaagagcaaccucaagcccuucgagcgggacaucuccaccgagaucuaccaggccggcagcacccccugcaacgggguggagggcuucaacugcuacuucccccugcaguccuacggguuccagccgaccaacggcgugggguaccagcccuaccggguggucgugcugagcuucgagcuccugcacgcccccgccacggugugcggccccaagaaguccaccaaccuggucaagaacaagugcgugaacuucaacuucaacggccucaccgggaccggcgugcugaccgagagcaacaagaaguuccugccguuccagcaguucgggcgcgacaucgccgacacgaccgacgcgguccgcgacccccagacccuggagauccucgacaucacccccugcagcuucggcgggguguccgugaucacgccgggcaccaacaccagcaaccaggucgccgugcuguaccaggacgugaacugcaccgagguccccguggccauccacgccgaccagcugacgcccaccuggcggguguacuccaccggcagcaacgucuuccagacccgcgccgggugccucaucggcgcggagcacgugaacaacuccuacgagugcgacauccccaucggggccggcaucugcgccagcuaccagacgcagaccaacuccccgcggcgcgcccggagcguggcgucccagagcaucaucgccuacaccaugucccugggcgccgagaacagcgucgccuacuccaacaacagcaucgccauccccaccaacuucacgaucuccgugaccaccgagauccugcccgugagcaugaccaagacgagcgucgacugcaccauguacaucugcggggacuccaccgagugcagcaaccuccugcugcaguacggcuccuucugcacccagcucaaccgcgcgcugacggggaucgccguggagcaggacaagaacacccaggagguguucgcccaggucaagcagaucuacaagacgcccccgaucaaggacuucggcggguucaacuucagccagauccugcccgacuccagcaagcccuccaagcggagcuucaucgaggaccuccuguucaacaaggugacccuggccgacgccggcuucaucaagcaguacggcgacugccucggggacaucgcggcccgcgaccugaucugcgcccagaaguucaacggccugaccgugcugcccccgcuccugaccgacgagaugaucgcccaguacaccuccgcccuccuggcggggaccaucacgagcggcuggaccuucggggccggcgccgcccugcagauccccuucgcgaugcagauggccuaccgguucaacggcaucggggucacccagaacgugcucuacgagaaccagaagcugaucgccaaccaguucaacuccgccaucggcaagauccaggacagccuguccagcaccgccuccgcgcucgggaagcugcaggacguggucaaccagaacgcccaggcccugaacacgcucgugaagcagcugagcuccaacuucggcgccaucagcuccgugcugaacgacauccucagccgccuggacaaggucgaggccgaggugcagaucgaccggcugaucaccgggcgccuccagagccugcagaccuacgugacccagcagcugauccgggcggccgagauccgcgccuccgccaaccucgccgcgaccaagaugagcgagugcguccugggccaguccaagcggguggacuucugcggcaagggguaccaccugaugagcuucccccaguccgcgccccacggcguggucuuccuccacgugacguacgucccggcccaggagaagaacuucaccaccgcccccgccaucugccacgacgggaaggcccacuucccccgcgagggcguguucgugagcaacgggacccacugguucgucacgcagcggaacuucuacgagccccagaucaucaccaccgacaacaccuucguguccggcaacugcgacguggucaucggcaucgugaacaacacgguguacgacccgcugcagcccgagcuggacagcuucaaggaggagcucgacaaguacuucaagaaccacaccucccccgacgucgaccugggggacaucagcggcaucaacgccuccguggugaacauccagaaggagaucgaccgccugaacgaggucgccaagaaccucaacgagagccugaucgaccugcaggagcucgggaaguacgagcaguacaucaaguggcccugguacaucuggcugggcuucaucgccggccugaucgcgaucgugauggugaccaucaugcucugcugcaugaccuccugcugcagcugccugaaggggugcugcuccugcggcagcugcugcaaguucgacgaggacgacuccgagccgguccugaagggggugaagcuccacuacacgugaggacuagucccuguucccagagcccacuuuuuuuucuuuuuuugaaauaaaauagccugucuuucagaucucaaaggcucuuuucagagccaccaaaaaaaaaaaaaaaaaaaaaaaaaaaaaaaaaaaaaaaaaaaaaaaaaaaaaaaaaaaaaaaaaaaaaaaaaaaaaaaaaaaaaaaaaaaaaaaaaaaaa

SEQ ID NO: 12323 - RNA, 4094 nt, Artificial Sequence
  SARS-CoV-2/Iceland/280/2020__EPI_ISL_417608 spike protein mRNA gc (1-1273)
aggagagucccgcagucggcguccagcggcucugcuuguucgugugugugucguugcaggccuuauucaagcuuaccauguucguguuccugguccuccugccccuggugagcucccagugcgugaaccucaccacccgcacgcagcugccgcccgccuacaccaacagcuucacccggggcgucuacuaccccgacaagguguuccgcuccagcgugcugcacuccacccaggaccucuuccugcccuucuucagcaacgucacgugguuccacgccauccacguguccgggaccaacggcaccaagcgguucgacaacccggugcugcccuucaacgacggggucuacuucgcgagcaccgagaaguccaacaucauccgcggcuggaucuucgggacgacccucgacagcaagacccagucccugcugaucgugaacaacgccaccaacguggucaucaaggugugcgaguuccaguucugcaacgaccccuuccucggcguguacuaccacaagaacaacaagagcuggauggaguccgaguuccgggucuacagcuccgccaacaacugcacguucgaguacgugagccagcccuuccugauggaccuggagggcaagcaggggaacuucaagaaccuccgcgaguucguguucaagaacaucgacggcuacuucaagaucuacuccaagcacaccccgaucaaccugguccgggaccugccccagggguucagcgcccucgagccccugguggaccugcccaucggcaucaacaucacccgcuuccagacccuccuggcccugcaccgguccuaccucacgccgggggacagcagcuccggcuggaccgcgggcgccgccgccuacuacgugggguaccugcagccccgcaccuuccugcucaaguacaacgagaacggcaccaucacggacgcggucgacugcgcccuggacccccugagcgagaccaagugcacccucaaguccuucaccguggagaaggggaucuaccagacgagcaacuuccgggugcagcccaccgaguccaucguccgcuucccgaacaucaccaaccugugccccuucggcgagguguucaacgccacccgguucgccagcgucuacgccuggaaccgcaagcggaucuccaacugcguggcggacuacagcgugcuguacaacuccgccagcuucuccacguucaagugcuacggcgucagccccaccaagcucaacgaccugugcuucaccaacguguacgccgacuccuucgugauccgcggggacgagguccggcagaucgcccccggccagaccgggaagaucgccgacuacaacuacaagcugccggacgacuucacgggcugcgugaucgcguggaacagcaacaaccucgacuccaaggucgggggcaacuacaacuaccuguaccgccuguuccgcaagagcaaccucaagcccuucgagcgggacaucuccaccgagaucuaccaggccggcagcacccccugcaacgggguggagggcuucaacugcuacuucccccugcaguccuacggguuccagccgaccaacggcgugggguaccagcccuaccggguggucgugcugagcuucgagcuccugcacgcccccgccacggugugcggccccaagaaguccaccaaccuggucaagaacaagugcgugaacuucaacuucaacggccucaccgggaccggcgugcugaccgagagcaacaagaaguuccugccguuccagcaguucgggcgcgacaucgccgacacgaccgacgcgguccgcgacccccagacccuggagauccucgacaucacccccugcagcuucggcgggguguccgugaucacgccgggcaccaacaccagcaaccaggucgccgugcuguaccagggcgugaacugcaccgagguccccguggccauccacgccgaccagcugacgcccaccuggcggguguacuccaccgggagcaacgucuuccagacccgcgccggcugccucaucggggcggagcacgugaacaacuccuacgagugcgacauccccaucggcgccggcaucugcgccagcuaccacacgcagaccaacuccccgcggcgcgcccggagcguggcgucccagagcaucaucgccuacaccaugucccugggggccgagaacagcgucgccuacuccaacaacagcaucgccauccccaccaacuucacgaucuccgugaccaccgagauccugcccgugagcaugaccaagacgagcgucgacugcaccauguacaucugcggcgacuccaccgagugcagcaaccuccugcugcaguacggguccuucugcacccagcucaaccgcgcgcugacgggcaucgccguggagcaggacaagaacacccaggagguguucgcccaggucaagcagaucuacaagacgcccccgaucaaggacuucgggggcuucaacuucagccagauccugcccgaccccuccaagcccagcaagcgguccuucaucgaggaccuccuguucaacaaggugacccuggccgacgccggcuucaucaagcaguacggggacugccucggcgacaucgcggcccgcgaccugaucugcgcccagaaguucaacgggcugaccgugcucccgccccugcugaccgacgagaugaucgcccaguacaccagcgcccuccuggcgggcaccaucacguccggguggaccuucggcgccggcgccgcccugcagauccccuucgcgaugcagauggccuaccgguucaacgggaucggcgucacccagaacgugcucuacgagaaccagaagcugaucgccaaccaguucaacagcgccaucgggaagauccaggacucccugagcuccaccgccagcgcgcucggcaagcugcaggacguggucaaccagaacgcccaggcccugaacacgcucgugaagcagcuguccagcaacuucggggccaucuccagcgugcugaacgacauccucucccgccuggacaaggucgaggccgaggugcagaucgaccggcugaucaccggccgccuccagagccugcagaccuacgugacccagcagcugauccgggcggccgagauccgcgccagcgccaaccucgccgcgaccaagauguccgagugcguccugggccagagcaagcggguggacuucugcgggaagggcuaccaccugauguccuucccccagagcgccccgcacgggguggucuuccuccacgugacguacguccccgcccaggagaagaacuucaccaccgcccccgcgaucugccacgacggcaaggcccacuucccccgcgaggggguguucguguccaacggcacccacugguucgucacgcagcggaacuucuacgagccgcagaucaucaccaccgacaacaccuucgugagcggcaacugcgacguggucaucgggaucgugaacaacacgguguacgacccccugcagcccgagcuggacuccuucaaggaggagcucgacaaguacuucaagaaccacaccagccccgacgucgaccugggcgacaucuccgggaucaacgccagcguggugaacauccagaaggagaucgaccgccugaacgaggucgccaagaaccucaacgagucccugaucgaccugcaggagcucggcaaguacgagcaguacaucaaguggccgugguacaucuggcugggcuucaucgccgggcugaucgcgaucgugauggugaccaucaugcucugcugcaugaccagcugcugcuccugccugaagggcugcugcagcugcggguccugcugcaaguucgacgaggacgacagcgagcccguccugaagggcgugaagcuccacuacacgugaggacuagucccuguucccagagcccacuuuuuuuucuuuuuuugaaauaaaauagccugucuuucagaucucaaaggcucuuuucagagccaccaaaaaaaaaaaaaaaaaaaaaaaaaaaaaaaaaaaaaaaaaaaaaaaaaaaaaaaaaaaaaaaaaaaaaaaaaaaaaaaaaaaaaaaaaaaaaaaaaaaaa

SEQ ID NO: 12324 - RNA, 4094 nt, Artificial Sequence
  SARS-CoV-2/Iceland/247/2020__EPI_ISL_417575 spike protein mRNA gc (1-1273)
aggagagucccgcagucggcguccagcggcucugcuuguucgugugugugucguugcaggccuuauucaagcuuaccauguucguguuccugguccuccugccccuggugagcucccagugcgugaaccucaccacccgcacgcagcugccgcccgccuacaccaacagcuucacccggggcgucuacuaccccgacaagguguuccgcuccagcgugcugcacuccacccaggaccucuuccugcccuucuucagcaacgucacgugguuccacgccauccacguguccgggaccaacggcaccaagcgguucgacaacccggugcugcccuucaacgacggggucuacuucgcgagcaccgagaaguccaacaucauccgcggcuggaucuucgggacgacccucgacagcaagacccagucccugcugaucgugaacaacgccaccaacguggucaucaaggugugcgaguuccaguucugcaacgaccccuuccucggcguguacuaccacaagaacaacaagagcuggauggaguccgaguuccgggucuacagcuccgccaacaacugcacguucgaguacgugagccagcccuuccugauggaccuggagggcaagcaggggaacuucaagaaccuccgcgaguucguguucaagaacaucgacggcuacuucaagaucuacuccaagcacaccccgaucaaccugguccgggaccugccccagggguucagcgcccucgagccccugguggaccugcccaucggcaucaacaucacccgcuuccagacccuccuggcccugcaccgguccuaccucacgccgggggacagcagcuccggcuggaccgcgggcgccgccgccuacuacgugggguaccugcagccccgcaccuuccugcucaaguacaacgagaacggcaccaucacggacgcggucgacugcgcccuggacccccugagcgagaccaagugcacccucaaguccuucaccguggagaaggggaucuaccagacgagcaacuuccgggugcagcccaccgaguccaucguccgcuucccgaacaucaccaaccugugccccuucggcgagguguucaacgccacccgguucgccagcgucuacgccuggaaccgcaagcggaucuccaacugcguggcggacuacagcgugcuguacaacuccgccagcuucuccacguucaagugcuacggcgucagccccaccaagcucaacgaccugugcuucaccaacguguacgccgacuccuucgugauccgcggggacgagguccggcagaucgcccccggccagaccgggaagaucgccgacuacaacuacaagcugccggacgacuucacgggcugcgugaucgcguggaacagcaacaaccucgacuccaaggucgggggcaacuacaacuaccuguaccgccuguuccgcaagagcaaccucaagcccuucgagcgggacaucuccaccgagaucuaccaggccggcagcacccccugcaacgggguggagggcuucaacugcuacuucccccugcaguccuacggguuccagccgaccaacggcgugggguaccagcccuaccggguggucgugcugagcuucgagcuccugcacgcccccgccacggugugcggccccaagaaguccaccaaccuggucaagaacaagugcgugaacuucaacuucaacggccucaccgggaccggcgugcugaccgagagcaacaagaaguuccugccguuccagcaguucgggcgcgacaucgccgacacgaccgacgcgguccgcgacccccagacccuggagauccucgacaucacccccugcagcuucggcgggguguccgugaucacgccgggcaccaacaccagcaaccaggucgccgugcuguaccagggcgugaacugcaccgagguccccguggccauccacgccgaccagcugacgcccaccuggcggguguacuccaccgggagcaacgucuuccagacccgcgccggcugccucaucggggcggagcacgugaacaacuccuacgagugcgacauccccaucggcgccggcaucugcgccagcuaccagacgcagaccaacuccccgcggcgcgcccggagcguggcgucccagagcaucaucgccuacaccaugucccugggggccgagaacagcgucgccuacuccaacaacagcaucgccauccccaccaacuucacgaucuccgugaccaccgagauccugcccgugagcaugaccaagacgagcgucgacugcaccauguacaucugcggcgacuccaccgagugcagcaaccuccugcugcaguacggguccuucugcacccagcucaaccgcgcgcugacgggcaucgccguggagcaggacaagaacacccaggagguguucgcccaggucaagcagaucuacaagacgcccccgaucaaggacuucgggggcuucaacuucagccagauccugcccgaccccuccaagcccagcaagcgguccuucaucgaggaccuccuguucaacaaggugacccuggccgacgccggcuucaucaagcaguacggggacugccucggcgacaucgcggcccgcgaccugaucugcgcccagaaguucaacgggcugaccgugcucccgccccugcugaccgacgagaugaucgcccaguacaccagcgcccuccuggcgggcaccaucacguccggguggaccuucggcgccggcgccgcccugcagauccccuucgcgaugcagauggccuaccgguucaacgggaucggcgucacccagaacgugcucuacgagaaccagaagcugaucgccaaccaguucaacagcgccaucgggaagauccaggacucccugagcuccaccgccagcgcgcucggcaagcugcaggacguggucaaccagaacgcccaggcccugaacacgcucgugaagcagcuguccagcaacuucggggccaucuccagcgugcugaacgacauccucucccgccuggacaaggucgaggccgaggugcagaucgaccggcugaucaccggccgccuccagagccugcagaccuacgugacccagcagcugauccgggcggccgagauccgcgccagcgccaaccucgccgcgaccaagauguccgagugcguccugggccagagcaagcggguggacuucugcgggaagggcuaccaccugauguccuucccccagagcgccccgcacgggguggucuuccuccacgugacguacguccccgcccaggagaagaacuucaccaccgcccccgcgaucugccacgacggcaaggcccacuucccccgcgaggggguguucguguccaacggcacccacugguucgucacgcagcggaacuucuacgagccgcagaucaucaccaccgacaacaccuucgugagcggcaacugcgacguggucaucgggaucgugaacaacacgguguacgacccccugcagcccgagcuggacuccuucaaggaggagcucgacaaguacuucaagaaccacaccagccccgacgucgaccugggcgacaucuccgggaucaacgccagcguggugaacauccagaaggagaucgaccgccugaacgaggucgccaagaaccucaacgagucccugaucgaccugcaggagcucggcaaguacgagcaguacaucaaguggccgugguacaucuggcugggcuucaucgccgggcugaucgcgaucgugaucgugaccaucaugcucugcugcaugaccagcugcugcuccugccugaagggcugcugcagcugcggguccugcugcaaguucgacgaggacgacagcgagcccguccugaagggcgugaagcuccacuacacgugaggacuagucccuguucccagagcccacuuuuuuuucuuuuuuugaaauaaaauagccugucuuucagaucucaaaggcucuuuucagagccaccaaaaaaaaaaaaaaaaaaaaaaaaaaaaaaaaaaaaaaaaaaaaaaaaaaaaaaaaaaaaaaaaaaaaaaaaaaaaaaaaaaaaaaaaaaaaaaaaaaaaa

SEQ ID NO: 12325 - RNA, 4094 nt, Artificial Sequence
  SARS-CoV-2/Iceland/238/2020__EPI_ISL_417566 spike protein mRNA gc (1-1273)
aggagagucccgcagucggcguccagcggcucugcuuguucgugugugugucguugcaggccuuauucaagcuuaccauguucguguuccugguccuccugccccuggugagcucccagugcgugaaccucaccacccgcacgcagcugccgcccgccuacaccaacagcuucacccggggcgucuacuaccccgacaagguguuccgcuccagcgugcugcacuccacccaggaccucuuccugcccuucuucagcaacgucacgugguuccacgccauccacguguccgggaccaacggcaccaagcgguucgacaacccggugcugcccuucaacgacggggucuacuucgcgagcaccgagaaguccaacaucauccgcggcuggaucuucgggacgacccucgacagcaagacccagucccugcugaucgugaacaacgccaccaacguggucaucaaggugugcgaguuccaguucugcaacgaccccuuccucggcguguacuaccacaagaacaacaagagcuggauggaguccgaguuccgggucuacagcuccgccaacaacugcacguucgaguacgugagccagcccuuccugauggaccuggagggcaagcaggggaacuucaagaaccuccgcgaguucguguucaagaacaucgacggcuacuucaagaucuacuccaagcacaccccgaucaaccugguccgggaccugccccagggguucagcgcccucgagccccugguggaccugcccaucggcaucaacaucacccgcuuccagacccuccuggcccugcaccgguccuaccucacgccgggggacagcagcuccggcuggaccgcgggcgccgccgccuacuacgugggguaccugcagccccgcaccuuccugcucaaguacaacgagaacggcaccaucacggacgcggucgacugcgcccuggacccccugagcgagaccaagugcacccucaaguccuucaccguggagaaggggaucuaccagacgagcaacuuccgggugcagcccaccgaguccaucguccgcuucccgaacaucaccaaccugugccccuucggcgagguguucaacgccacccgguucgccagcgucuacgccuggaaccgcaagcggaucuccaacugcguggcggacuacagcgugcuguacaacuccgccagcuucuccacguucaagugcuacggcgucagccccaccaagcucaacgaccugugcuucaccaacguguacgccgacuccuucgugauccgcggggacgagguccggcagaucgcccccggccagaccgggaagaucgccgacuacaacuacaagcugccggacgacuucacgggcugcgugaucgcguggaacagcaacaaccucgacuccaaggucgggggcaacuacaacuaccuguaccgccuguuccgcaagagcaaccucaagcccuucgagcgggacaucuccaccgagaucuaccaggccggcagcacccccugcaacgggguggagggcuucaacugcuacuucccccugcaguccuacggguuccagccgaccaacggcgugggguaccagcccuaccggguggucgugcugagcuucgagcuccugcacgcccccgccacggugugcggccccaagaaguccaccaaccuggucaagaacaagugcgugaacuucaacuucaacggccucaccgggaccggcgugcugaccgagagcaacaagaaguuccugccguuccagcaguucgggcgcgacaucgccgacacgaccgacgcgguccgcgacccccagacccuggagauccucgacaucacccccugcagcuucggcgggguguccgugaucacgccgggcaccaacaccagcaaccaggucgccgugcuguaccagggcgugaacugcaccgagguccccguggccauccacgccgaccagcugacgcccaccuggcggguguacuccaccgggagcaacgucuuccagacccgcgccggcugccucaucggggcggagcacgugaacaacuccuacgagugcgacauccccaucggcgccggcaucugcgccagcuaccagacgcagaccaacuccccgcggcgcgcccggagcguggcgucccagagcaucaucgccuacaccaugucccugggggccgagaacagcgucgccuacuccaacaacagcaucgccauccccaccaacuucacgaucuccgugaccaccgagauccugcccgugagcaugaccaagacgagcgucgacugcaccauguacaucugcggcgacuccaccgagugcagcaaccuccugcugcaguacggguccuucugcacccagcucaaccgcgcgcugacgggcaucgccguggagcaggacaagaacacccaggagguguucgcccaggucaagcagaucuacaagacgcccccgaucaaggacuucgggggcuucaacuucagccagauccugcccgaccccuccaagcccagcaagcgguccuucaucgaggaccuccuguucaacaaggugacccuggccgacgugggcuucaucaagcaguacggggacugccucggcgacaucgccgcgcgcgaccugaucugcgcccagaaguucaacgggcugaccguccucccgccccugcugaccgacgagaugaucgcccaguacaccagcgcccuccuggccggcaccaucacguccggguggaccuucggcgcgggcgccgcccugcagauccccuucgccaugcagauggcguaccgguucaacgggaucggcgugacccagaacgugcucuacgagaaccagaagcugaucgccaaccaguucaacagcgccaucgggaagauccaggacucccugagcuccaccgccagcgcccucggcaagcugcaggacgucgugaaccagaacgcgcaggcccugaacacgcucgugaagcagcuguccagcaacuucggggccaucuccagcguccugaacgacauccucucccgccuggacaagguggaggccgaggugcagaucgaccggcugaucaccggccgccuccagagccugcagaccuacgucacccagcagcugauccgggccgcggagauccgcgccagcgccaaccucgccgccaccaagauguccgagugcgugcugggccagagcaagcggguggacuucugcgggaagggcuaccaccugauguccuucccccagagcgcgccgcacggggucguguuccuccacgucacguacgugcccgcccaggagaagaacuucaccaccgcccccgccaucugccacgacggcaaggcgcacuucccccgcgaggggguguucgucuccaacggcacccacugguucgugacgcagcggaacuucuacgagccgcagaucaucaccaccgacaacaccuucgugagcggcaacugcgacgucgugaucgggaucgugaacaacacggucuacgacccccugcagcccgagcuggacuccuucaaggaggagcucgacaaguacuucaagaaccacaccagccccgacguggaccugggcgacaucuccgggaucaacgccagcguggucaacauccagaaggagaucgaccgccugaacgagguggccaagaaccucaacgagucccugaucgaccugcaggagcucggcaaguacgagcaguacaucaaguggccgugguacaucuggcugggcuucaucgccgggcugaucgccaucgugauggucaccaucaugcucugcugcaugaccagcugcugcuccugccugaagggcugcugcagcugcggguccugcugcaaguucgacgaggacgacagcgagcccgugcugaagggcgugaagcuccacuacacgugaggacuagucccuguucccagagcccacuuuuuuuucuuuuuuugaaauaaaauagccugucuuucagaucucaaaggcucuuuucagagccaccaaaaaaaaaaaaaaaaaaaaaaaaaaaaaaaaaaaaaaaaaaaaaaaaaaaaaaaaaaaaaaaaaaaaaaaaaaaaaaaaaaaaaaaaaaaaaaaaaaaaa

SEQ ID NO: 12326 - RNA, 4094 nt, Artificial Sequence
  SARS-CoV-2/Greece/16/2020__EPI_ISL_418265 spike protein mRNA gc (1-1273)
aggagagucccgcagucggcguccagcggcucugcuuguucgugugugugucguugcaggccuuauucaagcuuaccauguucguguuccugguccuccugccccuggugagcucccagugcgugaaccucaccacccgcacgcagcugccgcccgccuacaccaacagcuucacccggggcgucuacuaccccgacaagguguuccgcuccagcgugcugcacuccacccaggaccucuuccugcccuucuucagcaacgucacgugguuccacgccauccacguguccgggaccaacggcaccaagcgguucgacaacccggugcugcccuucaacgacggggucuacuucgcgagcaccgagaaguccaacaucauccgcggcuggaucuucgggacgacccucgacagcaagacccagucccugcugaucgugaacaacgccaccaacguggucaucaaggugugcgaguuccaguucugcaacgaccccuuccucggcguguacuaccacaagaacaacaagagcuggauggaguccgaguuccgggucuacagcuccgccaacaacugcacguucgaguacgugagccagcccuuccugauggaccuggagggcaagcaggggaacuucaagaaccuccgcgaguucguguucaagaacgucgacggcuacuucaagaucuacuccaagcacaccccgaucaaccuggugcgggaccugccccagggguucagcgcccucgagccccugguggaccugcccaucggcaucaacaucacccgcuuccagacccuccuggcccugcaccgguccuaccucacgccgggggacagcagcuccggcuggaccgcgggcgccgccgccuacuacgucggguaccugcagccccgcaccuuccugcucaaguacaacgagaacggcaccaucacggacgcgguggacugcgcccuggacccccugagcgagaccaagugcacccucaaguccuucaccguggagaaggggaucuaccagacgagcaacuuccggguccagcccaccgaguccaucgugcgcuucccgaacaucaccaaccugugccccuucggcgaggucuucaacgccacccgguucgccagcguguacgccuggaaccgcaagcggaucuccaacugcguggcggacuacagcguccuguacaacuccgccagcuucuccacguucaagugcuacggcgugagccccaccaagcucaacgaccugugcuucaccaacguguacgccgacuccuucgucauccgcggggacgaggugcggcagaucgcccccggccagaccgggaagaucgccgacuacaacuacaagcugccggacgacuucacgggcugcgugaucgcguggaacagcaacaaccucgacuccaaggucgggggcaacuacaacuaccuguaccgccuguuccgcaagagcaaccucaagcccuucgagcgggacaucuccaccgagaucuaccaggccggcagcacccccugcaacgggguggagggcuucaacugcuacuucccccugcaguccuacggguuccagccgaccaacggcgugggguaccagcccuaccgggucguggugcugagcuucgagcuccugcacgcccccgccacggucugcggccccaagaaguccaccaaccuggugaagaacaagugcgugaacuucaacuucaacggccucaccgggaccggcguccugaccgagagcaacaagaaguuccugccguuccagcaguucgggcgcgacaucgccgacacgaccgacgcggugcgcgacccccagacccuggagauccucgacaucacccccugcagcuucggcgggguguccgucaucacgccgggcaccaacaccagcaaccagguggccgugcuguaccaggacgucaacugcaccgaggugcccguggccauccacgccgaccagcugacgcccaccuggcgggucuacuccaccggcagcaacguguuccagacccgcgccgggugccucaucggcgcggagcacgugaacaacuccuacgagugcgacauccccaucggggccggcaucugcgccagcuaccagacgcagaccaacuccccgcggcgcgcccggagcgucgcgucccagagcaucaucgccuacaccaugucccugggcgccgagaacagcguggccuacuccaacaacagcaucgccauccccaccaacuucacgaucuccgugaccaccgagauccugcccgucagcaugaccaagacgagcguggacugcaccauguacaucugcggggacuccaccgagugcagcaaccuccugcugcaguacggcuccuucugcacccagcucaaccgcgcgcugacggggaucgccguggagcaggacaagaacacccaggaggucuucgcccaggugaagcagaucuacaagacgcccccgaucaaggacuucggcggguucaacuucagccagauccugcccgaccccuccaagcccagcaagcgguccuucaucgaggaccuccuguucaacaaggugacccuggccgacgccggcuucaucaagcaguacggcgacugccucggggacaucgcggcccgcgaccugaucugcgcccagaaguucaacggccugaccguccucccgccccugcugaccgacgagaugaucgcccaguacaccagcgcccuccuggcggggaccaucacguccggcuggaccuucggggccggcgccgcccugcagauccccuucgcgaugcagauggccuaccgguucaacggcaucggggugacccagaacgugcucuacgagaaccagaagcugaucgccaaccaguucaacagcgccaucggcaagauccaggacucccugagcuccaccgccagcgcgcucgggaagcugcaggacgucgugaaccagaacgcccaggcccugaacacgcucgugaagcagcuguccagcaacuucggcgccaucuccagcguccugaacgacauccucucccgccuggacaagguggaggccgaggugcagaucgaccggcugaucaccgggcgccuccagagccugcagaccuacgucacccagcagcugauccgggcggccgagauccgcgccagcgccaaccucgccgcgaccaagauguccgagugcgugcugggccagagcaagcggguggacuucugcggcaagggguaccaccugauguccuucccccagagcgccccgcacggcgucguguuccuccacgucacguacgugcccgcccaggagaagaacuucaccaccgcccccgcgaucugccacgacgggaaggcccacuucccccgcgagggcguguucgucuccaacgggacccacugguucgugacgcagcggaacuucuacgagccgcagaucaucaccaccgacaacaccuucgugagcggcaacugcgacgucgugaucggcaucgugaacaacacggucuacgacccccugcagcccgagcuggacuccuucaaggaggagcucgacaaguacuucaagaaccacaccagccccgacguggaccugggggacaucuccggcaucaacgccagcguggucaacauccagaaggagaucgaccgccugaacgagguggccaagaaccucaacgagucccugaucgaccugcaggagcucgggaaguacgagcaguacaucaaguggccgugguacaucuggcugggcuucaucgccggccugaucgcgaucgugauggucaccaucaugcucugcugcaugaccagcugcugcuccugccugaaggggugcugcagcugcggcuccugcugcaaguucgacgaggacgacagcgagcccgugcugaagggggugaagcuccacuacacgugaggacuagucccuguucccagagcccacuuuuuuuucuuuuuuugaaauaaaauagccugucuuucagaucucaaaggcucuuuucagagccaccaaaaaaaaaaaaaaaaaaaaaaaaaaaaaaaaaaaaaaaaaaaaaaaaaaaaaaaaaaaaaaaaaaaaaaaaaaaaaaaaaaaaaaaaaaaaaaaaaaaaa

SEQ ID NO: 12327 - RNA, 4094 nt, Artificial Sequence
  SARS-CoV-2/Iceland/319/2020__EPI_ISL_417648 spike protein mRNA gc (1-1273)
aggagagucccgcagucggcguccagcggcucugcuuguucgugugugugucguugcaggccuuauucaagcuuaccauguucguguuccugguccuccugccccuggugagcucccagugcgugaaccucaccacccgcacgcagcugccgcccgccuacaccaacagcuucacccggggcgucuacuaccccgacaagguguuccgcuccagcgugcugcacuccacccaggaccucuuccugcccuucuucagcaacgucacgugguuccacgccauccacguguccgggaccaacggcaccaagcgguucgacaacccggugcugcccuucaacgacggggucuacuucgcgagcaccgagaaguccaacaucauccgcggcuggaucuucgggacgacccucgacagcaagacccagucccugcugaucgugaacaacgccaccaacguggucaucaaggugugcgaguuccaguucugcaacgaccccuuccucggcguguacuaccacaagaacaacaagagcuggauggaguccgaguuccgggucuacagcuccgccaacaacugcacguucgaguacgugagccagcccuuccugaucgaccuggagggcaagcaggggaacuucaagaaccuccgcgaguucguguucaagaacaucgacggcuacuucaagaucuacuccaagcacaccccgaucaaccugguccgggaccugccccagggguucagcgcccucgagccccugguggaccugcccaucggcaucaacaucacccgcuuccagacccuccuggcccugcaccgguccuaccucacgccgggggacagcagcuccggcuggaccgcgggcgccgccgccuacuacgugggguaccugcagccccgcaccuuccugcucaaguacaacgagaacggcaccaucacggacgcggucgacugcgcccuggacccccugagcgagaccaagugcacccucaaguccuucaccguggagaaggggaucuaccagacgagcaacuuccgggugcagcccaccgaguccaucguccgcuucccgaacaucaccaaccugugccccuucggcgagguguucaacgccacccgguucgccagcgucuacgccuggaaccgcaagcggaucuccaacugcguggcggacuacagcgugcuguacaacuccgccagcuucuccacguucaagugcuacggcgucagccccaccaagcucaacgaccugugcuucaccaacguguacgccgacuccuucgugauccgcggggacgagguccggcagaucgcccccggccagaccgggaagaucgccgacuacaacuacaagcugccggacgacuucacgggcugcgugaucgcguggaacagcaacaaccucgacuccaaggucgggggcaacuacaacuaccuguaccgccuguuccgcaagagcaaccucaagcccuucgagcgggacaucuccaccgagaucuaccaggccggcagcacccccugcaacgggguggagggcuucaacugcuacuucccccugcaguccuacggguuccagccgaccaacggcgugggguaccagcccuaccggguggucgugcugagcuucgagcuccugcacgcccccgccacggugugcggccccaagaaguccaccaaccuggucaagaacaagugcgugaacuucaacuucaacggccucaccgggaccggcgugcugaccgagagcaacaagaaguuccugccguuccagcaguucgggcgcgacaucgccgacacgaccgacgcgguccgcgacccccagacccuggagauccucgacaucacccccugcagcuucggcgggguguccgugaucacgccgggcaccaacaccagcaaccaggucgccgugcuguaccagggcgugaacugcaccgagguccccguggccauccacgccgaccagcugacgcccaccuggcggguguacuccaccgggagcaacgucuuccagacccgcgccggcugccucaucggggcggagcacgugaacaacuccuacgagugcgacauccccaucggcgccggcaucugcgccagcuaccagacgcagaccaacuccccgcggcgcgcccggagcguggcgucccagagcaucaucgccuacaccaugucccugggggccgagaacagcgucgccuacuccaacaacagcaucgccauccccaccaacuucacgaucuccgugaccaccgagauccugcccgugagcaugaccaagacgagcgucgacugcaccauguacaucugcggcgacuccaccgagugcagcaaccuccugcugcaguacggguccuucugcacccagcucaaccgcgcgcugacgggcaucgccguggagcaggacaagaacacccaggagguguucgcccaggucaagcagaucuacaagacgcccccgaucaaggacuucgggggcuucaacuucagccagauccugcccgaccccuccaagcccagcaagcgguccuucaucgaggaccuccuguucaacaaggugacccuggccgacgccggcuucaucaagcaguacggggacugccucggcgacaucgcggcccgcgaccugaucugcgcccagaaguucaacgggcugaccgugcucccgccccugcugaccgacgagaugaucgcccaguacaccagcgcccuccuggcgggcaccaucacguccggguggaccuucggcgccggcgccgcccugcagauccccuucgcgaugcagauggccuaccgguucaacgggaucggcgucacccagaacgugcucuacgagaaccagaagcugaucgccaaccaguucaacagcgccaucgggaagauccaggacucccugagcuccaccgccagcgcgcucggcaagcugcaggacguggucaaccagaacgcccaggcccugaacacgcucgugaagcagcuguccagcaacuucggggccaucuccagcgugcugaacgacauccucucccgccuggacaaggucgaggccgaggugcagaucgaccggcugaucaccggccgccuccagagccugcagaccuacgugacccagcagcugauccgggcggccgagauccgcgccagcgccaaccucgccgcgaccaagauguccgagugcguccugggccagagcaagcggguggacuucugcgggaagggcuaccaccugauguccuucccccagagcgccccgcacgggguggucuuccuccacgugacguacguccccgcccaggagaagaacuucaccaccgcccccgcgaucugccacgacggcaaggcccacuucccccgcgaggggguguucguguccaacggcacccacugguucgucacgcagcggaacuucuacgagccgcagaucaucaccaccgacaacaccuucgugagcggcaacugcgacguggucaucgggaucgugaacaacacgguguacgacccccugcagcccgagcuggacuccuucaaggaggagcucgacaaguacuucaagaaccacaccagccccgacgucgaccugggcgacaucuccgggaucaacgccagcguggugaacauccagaaggagaucgaccgccugaacgaggucgccaagaaccucaacgagucccugaucgaccugcaggagcucggcaaguacgagcaguacaucaaguggccgugguacaucuggcugggcuucaucgccgggcugaucgcgaucgugauggugaccaucaugcucugcugcaugaccagcugcugcuccugccugaagggcugcugcagcugcggguccugcugcaaguucgacgaggacgacagcgagcccguccugaagggcgugaagcuccacuacacgugaggacuagucccuguucccagagcccacuuuuuuuucuuuuuuugaaauaaaauagccugucuuucagaucucaaaggcucuuuucagagccaccaaaaaaaaaaaaaaaaaaaaaaaaaaaaaaaaaaaaaaaaaaaaaaaaaaaaaaaaaaaaaaaaaaaaaaaaaaaaaaaaaaaaaaaaaaaaaaaaaaaaa

SEQ ID NO: 12328 - RNA, 4094 nt, Artificial Sequence
  SARS-CoV-2/Congo/94/2020__EPI_ISL_417947 spike protein mRNA gc (1-1273)
aggagagucccgcagucggcguccagcggcucugcuuguucgugugugugucguugcaggccuuauucaagcuuaccauguucguguuccugguccuccugccccuggugagcucccagugcgugaaccucaccacccgcacgcagcugccgcccgccuacaccaacagcuucacccggggcgucuacuaccccgacaagguguuccgcuccagcgugcugcacuccacccaggaccucuuccugcccuucuucagcaacgucacgugguuccacgccauccacguguccgggaccaacggcaccaagcgguucgacaacccggugcugcccuucaacgacggggucuacuucgcgagcaccgagaaguccaacaucauccgcggcuggaucuucgggacgacccucgacagcaagacccagucccugcugaucgugaacaacgccaccaacguggucaucaaggugugcgaguuccaguucugcaacgaccccuuccucggcguguacuaccacaagaacaacaagagcuggauggaguccgaguuccgggucuacagcuccgccaacaacugcacguucgaguacgugagccagcccuuccugauggaccuggagggcaagcaggggaacuucaagaaccuccgcgaguucguguucaagaacaucgacggcuacuucaagaucuacuccaagcacaccccgaucaaccugguccgggaccugccccagggguucagcgcccucgagccccugguggaccugcccaucggcaucaacaucacccgcuuccagacccuccuggcccugcaccgguccuaccucacgccgggggacagcagcuccggcuggaccgcgggcgccgccgccuacuacgugggguaccugcagccccgcaccuuccugcucaaguacaacgagaacggcaccaucacggacgcggucgacugcgcccuggacccccugagcgagaccaagugcacccucaaguccuucaccguggagaaggggaucuaccagacgagcaacuuccgggugcagcccaccgaguccaucguccgcuucccgaacaucaccaaccugugccccuucggcgagguguucaacgccacccgguucgccagcgucuacgccuggaaccgcaagcggaucuccaacugcguggcggacuacagcgugcuguacaacuccgccagcuucuccacguucaagugcuacggcgucagccccaccaagcucaacgaccugugcuucaccaacguguacgccgacuccuucgugauccgcggggacgagguccggcagaucgcccccggccagaccgggaagaucgccgacuacaacuacaagcugccggacgacuucacgggcugcgugaucgcguggaacagcaacaaccucgacuccaaggucgggggcaacuacaacuaccuguaccgccuguuccgcaagagcaaccucaagcccuucgagcgggacaucuccaccgagaucuaccaggccggcagcacccccugcaacgggguggagggcuucaacugcuacuucccccugcaguccuacggguuccagccgaccaacggcgugggguaccagcccuaccggguggucgugcugagcuucgagcuccugcacgcccccgccacggugugcggccccaagaaguccaccaaccuggucaagaacaagugcgugaacuucaacuucaacggccucaccgggaccggcgugcugaccgagagcaacaagaaguuccugccguuccagcaguucgggcgcgacaucgccgacacgaccgacgcgguccgcgacccccagacccuggagauccucgacaucacccccugcagcuucggcgggguguccgugaucacgccgggcaccaacaccagcaaccaggucgccgugcuguaccagggcgugaacugcaccgagguccccguggccauccacgccgaccagcugacgcccaccuggcggguguacuccaccgggagcaacgucuuccagacccgcgccggcugccucaucggggcggagcacgugaacaacuccuacgagugcgacauccccaucggcgccggcaucugcgccagcuaccagacgcagaccaacuccccgcggcgcgcccggagcguggcgucccagagcaucaucgccuacaccaugucccugggggccgagaacagcgucgccuacuccaacaacagcaucgccauccccaccaacuucacgaucuccgugaccaccgagauccugcccgugagcaugaccaagacgagcgucgacugcaccauguacaucugcggcgacuccaccgagugcagcaaccuccugcugcaguacggguccuucugcacccagcucaaccgcgcgcugacgggcaucgccguggagcaggacaagaacacccaggagguguucgcccaggucaagcagaucuacaagacgcccccgaucaaggacuucgggggcuucaacuucagccagauccugcccgaccccuccaagcccagcaagcgguccuucaucgaggacauccucuucaacaaggugacccuggccgacgccggcuucaucaagcaguacggggacugccugggcgacaucgcggcccgcgaccucaucugcgcccagaaguucaacgggcugaccgugcugccgccccuccugaccgacgagaugaucgcccaguacaccagcgcccugcucgcgggcaccaucacguccggguggaccuucggcgccggcgccgcccugcagauccccuucgcgaugcagauggccuaccgguucaacgggaucggcgucacccagaacgugcuguacgagaaccagaagcucaucgccaaccaguucaacagcgccaucgggaagauccaggacucccugagcuccaccgccagcgcgcugggcaagcuccaggacguggucaaccagaacgcccaggcccugaacacgcuggugaagcagcucuccagcaacuucggggccaucuccagcgugcugaacgacauccugucccgccucgacaaggucgaggccgaggugcagaucgaccggcugaucaccggccgccugcagagccuccagaccuacgugacccagcagcugauccgggcggccgagauccgcgccagcgccaaccuggccgcgaccaagauguccgagugcguccucggccagagcaagcggguggacuucugcgggaagggcuaccaccugauguccuucccccagagcgccccgcacgggguggucuuccugcacgugacguacguccccgcccaggagaagaacuucaccaccgcccccgcgaucugccacgacggcaaggcccacuucccccgcgaggggguguucguguccaacggcacccacugguucgucacgcagcggaacuucuacgagccgcagaucaucaccaccgacaacaccuucgugagcggcaacugcgacguggucaucgggaucgugaacaacacgguguacgacccccuccagcccgagcuggacuccuucaaggaggagcuggacaaguacuucaagaaccacaccagccccgacgucgaccucggcgacaucuccgggaucaacgccagcguggugaacauccagaaggagaucgaccgccugaacgaggucgccaagaaccugaacgagucccucaucgaccugcaggagcugggcaaguacgagcaguacaucaaguggccgugguacaucuggcucggcuucaucgccgggcugaucgcgaucgugauggugaccaucaugcugugcugcaugaccagcugcugcuccugccucaagggcugcugcagcugcggguccugcugcaaguucgacgaggacgacagcgagcccguccugaagggcgugaagcugcacuacacgugaggacuagucccuguucccagagcccacuuuuuuuucuuuuuuugaaauaaaauagccugucuuucagaucucaaaggcucuuuucagagccaccaaaaaaaaaaaaaaaaaaaaaaaaaaaaaaaaaaaaaaaaaaaaaaaaaaaaaaaaaaaaaaaaaaaaaaaaaaaaaaaaaaaaaaaaaaaaaaaaaaaaa

SEQ ID NO: 12329 - RNA, 4094 nt, Artificial Sequence
  SARS-CoV-2/Congo/158/2020__EPI_ISL_417950 spike protein mRNA gc (1-1273)
aggagagucccgcagucggcguccagcggcucugcuuguucgugugugugucguugcaggccuuauucaagcuuaccauguucguguuccugguccuccugccccuggugagcucccagugcgugaaccucaccacccgcacgcagcugccgcccgccuacaccaacagcuucacccggggcgucuacuaccccgacaagguguuccgcuccagcgugcugcacuccacccaggaccucuuccugcccuucuucagcaacgucacgugguuccacgccauccacguguccgggaccaacggcaccaagcgguucgacaacccggugcugcccuucaacgacggggucuacuucgcgagcaccgagaaguccaacaucauccgcggcuggaucuucgggacgacccucgacagcaagacccagucccugcugaucgugaacaacgccaccaacguggucaucaaggugugcgaguuccaguucugcaacgaccccuuccucggcguguacuaccacaagaacaacaagagcuggauggaguccgaguuccgggucuacagcuccgccaacaacugcacguucgaguacgugagccagcccuuccugauggaccuggagggcaagcaggggaacuucaagaaccuccgcgaguucguguucaagaacaucgacggcuacuucaagaucuacuccaagcacaccccgaucaaccugguccgggaccugccccagggguucagcgcccucgagccccugguggaccugcccaucggcaucaacaucacccgcuuccagacccuccuggcccugcaccgguccuaccucacgccgggggacagcagcuccggcuggaccgcgggcgccgccgccuacuacgugggguaccugcagccccgcaccuuccugcucaaguacaacgagaacggcaccaucacggacgcggucgacugcgcccuggacccccugagcgagaccaagugcacccucaaguccuucaccguggagaaggggaucuaccagacgagcaacuuccgggugcagcccaccgaguccaucguccgcuucccgaacaucaccaaccugugccccuucggcgagguguucaacgccacccgguucgccagcgucuacgccuggaaccgcaagcggaucuccaacugcguggcggacuacagcgugcuguacaacuccgccagcuucuccacguucaagugcuacggcgucagccccaccaagcucaacgaccugugcuucaccaacguguacgccgacuccuucgugauccgcggggacgagguccggcagaucgcccccggccagaccgggaagaucgccgacuacaacuacaagcugccggacgacuucacgggcugcgugaucgcguggaacagcaacaaccucgacuccaaggucgggggcaacuacaacuaccuguaccgccuguuccgcaagagcaaccucaagcccuucgagcgggacaucuccaccgagaucuaccaggccggcagcacccccugcaacgggguggagggcuucaacugcuacuucccccugcaguccuacggguuccagccgaccaacggcgugggguaccagcccuaccggguggucgugcugagcuucgagcuccugcacgcccccgccacggugugcggccccaagaaguccaccaaccuggucaagaacaagugcgugaacuucaacuucaacggccucaccgggaccggcgugcugaccgagagcaacaagaaguuccugccguuccagcaguucgggcgcgacaucgccgacacgaccgacgcgguccgcgacccccagacccuggagauccucgacaucacccccugcagcuucggcgggguguccgugaucacgccgggcaccaacaccagcaaccaggucgccgugcuguaccaggacgugaacugcaccgagguccccguggccauccacgccgaccagcugacgcccaccuggcggguguacuccaccggcagcaacgucuuccagacccgcgccgggugccucaucggcgcggagcacgugaacaacuccuacgagugcgacauccccaucggggccggcaucugcgccagcuaccagacgcagaccaacuccccgcggcgcgcccggagcguggcgucccagagcaucaucgccuacaccaugucccugggcgccgagaacagcgucgccuacuccaacaacagcaucgccauccccaccaacuucacgaucuccgugaccaccgagauccugcccgugagcaugaccaagacgagcgucgacugcaccauguacaucugcggggacuccaccgagugcagcaaccuccugcugcaguacggcuccuucugcacccagcucaaccgcgcgcugacggggaucgccguggagcaggacaagaacacccaggagguguucgcccaggucaagcagaucuacaagacgcccccgaucaaggacuucggcggguucaacuucagccagauccugcccgaccccuccaagcccagcaagcgguccuucaucgaggaccuccuguucaacaaggugacccuggccgacgccggcuucaucaagcaguacggcgacugccucggggacaucgcggcccgcgaccugaucugcgcccagaaguucaacggccugaccgugcucccgccccugcugaccgacgagaugaucgcccaguacaccagcgcccuccuggcggggaccaucacguccggcuggaccuucggggccggcgccgcccugcagauccccuucgcgaugcagauggccuaccgguucaacggcaucggggucacccagaacgugcucuacgagaaccagaagcugaucgccaaccaguucaacagcgccaucggcaagauccaggacucccugagcuccaccgccagcgcgcucgggaagcugcaggacguggucaaccagaacgcccaggcccugaacacgcucgugaagcagcuguccagcaacuucggcgccaucuccagcgugcugaacgacauccucucccgccuggacaaggucgaggccgaggugcagaucgaccggcugaucaccgggcgccuccagagccugcagaccuacgugacccagcagcugauccgggcggccgagauccgcgccagcgccaaccucgccgcgaccaagauguccgagugcguccugggccagagcaagcggguggacuucugcggcaagggguaccaccugauguccuucccccagagcgccccgcacggcguggucuuccuccacgugacguacguccccgcccaggagaagaacuucaccaccgcccccgcgaucugccacgacgggaaggcccacuucccccgcgagggcguguucguguccaacgggacccacugguucgucacgcagcggaacuucuacgagccgcagaucaucaccaccgacaacaccuuccugagcggcaacugcgacguggugaucggcaucgucaacaacacgguguacgacccccugcagcccgagcucgacuccuucaaggaggagcuggacaaguacuucaagaaccacaccagccccgacguggaccugggggacaucuccggcaucaacgccagcgucgugaacauccagaaggagaucgaccgccucaacgagguggccaagaaccugaacgagucccugaucgaccuccaggagcuggggaaguacgagcaguacaucaaguggccgugguacaucuggcugggcuucaucgccggccucaucgcgaucgucauggugaccaucaugcugugcugcaugaccagcugcugcuccugccugaaggggugcugcagcugcggcuccugcugcaaguucgacgaggacgacagcgagcccgugcucaagggggucaagcugcacuacacgugaggacuagucccuguucccagagcccacuuuuuuuucuuuuuuugaaauaaaauagccugucuuucagaucucaaaggcucuuuucagagccaccaaaaaaaaaaaaaaaaaaaaaaaaaaaaaaaaaaaaaaaaaaaaaaaaaaaaaaaaaaaaaaaaaaaaaaaaaaaaaaaaaaaaaaaaaaaaaaaaaaaaa

SEQ ID NO: 12330 - RNA, 4094 nt, Artificial Sequence
  SARS-CoV-2/USA/UT-00034/2020__EPI_ISL_417977 spike protein mRNA gc (1-1273)
aggagagucccgcagucggcguccagcggcucugcuuguucgugugugugucguugcaggccuuauucaagcuuaccauguucguguuccugguccuccugccccuggugagcucccagugcgugaaccucaccacccgcacgcagcugccgcccgccuacaccaacagcuucacccggggcgucuacuaccccgacaagguguuccgcuccagcgugcugcacuccacccaggaccucuuccugcccuucuucagcaacgucacgugguuccacgccauccacguguccgggaccaacggcaccaagcgguucgacaacccggugcugcccuucaacgacggggucuacuucgcgagcaccgagaaguccaacaucauccgcggcuggaucuucgggacgacccucgacagcaagacccagucccugcugaucgugaacaacgccaccaacguggucaucaaggugugcgaguuccaguucugcaacgaccccuuccucggcguguacuacuacaagaacaacaagagcuggauggaguccgaguuccgggucuacagcuccgccaacaacugcacguucgaguacgugagccagcccuuccugauggaccuggagggcaagcaggggaacuucaagaaccuccgcgaguucguguucaagaacaucgacggcuacuucaagaucuacuccaagcacaccccgaucaaccugguccgggaccugccccagggguucagcgcccucgagccccugguggaccugcccaucggcaucaacaucacccgcuuccagacccuccuggcccugcaccgguccuaccucacgccgggggacagcagcuccggcuggaccgcgggcgccgccgccuacuacgugggguaccugcagccccgcaccuuccugcucaaguacaacgagaacggcaccaucacggacgcggucgacugcgcccuggacccccugagcgagaccaagugcacccucaaguccuucaccguggagaaggggaucuaccagacgagcaacuuccgggugcagcccaccgaguccaucguccgcuucccgaacaucaccaaccugugccccuucggcgagguguucaacgccacccgguucgccagcgucuacgccuggaaccgcaagcggaucuccaacugcguggcggacuacagcgugcuguacaacuccgccagcuucuccacguucaagugcuacggcgucagccccaccaagcucaacgaccugugcuucaccaacguguacgccgacuccuucgugauccgcggggacgagguccggcagaucgcccccggccagaccgggaagaucgccgacuacaacuacaagcugccggacgacuucacgggcugcgugaucgcguggaacagcaacaaccucgacuccaaggucgggggcaacuacaacuaccuguaccgccuguuccgcaagagcaaccucaagcccuucgagcgggacaucuccaccgagaucuaccaggccggcagcacccccugcaacgggguggagggcuucaacugcuacuucccccugcaguccuacggguuccagccgaccaacggcgugggguaccagcccuaccggguggucgugcugagcuucgagcuccugcacgcccccgccacggugugcggccccaagaaguccaccaaccuggucaagaacaagugcgugaacuucaacuucaacggccucaccgggaccggcgugcugaccgagagcaacaagaaguuccugccguuccagcaguucgggcgcgacaucgccgacacgaccgacgcgguccgcgacccccagacccuggagauccucgacaucacccccugcagcuucggcgggguguccgugaucacgccgggcaccaacaccagcaaccaggucgccgugcuguaccagggcgugaacugcaccgagguccccguggccauccacgccgaccagcugacgcccaccuggcggguguacuccaccgggagcaacgucuuccagacccgcgccggcugccucaucggggcggagcacgugaacaacuccuacgagugcgacauccccaucggcgccggcaucugcgccagcuaccagacgcagaccaacuccccgcggcgcgcccggagcguggcgucccagagcaucaucgccuacaccaugucccugggggccgagaacagcgucgccuacuccaacaacagcaucgccauccccaccaacuucacgaucuccgugaccaccgagauccugcccgugagcaugaccaagacgagcgucgacugcaccauguacaucugcggcgacuccaccgagugcagcaaccuccugcugcaguacggguccuucugcacccagcucaaccgcgcgcugacgggcaucgccguggagcaggacaagaacacccaggagguguucgcccaggucaagcagaucuacaagacgcccccgaucaaggacuucgggggcuucaacuucagccagauccugcccgaccccuccaagcccagcaagcgguccuucaucgaggaccuccuguucaacaaggugacccuggccgacgccggcuucaucaagcaguacggggacugccucggcgacaucgcggcccgcgaccugaucugcgcccagaaguucaacgggcugaccgugcucccgccccugcugaccgacgagaugaucgcccaguacaccagcgcccuccuggcgggcaccaucacguccggguggaccuucggcgccggcgccgcccugcagauccccuucgcgaugcagauggccuaccgguucaacgggaucggcgucacccagaacgugcucuacgagaaccagaagcugaucgccaaccaguucaacagcgccaucgggaagauccaggacucccugagcuccaccgccagcgcgcucggcaagcugcaggacguggucaaccagaacgcccaggcccugaacacgcucgugaagcagcuguccagcaacuucggggccaucuccagcgugcugaacgacauccucucccgccuggacaaggucgaggccgaggugcagaucgaccggcugaucaccggccgccuccagagccugcagaccuacgugacccagcagcugauccgggcggccgagauccgcgccagcgccaaccucgccgcgaccaagauguccgagugcguccugggccagagcaagcggguggacuucugcgggaagggcuaccaccugauguccuucccccagagcgccccgcacgggguggucuuccuccacgugacguacguccccgcccaggagaagaacuucaccaccgcccccgcgaucugccacgacggcaaggcccacuucccccgcgaggggguguucguguccaacggcacccacugguucgucacgcagcggaacuucuacgagccgcagaucaucaccaccgacaacaccuucgugagcggcaacugcgacguggucaucgggaucgugaacaacacgguguacgacccccugcagcccgagcuggacuccuucaaggaggagcucgacaaguacuucaagaaccacaccagccccgacgucgaccugggcgacaucuccgggaucaacgccagcguggugaacauccagaaggagaucgaccgccugaacgaggucgccaagaaccucaacgagucccugaucgaccugcaggagcucggcaaguacgagcaguacaucaaguggccgugguacaucuggcugggcuucaucgccgggcugaucgcgaucgugauggugaccaucaugcucugcugcaugaccagcugcugcuccugccugaagggcugcugcagcugcggguccugcugcaaguucgacgaggacgacagcgagcccguccugaagggcgugaagcuccacuacacgugaggacuagucccuguucccagagcccacuuuuuuuucuuuuuuugaaauaaaauagccugucuuucagaucucaaaggcucuuuucagagccaccaaaaaaaaaaaaaaaaaaaaaaaaaaaaaaaaaaaaaaaaaaaaaaaaaaaaaaaaaaaaaaaaaaaaaaaaaaaaaaaaaaaaaaaaaaaaaaaaaaaaa

SEQ ID NO: 12331 - RNA, 4094 nt, Artificial Sequence
  SARS-CoV-2/USA/UT-00033/2020__EPI_ISL_417976 spike protein mRNA gc (1-1273)
aggagagucccgcagucggcguccagcggcucugcuuguucgugugugugucguugcaggccuuauucaagcuuaccauguucguguuccugguccuccugccccuggugagcucccagugcgugaaccucaccacccgcacgcagcugccgcccgccuacaccaacagcuucacccggggcgucuacuaccccgacaagguguuccgcuccagcgugcugcacuccacccaggaccucuuccugcccuucuucagcaacgucacgugguuccacgccauccacguguccgggaccaacggcaccaagcgguucgacaacccggugcugcccuucaacgacggggucuacuucgcgagcaccgagaaguccaacaucauccgcggcuggaucuucgggacgacccucgacagcaagacccagucccugcugaucgugaacaacgccaccaacguggucaucaaggugugcgaguuccaguucugcaacgaccccuuccucggcguguacuaccacaagaacaacaagagcuggauggaguccgaguuccgggucuacagcuccgccaacaacugcacguucgaguacgugagccagcccuuccugauggaccuggagggcaagcaggggaacuucaagaaccuccgcgaguucguguucaagaacaucgacggcuacuucaagaucuacuccaagcacaccccgaucaaccugguccgggaccugccccagggguucagcgcccucgagccccugguggaccugcccaucggcaucaacaucacccgcuuccagacccuccuggcccugcaccgguccuaccucacgccgggggacagcagcuccggccugaccgcgggcgccgccgccuacuacgugggguaccugcagccccgcaccuuccuccugaaguacaacgagaacggcaccaucacggacgcggucgacugcgcccuggacccccucagcgagaccaagugcacccugaaguccuucaccguggagaaggggaucuaccagacgagcaacuuccgggugcagcccaccgaguccaucguccgcuucccgaacaucaccaaccugugccccuucggcgagguguucaacgccacccgguucgccagcgucuacgccuggaaccgcaagcggaucuccaacugcguggcggacuacagcgugcucuacaacuccgccagcuucuccacguucaagugcuacggcgucagccccaccaagcugaacgaccugugcuucaccaacguguacgccgacuccuucgugauccgcggggacgagguccggcagaucgcccccggccagaccgggaagaucgccgacuacaacuacaagcucccggacgacuucacgggcugcgugaucgcguggaacagcaacaaccuggacuccaaggucgggggcaacuacaacuaccuguaccgccucuuccgcaagagcaaccugaagcccuucgagcgggacaucuccaccgagaucuaccaggccggcagcacccccugcaacgggguggagggcuucaacugcuacuucccccugcaguccuacggguuccagccgaccaacggcgugggguaccagcccuaccggguggucgugcucagcuucgagcugcugcacgcccccgccacggugugcggccccaagaaguccaccaaccucgucaagaacaagugcgugaacuucaacuucaacggccugaccgggaccggcgugcugaccgagagcaacaagaaguuccugccguuccagcaguucgggcgcgacaucgccgacacgaccgacgcgguccgcgacccccagacccucgagauccuggacaucacccccugcagcuucggcgggguguccgugaucacgccgggcaccaacaccagcaaccaggucgccgugcuguaccagggcgugaacugcaccgagguccccguggccauccacgccgaccagcucacgcccaccuggcggguguacuccaccgggagcaacgucuuccagacccgcgccggcugccugaucggggcggagcacgugaacaacuccuacgagugcgacauccccaucggcgccggcaucugcgccagcuaccagacgcagaccaacuccccgcggcgcgcccggagcguggcgucccagagcaucaucgccuacaccaugucccugggggccgagaacagcgucgccuacuccaacaacagcaucgccauccccaccaacuucacgaucuccgugaccaccgagauccuccccgugagcaugaccaagacgagcgucgacugcaccauguacaucugcggcgacuccaccgagugcagcaaccugcugcuccaguacggguccuucugcacccagcugaaccgcgcgcugacgggcaucgccguggagcaggacaagaacacccaggagguguucgcccaggucaagcagaucuacaagacgcccccgaucaaggacuucgggggcuucaacuucagccagauccuccccgaccccuccaagcccagcaagcgguccuucaucgaggaccugcuguucaacaaggugacccucgccgacgccggcuucaucaagcaguacggggacugccugggcgacaucgcggcccgcgaccugaucugcgcccagaaguucaacgggcucaccgugcugccgccccugcucaccgacgagaugaucgcccaguacaccagcgcccugcuggcgggcaccaucacguccggguggaccuucggcgccggcgccgcccuccagauccccuucgcgaugcagauggccuaccgguucaacgggaucggcgucacccagaacgugcuguacgagaaccagaagcugaucgccaaccaguucaacagcgccaucgggaagauccaggacucccucagcuccaccgccagcgcgcugggcaagcugcaggacguggucaaccagaacgcccaggcccucaacacgcuggugaagcagcuguccagcaacuucggggccaucuccagcgugcucaacgacauccugucccgccuggacaaggucgaggccgaggugcagaucgaccggcucaucaccggccgccugcagagccugcagaccuacgugacccagcagcucauccgggcggccgagauccgcgccagcgccaaccuggccgcgaccaagauguccgagugcguccugggccagagcaagcggguggacuucugcgggaagggcuaccaccucauguccuucccccagagcgccccgcacgggguggucuuccugcacgugacguacguccccgcccaggagaagaacuucaccaccgcccccgcgaucugccacgacggcaaggcccacuucccccgcgaggggguguucguguccaacggcacccacugguucgucacgcagcggaacuucuacgagccgcagaucaucaccaccgacaacaccuucgugagcggcaacugcgacguggucaucgggaucgugaacaacacgguguacgacccccugcagcccgagcucgacuccuucaaggaggagcuggacaaguacuucaagaaccacaccagccccgacgucgaccugggcgacaucuccgggaucaacgccagcguggugaacauccagaaggagaucgaccgccucaacgaggucgccaagaaccugaacgagucccugaucgaccuccaggagcugggcaaguacgagcaguacaucaaguggccgugguacaucuggcugggcuucaucgccgggcucaucgcgaucgugauggugaccaucaugcugugcugcaugaccagcugcugcuccugccugaagggcugcugcagcugcggguccugcugcaaguucgacgaggacgacagcgagcccguccucaagggcgugaagcugcacuacacgugaggacuagucccuguucccagagcccacuuuuuuuucuuuuuuugaaauaaaauagccugucuuucagaucucaaaggcucuuuucagagccaccaaaaaaaaaaaaaaaaaaaaaaaaaaaaaaaaaaaaaaaaaaaaaaaaaaaaaaaaaaaaaaaaaaaaaaaaaaaaaaaaaaaaaaaaaaaaaaaaaaaaa

SEQ ID NO: 12332 - RNA, 4094 nt, Artificial Sequence
  SARS-CoV-2/USA/WI-13/2020__EPI_ISL_417516 spike protein mRNA gc (1-1273)
aggagagucccgcagucggcguccagcggcucugcuuguucgugugugugucguugcaggccuuauucaagcuuaccauguucguguuccugguccuccugccccuggugagcucccagugcgugaaccucaccacccgcacgcagcugccgcccgccuacaccaacagcuucacccggggcgucuacuaccccgacaagguguuccgcuccagcgugcugcacuccacccaggaccucuuccugcccuucuucagcaacgucacgugguuccacgccauccacguguccgggaccaacggcaccaagcgguucgacaacccggugcugcccuucaacgacggggucuacuucgcgagcaccgagaaguccaacaucauccgcggcuggaucuucgggacgacccucgacagcaagacccagucccugcugaucgugaacaacgccaccaacguggucaucaaggugugcgaguuccaguucugcaacgaccccuuccucggcguguacuaccacaagaacaacaagagcuggauggaguccgaguuccgggucuacagcuccgccaacaacugcacguucgaguacgugagccagcccuuccugauggaccuggagggcaagcaggggaacuucaagaaccuccgcgaguucguguucaagaacaucgacggcuacuucaagaucuacuccaagcacaccccgaucaaccugguccgggaccugccccagggguucagcgcccucgagccccugguggaccugcccaucggcaucaacaucacccgcuuccagacccuccuggcccugcaccgguccuaccucacgccgggggacagcagcuccggcuggaccgcgggcgccgccgccuacuacgugggguaccugcagccccgcaccuuccugcucaaguacaacgagaacggcaccaucacggacgcggucgacugcgcccuggacccccugagcgagaccaagugcacccucaaguccuucaccguggagaaggggaucuaccagacgagcaacuuccgggugcugcccaccgaguccaucguccgcuucccgaacaucaccaaccugugccccuucggcgagguguucaacgccacccgguucgccagcgucuacgccuggaaccgcaagcggaucuccaacugcguggcggacuacagcgugcucuacaacuccgccagcuucuccacguucaagugcuacggcgucagccccaccaagcugaacgaccugugcuucaccaacguguacgccgacuccuucgugauccgcggggacgagguccggcagaucgcccccggccagaccgggaagaucgccgacuacaacuacaagcucccggacgacuucacgggcugcgugaucgcguggaacagcaacaaccuggacuccaaggucgggggcaacuacaacuaccuguaccgccucuuccgcaagagcaaccugaagcccuucgagcgggacaucuccaccgagaucuaccaggccggcagcacccccugcaacgggguggagggcuucaacugcuacuucccccugcaguccuacggguuccagccgaccaacggcgugggguaccagcccuaccggguggucgugcucagcuucgagcugcugcacgcccccgccacggugugcggccccaagaaguccaccaaccucgucaagaacaagugcgugaacuucaacuucaacggccugaccgggaccggcgugcugaccgagagcaacaagaaguuccugccguuccagcaguucgggcgcgacaucgccgacacgaccgacgcgguccgcgacccccagacccucgagauccuggacaucacccccugcagcuucggcgggguguccgugaucacgccgggcaccaacaccagcaaccaggucgccgugcuguaccagggcgugaacugcaccgagguccccguggccauccacgccgaccagcucacgcccaccuggcggguguacuccaccgggagcaacgucuuccagacccgcgccggcugccugaucggggcggagcacgugaacaacuccuacgagugcgacauccccaucggcgccggcaucugcgccagcuaccagacgcagaccaacuccccgcggcgcgcccggagcguggcgucccagagcaucaucgccuacaccaugucccugggggccgagaacagcgucgccuacuccaacaacagcaucgccauccccaccaacuucacgaucuccgugaccaccgagauccuccccgugagcaugaccaagacgagcgucgacugcaccauguacaucugcggcgacuccaccgagugcagcaaccugcugcuccaguacggguccuucugcacccagcugaaccgcgcgcugacgggcaucgccguggagcaggacaagaacacccaggagguguucgcccaggucaagcagaucuacaagacgcccccgaucaaggacuucgggggcuucaacuucagccagauccuccccgaccccuccaagcccagcaagcgguccuucaucgaggaccugcuguucaacaaggugacccucgccgacgccggcuucaucaagcaguacggggacugccugggcgacaucgcggcccgcgaccugaucugcgcccagaaguucaacgggcucaccgugcugccgccccugcucaccgacgagaugaucgcccaguacaccagcgcccugcuggcgggcaccaucacguccggguggaccuucggcgccggcgccgcccuccagauccccuucgcgaugcagauggccuaccgguucaacgggaucggcgucacccagaacgugcuguacgagaaccagaagcugaucgccaaccaguucaacagcgccaucgggaagauccaggacucccucagcuccaccgccagcgcgcugggcaagcugcaggacguggucaaccagaacgcccaggcccucaacacgcuggugaagcagcuguccagcaacuucggggccaucuccagcgugcucaacgacauccugucccgccuggacaaggucgaggccgaggugcagaucgaccggcucaucaccggccgccugcagagccugcagaccuacgugacccagcagcucauccgggcggccgagauccgcgccagcgccaaccuggccgcgaccaagauguccgagugcguccugggccagagcaagcggguggacuucugcgggaagggcuaccaccucauguccuucccccagagcgccccgcacgggguggucuuccugcacgugacguacguccccgcccaggagaagaacuucaccaccgcccccgcgaucugccacgacggcaaggcccacuucccccgcgaggggguguucguguccaacggcacccacugguucgucacgcagcggaacuucuacgagccgcagaucaucaccaccgacaacaccuucgugagcggcaacugcgacguggucaucgggaucgugaacaacacgguguacgacccccugcagcccgagcucgacuccuucaaggaggagcuggacaaguacuucaagaaccacaccagccccgacgucgaccugggcgacaucuccgggaucaacgccagcguggugaacauccagaaggagaucgaccgccucaacgaggucgccaagaaccugaacgagucccugaucgaccuccaggagcugggcaaguacgagcaguacaucaaguggccgugguacaucuggcugggcuucaucgccgggcucaucgcgaucgugauggugaccaucaugcugugcugcaugaccagcugcugcuccugccugaagggcugcugcagcugcggguccugcugcaaguucgacgaggacgacagcgagcccguccucaagggcgugaagcugcacuacacgugaggacuagucccuguucccagagcccacuuuuuuuucuuuuuuugaaauaaaauagccugucuuucagaucucaaaggcucuuuucagagccaccaaaaaaaaaaaaaaaaaaaaaaaaaaaaaaaaaaaaaaaaaaaaaaaaaaaaaaaaaaaaaaaaaaaaaaaaaaaaaaaaaaaaaaaaaaaaaaaaaaaaa

SEQ ID NO: 12333 - RNA, 4091 nt, Artificial Sequence
  SARS-CoV-2/India/1-27/2020__EPI_ISL_413522 spike protein mRNA gc (1-1272)
aggagagucccgcagucggcguccagcggcucugcuuguucgugugugugucguugcaggccuuauucaagcuuaccauguucguguuccugguccuccugccccuggugagcucccagugcgugaaccucaccacccgcacgcagcugccgcccgccuacaccaacagcuucacccggggcgucuacuaccccgacaagguguuccgcuccagcgugcugcacuccacccaggaccucuuccugcccuucuucagcaacgucacgugguuccacgccauccacguguccgggaccaacggcaccaagcgguucgacaacccggugcugcccuucaacgacggggucuacuucgcgagcaccgagaaguccaacaucauccgcggcuggaucuucgggacgacccucgacagcaagacccagucccugcugaucgugaacaacgccaccaacguggucaucaaggugugcgaguuccaguucugcaacgaccccuuccucggcguguaccacaagaacaacaagagcuggauggaguccgaguuccgggucuacagcuccgccaacaacugcacguucgaguacgugagccagcccuuccugauggaccuggagggcaagcaggggaacuucaagaaccuccgcgaguucguguucaagaacaucgacggcuacuucaagaucuacuccaagcacaccccgaucaaccugguccgggaccugccccagggguucagcgcccucgagccccugguggaccugcccaucggcaucaacaucacccgcuuccagacccuccuggcccugcaccgguccuaccucacgccgggggacagcagcuccggcuggaccgcgggcgccgccgccuacuacgugggguaccugcagccccgcaccuuccugcucaaguacaacgagaacggcaccaucacggacgcggucgacugcgcccuggacccccugagcgagaccaagugcacccucaaguccuucaccguggagaaggggaucuaccagacgagcaacuuccgggugcagcccaccgaguccaucguccgcuucccgaacaucaccaaccugugccccuucggcgagguguucaacgccacccgguucgccagcgucuacgccuggaaccgcaagcggaucuccaacugcguggcggacuacagcgugcuguacaacuccgccagcuucuccacguucaagugcuacggcgucagccccaccaagcucaacgaccugugcuucaccaacguguacgccgacuccuucgugauccgcggggacgaggucauccagaucgcccccggccagaccgggaagaucgccgacuacaacuacaagcugccggacgacuucacgggcugcgugaucgcguggaacagcaacaaccucgacuccaaggucgggggcaacuacaacuaccuguaccggcuguuccgcaagagcaaccucaagcccuucgagcgggacaucuccaccgagaucuaccaggccggcagcacccccugcaacgggguggagggcuucaacugcuacuucccccugcaguccuacggguuccagccgaccaacggcgugggguaccagcccuaccgcguggucgugcugagcuucgagcuccugcacgcccccgccacggugugcggccccaagaaguccaccaaccuggucaagaacaagugcgugaacuucaacuucaacggccucaccgggaccggcgugcugaccgagagcaacaagaaguuccugccguuccagcaguucgggcgggacaucgccgacacgaccgacgcgguccgcgacccccagacccuggagauccucgacaucacccccugcagcuucggcgggguguccgugaucacgccgggcaccaacaccagcaaccaggucgccgugcuguaccaggacgugaacugcaccgagguccccguggccauccacgccgaccagcugacgcccaccuggcgcguguacuccaccggcagcaacgucuuccagacccgggccgggugccucaucggcgcggagcacgugaacaacuccuacgagugcgacauccccaucggggccggcaucugcgccagcuaccagacgcagaccaacuccccgcgccgggcccgcagcguggcgucccagagcaucaucgccuacaccaugucccugggcgccgagaacagcgucgccuacuccaacaacagcaucgccauccccaccaacuucacgaucuccgugaccaccgagauccugcccgugagcaugaccaagacgagcgucgacugcaccauguacaucugcggggacuccaccgagugcagcaaccuccugcugcaguacggcuccuucugcacccagcucaaccgggcgcugacggggaucgccguggagcaggacaagaacacccaggagguguucgcccaggucaagcagaucuacaagacgcccccgaucaaggacuucggcggguucaacuucagccagauccugcccgaccccuccaagcccagcaagcgcuccuucaucgaggaccuccuguucaacaaggugacccuggccgacgccggcuucaucaagcaguacggcgacugccucggggacaucgcggcccgggaccugaucugcgcccagaaguucaacggccugaccgugcucccgccccugcugaccgacgagaugaucgcccaguacaccagcgcccuccuggcggggaccaucacguccggcuggaccuucggggccggcgccgcccugcagauccccuucgcgaugcagauggccuaccgcuucaacggcaucggggucacccagaacgugcucuacgagaaccagaagcugaucgccaaccaguucaacagcgccaucggcaagauccaggacucccugagcuccaccgccagcgcgcucgggaagcugcaggacguggucaaccagaacgcccaggcccugaacacgcucgugaagcagcuguccagcaacuucggcgccaucuccagcgugcugaacgacauccucucccggcuggacaaggucgaggccgaggugcagaucgaccgccugaucaccgggcggcuccagagccugcagaccuacgugacccagcagcugauccgcgcggccgagauccgggccagcgccaaccucgccgcgaccaagauguccgagugcguccugggccagagcaagcgcguggacuucugcggcaagggguaccaccugauguccuucccccagagcgccccgcacggcguggucuuccuccacgugacguacguccccgcccaggagaagaacuucaccaccgcccccgcgaucugccacgacgggaaggcccacuucccccgggagggcguguucguguccaacgggacccacugguucgucacgcagcgcaacuucuacgagccgcagaucaucaccaccgacaacaccuucgugagcggcaacugcgacguggucaucggcaucgugaacaacacgguguacgacccccugcagcccgagcuggacuccuucaaggaggagcucgacaaguacuucaagaaccacaccagccccgacgucgaccugggggacaucuccggcaucaacgccagcguggugaacauccagaaggagaucgaccggcugaacgaggucgccaagaaccucaacgagucccugaucgaccugcaggagcucgggaaguacgagcaguacaucaaguggccgugguacaucuggcugggcuucaucgccggccugaucgcgaucgugauggugaccaucaugcucugcugcaugaccagcugcugcuccugccugaaggggugcugcagcugcggcuccugcugcaaguucgacgaggacgacagcgagcccguccugaagggggugaagcuccacuacacgugaggacuagucccuguucccagagcccacuuuuuuuucuuuuuuugaaauaaaauagccugucuuucagaucucaaaggcucuuuucagagccaccaaaaaaaaaaaaaaaaaaaaaaaaaaaaaaaaaaaaaaaaaaaaaaaaaaaaaaaaaaaaaaaaaaaaaaaaaaaaaaaaaaaaaaaaaaaaaaaaaaaaa

SEQ ID NO: 12334 - RNA, 4076 nt, Artificial Sequence
  SARS-CoV-2/pangolin/Guangxi/P4L/2017__EPI_ISL_410538 spike protein mRNA gc (1-1267)
aggagagucccgcagucggcguccagcggcucugcuuguucgugugugugucguugcaggccuuauucaagcuuaccauguucguguuccuguucguccucccccuggugagcucccagugcgugaaccugaccacccgcacgggcaucccgcccggguacaccaacagcuccacccggggcgucuacuaccccgacaagguguuccgcagcuccauccuccaccugacccaggaccuguuccuccccuucuucagcaacgugacgugguucaacaccaucaacuaccagggcggguucaagaaguucgacaacccgguccugcccuucaacgacgggguguacuucgccuccaccgagaaguccaacaucauccggggcuggaucuucggcaccacgcuggacgcccgcacccagagccuccugaucgugaacaacgcgaccaacgucgugaucaaggugugcgaguuccaguucugcaccgaccccuuccugggggucuacuaccacaacaacaacaagacguggguggagaacgaguuccggguguacagcuccgccaacaacugcaccuucgaguacaucagccagcccuuccucauggaccuggagggcaagcaggggaacuucaagaaccugcgcgaguucgucuucaagaacguggacggcuacuucaagaucuacuccaagcacaccccgaucgaccucgugcgggaccugccccgcggguucgccgcccuggagccccucgucgaccugcccaucggcaucaacaucacccgguuccagacgcugcucgcccugcaccgcagcuaccugaccccgggcaaccucgaguccggguggaccaccggcgcggccgccuacuacgugggguaccugcagcagcggacguuccugcucagcuacaaccagaacggcaccaucaccgacgccguggacugcucccuggacccccugagcgagaccaagugcacgcucaagucccugaccgucgagaagggcaucuaccagaccagcaacuuccgcgugcagcccaccaucagcaucgugcgguuccccaacaucacgaaccugugcccguucggggaggucuucaacgcguccaaguucgccagcguguacgccuggaaccgcaagcggaucuccaacugcgucgccgacuacagcgugcucuacaacuccaccagcuucuccaccuucaagugcuacggcgugagccccaccaagcugaacgaccugugcuucacgaacgucuacgccgacuccuucguggugaagggggacgagguccgccagaucgcgcccggccagaccggggugaucgccgacuacaacuacaagcuccccgacgacuucaccggcugcgugaucgccuggaacagcgucaagcaggacgcccugaccggcgggaacuacggcuaccuguaccgccucuuccggaaguccaagcugaagccguucgagcgggacaucagcacggagaucuaccaggccggguccacccccugcaacggccagguggggcugaacugcuacuacccccucgagcgcuacggcuuccaccccaccaccggcgugaacuaccagccguuccgggucguggugcugagcuucgagcugcucaacgggcccgcgaccgucugcggccccaagcuguccacgacccuggugaaggacaagugcgugaacuucaacuucaacgggcugaccggcaccgggguccucacgaccagcaagaagcaguuccugcccuuccagcaguucggccgcgacaucuccgacaccaccgacgccgugcgcgacccgcagacgcuggagauccucgacaucacccccugcagcuucggcgggguguccgucaucacccccggcaccaacacgagcaaccagguggccgugcuguaccaggacgucaacugcaccgaggugccgauggccauccacgccgagcagcugacccccgcguggcggguguacagcgccggggccaacgucuuccagacccgcgccggcugccucgugggcgccgagcacgugaacaacuccuacgagugcgacauccccgucggggcgggcaucugcgccagcuaccacuccaugagcucccugcggagcgugaaccagcgcuccaucaucgccuacacgaugagccugggggccgagaacuccguggcguacagcaacaacuccaucgccauccccaccaacuucaccaucagcgucaccacggagauccucccgguguccaugaccaagaccagcguggacugcaccauguacaucugcggcgacuccaucgagugcagcaaccugcugcuccaguacggguccuucugcacgcagcugaaccgggcccugaccggcaucgccgucgagcaggacaagaacacccaggagguguucgcccaggugaagcagaucuacaagaccccgcccaucaaggacuucggcggguucaacuucagccagauccuccccgaccccagcaagcccuccaagcgcagcuucaucgaggaccugcuguucaacaaggucacgcucgcggacgccggcuucaucaagcaguacggggacugccugggcgacaucgccgcccgggaccugaucugcgcccagaaguucaacgggcucaccgugcugccgccccugcucaccgacgagaugaucgcgcaguacaccuccgcccugcuggccggcacgaucaccagcggcuggaccuucggggccggcgccgcgcuccagauccccuucgccaugcagauggccuaccgcuucaacgggaucggcgugacccagaacguccuguacgagaaccagaagcugaucgccaaccaguucaacuccgcgaucgggaagauccaggacagccucuccagcacggccuccgcccugggcaagcugcaggacguggugaaccagaacgcccaggcccucaacacccuggucaagcagcugagcuccaacuucggcgcgaucagcuccgugcucaacgacauccugagccggcuggacaagguggaggccgagguccagaucgaccgccucaucaccgggcggcugcagucccugcagaccuacgugacccagcagcucauccgcgccgccgagauccgggccagcgcgaaccuggccgccacgaagauguccgagugcgugcugggccagagcaagcgcgucgacuucugcgggaagggcuaccaccucauguccuucccccagagcgcgccccacgggguggucuuccugcacgugaccuacgugcccgcccaggagaagaacuucaccaccgccccggccaucugccacgagggcaaggcccacuucccccgggagggcgucuucgugagcaacgggacgcacugguucaucacccagcgcaacuucuacgagccccagaucaucaccaccgacaacacguucguguccggcagcugcgacgucgugaucgggaucgugaacaacaccgucuacgacccccugcagccggagcucgacuccuucaaggaggagcuggacaaguacuucaagaaccacaccagccccgacguggaccugggcgacaucuccggcaucaacgccagcguggucaacauccagaaggagaucgaccggcucaacgagguggcgaagaaccugaacgagucccccaucgaccugcaggagcucgggaaguacgagcaguacaucaaguggcccugguacaucuggcugggcuucaucgccgggcugaucgccaucaucauggugaccaucaugcucugcugcaugacgagcugcugcuccugccugaagggcugcugcagcugcggguccugcugcaaguucgacgaggacgacagcgagccgguccugaagggcgugaagcuccacuacaccugaggacuagucccuguucccagagcccacuuuuuuuucuuuuuuugaaauaaaauagccugucuuucagaucucaaaggcucuuuucagagccaccaaaaaaaaaaaaaaaaaaaaaaaaaaaaaaaaaaaaaaaaaaaaaaaaaaaaaaaaaaaaaaaaaaaaaaaaaaaaaaaaaaaaaaaaaaaaaaaaaaaaa

SEQ ID NO: 12335 - RNA, 4076 nt, Artificial Sequence
  SARS-CoV-2/pangolin/Guangxi/P5L/2017__EPI_ISL_410540 spike protein mRNA gc (1-1267)
aggagagucccgcagucggcguccagcggcucugcuuguucgugugugugucguugcaggccuuauucaagcuuaccauguucguguuccuguucguccucccccuggugagcucccagugcgugaaccugaccacccgcacgggcaucccgcccggguacaccaacagcuccacccggggcgucuacuaccccgacaagguguuccgcagcuccauccuccaccugacccaggaccuguuccuccccuucuucagcaacgugacgugguucaacaccaucaacuaccagggcggguucaagaaguucgacaacccgguccugcccuucaacgacgggguguacuucgccuccaccgagaaguccaacaucauccggggcuggaucuucggcaccacgcuggacgcccgcacccagagccuccugaucgugaacaacgcgaccaacgucgugaucaaggugugcgaguuccaguucugcaccgaccccuuccugggggucuacuaccacaacaacaacaagacguggguggagaacgaguuccggguguacagcuccgccaacaacugcaccuucgaguacaucagccagcccuuccucauggaccuggagggcaagcaggggaacuucaagaaccugcgcgaguucgucuucaagaacguggacggcuacuucaagaucuacuccaagcacaccccgaucgaccucgugcgggaccugccccgcggguucgccgcccuggagccccucgucgaccugcccaucggcaucaacaucacccgguuccagacgcugcucgcccugcaccgcagcuaccugaccccgggcaagcucgaguccggguggaccaccggcgcggccgccuacuacgugggguaccugcagcagcggacguuccugcucagcuacaaccagaacggcaccaucaccgacgccguggacugcucccuggacccccugagcgagaccaagugcacgcucaagucccugaccgucgagaagggcaucuaccagaccagcaacuuccgcgugcagcccaccaucagcaucgugcgguuccccaacaucacgaaccugugcccguucggggaggucuucaacgcguccaaguucgccagcguguacgccuggaaccgcaagcggaucuccaacugcgucgccgacuacagcgugcucuacaacuccaccagcuucuccaccuucaagugcuacggcgugagccccaccaagcugaacgaccugugcuucacgaacgucuacgccgacuccuucguggugaagggggacgagguccgccagaucgcgcccggccagaccggggugaucgccgacuacaacuacaagcuccccgacgacuucaccggcugcgugaucgccuggaacagcgucaagcaggacgcccugaccggcgggaacuacggcuaccuguaccgccucuuccggaaguccaagcugaagccguucgagcgggacaucagcacggagaucuaccaggccggguccacccccugcaacggccagguggggcugaacugcuacuacccccucgagcgcuacggcuuccaccccaccaccggcgugaacuaccagccguuccgggucguggugcugagcuucgagcugcucaacgggcccgcgaccgucugcggccccaagcuguccacgacccuggugaaggacaagugcgugaacuucaacuucaacgggcugaccggcaccgggguccucacgaccagcaagaagcaguuccugcccuuccagcaguucggccgcgacaucuccgacaccaccgacgccgugcgcgacccgcagacgcuggagauccucgacaucacccccugcagcuucggcgggguguccgucaucacccccggcaccaacacgagcaaccagguggccgugcuguaccaggacgucaacugcaccgaggugccgauggccauccacgccgagcagcugacccccgcguggcggguguacagcgccggggccaacgucuuccagacccgcgccggcugccucgugggcgccgagcacgugaacaacuccuacgagugcgacauccccgucggggcgggcaucugcgccagcuaccacuccaugagcuccuuccggagcgugaaccagcgcuccaucaucgccuacacgaugagccugggggccgagaacuccguggcguacagcaacaacuccaucgccauccccaccaacuucaccaucagcgucaccacggagauccugccgguguccaugaccaagaccagcguggacugcaccauguacaucugcggcgacuccaucgagugcagcaaccuccugcugcaguacggguccuucugcacgcagcucaaccgggcccugaccggcaucgccgucgagcaggacaagaacacccaggagguguucgcccaggugaagcagaucuacaagaccccgcccaucaaggacuucggcggguucaacuucagccagauccugcccgaccccagcaagcccuccaagcgcagcuucaucgaggaccuccuguucaacaaggucacgcuggcggacgccggcuucaucaagcaguacggggacugccucggcgacaucgccgcccgggaccugaucugcgcccagaaguucaacgggcugaccgugcucccgccccugcugaccgacgagaugaucgcgcaguacaccuccgcccuccuggccggcacgaucaccagcggcuggaccuucggggccggcgccgcgcugcagauccccuucgccaugcagauggccuaccgcuucaacgggaucggcgugacccagaacguccucuacgagaaccagaagcugaucgccaaccaguucaacuccgcgaucgggaagauccaggacagccuguccagcacggccuccgcccucggcaagcugcaggacguggugaaccagaacgcccaggcccugaacacccucgucaagcagcugagcuccaacuucggcgcgaucagcuccgugcugaacgacauccucagccggcuggacaagguggaggccgagguccagaucgaccgccugaucaccgggcggcuccagucccugcagaccuacgugacccagcagcugauccgcgccgccgagauccgggccagcgcgaaccucgccgccacgaagauguccgagugcgugcugggccagagcaagcgcgucgacuucugcgggaagggcuaccaccugauguccuucccccagagcgcgccccacgggguggucuuccuccacgugaccuacgugcccgcccaggagaagaacuucaccaccgccccggccaucugccacgagggcaaggcccacuucccccgggagggcgucuucgugagcaacgggacgcacugguucaucacccagcgcaacuucuacgagccccagaucaucaccaccgacaacacguucguguccggcagcugcgacgucgugaucgggaucgugaacaacaccgucuacgacccccugcagccggagcuggacuccuucaaggaggagcucgacaaguacuucaagaaccacaccagccccgacguggaccugggcgacaucuccggcaucaacgccagcguggucaacauccagaaggagaucgaccggcugaacgagguggcgaagaaccucaacgagucccugaucgaccugcaggagcucgggaaguacgagcaguacaucaaguggcccugguacaucuggcugggcuucaucgccgggcugaucgccaucaucauggugaccaucaugcucugcugcaugacgagcugcugcuccugccugaagggcugcugcagcugcggguccugcugcaaguucgacgaggacgacagcgagcccguccugaagggcgugaagcuccacuacaccugaggacuagucccuguucccagagcccacuuuuuuuucuuuuuuugaaauaaaauagccugucuuucagaucucaaaggcucuuuucagagccaccaaaaaaaaaaaaaaaaaaaaaaaaaaaaaaaaaaaaaaaaaaaaaaaaaaaaaaaaaaaaaaaaaaaaaaaaaaaaaaaaaaaaaaaaaaaaaaaaaaaaa

SEQ ID NO: 12336 - RNA, 4076 nt, Artificial Sequence
  SARS-CoV-2/pangolin/Guangxi/P5E/2017__EPI_ISL_410541 spike protein mRNA gc (1-1267)
aggagagucccgcagucggcguccagcggcucugcuuguucgugugugugucguugcaggccuuauucaagcuuaccauguucguguuccuguucguccucccccuggugagcucccagugcgugaaccugaccacccgcacgggcaucccgcccggguacaccaacagcuccacccggggcgucuacuaccccgacaagguguuccgcagcuccauccuccaccugacccaggaccuguuccuccccuucuucagcaacgugacgugguucaacaccaucaccuaccagggcggguccaagaaguucgacaacccgguccugcccuucaacgacgggguguacuucgccagcaccgagaaguccaacaucauccggggcuggaucuucggcacgacccuggacgcccgcacccagagccuccugaucgugaacaacgcgaccaacgucgugaucaaggugugcgaguuccaguucugcacggaccccuuccugggggucuacuaccacaacaacaacaagaccuggguggagaacgaguuccggguguacuccagcgccaacaacugcaccuucgaguacaucucccagcccuuccucauggaccuggagggcaagcaggggaacuucaagaaccugcgcgaguucgucuucaagaacguggacggcuacuucaagaucuacagcaagcacaccccgaucgaccucgugcgggaccugccccgcggguucgccgcccuggagccccucgucgaccugcccaucggcaucaacaucacgcgguuccagacccugcucgcccugcaccgcuccuaccugaccccgggcaagcucgagagcggguggaccacgggcgcggccgccuacuacgugggguaccugcagcagcggaccuuccugcucuccuacaaccagaacggcaccaucaccgacgccguggacugcagccuggacccccuguccgagacgaagugcacccucaagagccugaccgucgagaagggcaucuaccagaccagcaacuuccgcgugcagcccacgaucuccaucgugcgguuccccaacaucaccaaccugugcccguucggggaggucuucaacgcgagcaaguucgccuccguguacgccuggaaccgcaagcggaucagcaacugcgucgccgacuacuccgugcucuacaacagcaccuccuucagcaccuucaagugcuacggcgugucccccacgaagcugaacgaccugugcuucaccaacgucuacgccgacagcuucguggugaagggggacgagguccgccagaucgcgcccggccagaccggggugaucgccgacuacaacuacaagcuccccgacgacuucaccggcugcgugaucgccuggaacuccgucaagcaggacgcccugacgggcgacaacuacggguaccuguaccggcuguuccgcaagagcaagcucaagccguucgagcgggacaucuccaccgagaucuaccaggccggcagcacccccugcaacggccagguggggcugaacugcuacuacccccucgagcgcuacggguuccaccccaccaccggcgugaacuaccagccguuccgggucguggugcuguccuucgagcugcucaacggccccgcgacggucugcgggcccaagcugagcaccacccuggugaaggacaagugcgugaacuucaacuucaacggccugaccgggacgggcguccucaccaccuccaagaagcaguuccugcccuuccagcaguucgggcgcgacaucagcgacaccacggacgccgugcgcgacccgcagacccuggagauccucgacaucacccccugcuccuucggcggcgugagcgucaucacccccgggacgaacaccagcaaccagguggccgugcuguaccaggacgucaacugcaccgaggugccgauggccauccacgccgagcagcugacccccgcguggcggguguacuccgccggcgccaacgucuuccagacgcgcgccgggugccucgugggcgccgagcacgugaacaacagcuacgagugcgacauccccgucggcgcggggaucugcgccuccuaccacagcauguccagcuuccgguccgugaaccagcgcagcaucaucgccuacaccaugucccugggcgccgagaacagcguggcguacuccaacaacagcaucgccauccccaccaacuucaccaucuccgucacgaccgagauccugccggugagcaugaccaagaccuccguggacugcacgauguacaucugcggggacagcaucgagugcuccaaccuccugcugcaguacggcagcuucugcacccagcucaaccgggcccugaccgggaucgccgucgagcaggacaagaacacccaggagguguucgcccaggugaagcagaucuacaagacgccgcccaucaaggacuucggcggcuucaacuucagccagauccugcccgaccccuccaagcccagcaagcgcuccuucaucgaggaccuccuguucaacaaggucacccuggcggacgccggguucaucaagcaguacggcgacugccucggggacaucgccgcccgggaccugaucugcgcccagaaguucaacggccugaccgugcucccgccccugcugaccgacgagaugaucgcgcaguacacgagcgcccuccuggccgggaccaucaccuccggcuggaccuucggcgccggggccgcgcugcagauccccuucgccaugcagauggccuaccgcuucaacggcaucggggugacgcagaacguccucuacgagaaccagaagcugaucgccaaccaguucaacagcgcgaucggcaagauccaggacucccugagcuccaccgccagcgcccucgggaagcugcaggacguggugaaccagaacgcccaggcccugaacacccucgucaagcagcuguccagcaacuucggcgcgaucuccagcgugcugaacgacauccucucccggcuggacaagguggaggccgagguccagaucgaccgccugaucaccggccggcuccagagccugcagaccuacgugacgcagcagcugauccgcgccgccgagauccgggccuccgcgaaccucgccgccaccaagaugagcgagugcgugcuggggcaguccaagcgcgucgacuucugcggcaagggguaccaccugaugagcuucccccagagcgcgccccacggcguggucuuccuccacgugaccuacgugcccgcccaggagaagaacuucaccacggccccggccaucugccacgaggggaaggcccacuucccccgggagggcgucuucguguccaacggcacccacugguucaucacccagcgcaacuucuacgagccccagaucaucaccacggacaacaccuucgugagcggguccugcgacgucgugaucggcaucgugaacaacaccgucuacgacccccugcagccggagcuggacagcuucaaggaggagcucgacaaguacuucaagaaccacaccucccccgacguggaccugggggacaucagcggcaucaacgccuccguggucaacauccagaaggagaucgaccggcugaacgagguggcgaagaaccucaacgagagccugaucgaccugcaggagcucggcaaguacgagcaguacaucaaguggcccugguacaucuggcugggguucaucgccggccugaucgccaucaucauggugacgaucaugcucugcugcaugaccuccugcugcagcugccugaaggggugcugcuccugcggcagcugcugcaaguucgacgaggacgacuccgagcccguccugaagggggugaagcuccacuacaccugaggacuagucccuguucccagagcccacuuuuuuuucuuuuuuugaaauaaaauagccugucuuucagaucucaaaggcucuuuucagagccaccaaaaaaaaaaaaaaaaaaaaaaaaaaaaaaaaaaaaaaaaaaaaaaaaaaaaaaaaaaaaaaaaaaaaaaaaaaaaaaaaaaaaaaaaaaaaaaaaaaaaa

SEQ ID NO: 12337 - RNA, 4070 nt, Artificial Sequence
  SARS-CoV-2/pangolin/Guangxi/P1E/2017__EPI_ISL_410539 spike protein mRNA gc (1-1265)
aggagagucccgcagucggcguccagcggcucugcuuguucgugugugugucguugcaggccuuauucaagcuuaccauguucguguuccuguucguccucccccuggugagcucccagugcgugaaccugaccacccgcacgggcauccagccgggguacaccaacagcuccacccggggcgucuacuaccccgacaagguguuccgcagcuccauccuccaccugacccaggaccuguuccuccccuucuucagcaacgugacgugguucaacaccaucaacuaccagggcggguucaagaaguucgacaaccccguccugccguucaacgacgggguguacuucgccuccaccgagaaguccaacaucauccggggcuggaucuucggcaccacgcuggacgcccgcacccagagccuccugaucgugaacaacgcgaccaacgucgugaucaaggugugcgaguuccaguucugcaccgaccccuuccugggggucuacuaccacaacaacaacaagacguggguggagaacgaguuccggguguacagcuccgccaacaacugcaccuucgaguacaucagccagcccuuccucauggaccuggagggcaagcaggggaacuucaagaaccugcgcgaguucgucuucaagaacguggacggcuacuucaagaucuacuccaagcacacccccaucgaccucgugcgggaccugccgcgcggguucgccgcccuggagccccucgucgaccugcccaucggcaucaacaucacccgguuccagacgcugcucgcccugcaccgcagcuaccugacccccggcaagcucgaguccggguggaccaccggcgcggccgccuacuacgugggguaccugcagcagcggacguuccugcucagcuacaaccagaacggcaccaucaccgacgccguggacugcucccuggacccgcugagcgagaccaagugcacgcucaagucccugaccgucgagaagggcaucuaccagaccagcaacuuccgcgugcagcccaccaucagcaucgugcgguuccccaacaucacgaaccugugccccuucggggaggucuucaacgcguccaaguucgccagcguguacgccuggaaccgcaagcggaucuccaacugcgucgccgacuacagcgugcucuacaacuccaccagcuucuccaccuucaagugcuacggcgugagcccgaccaagcugaacgaccugugcuucacgaacgucuacgccgacuccuucguggugaagggggacgagguccgccagaucgcgcccggccagaccggggugaucgccgacuacaacuacaagcuccccgacgacuucaccggcugcgugaucgccuggaacagcgucaagcaggacgcccugaccggcgggaacuaccuguaccgccucuuccggaaguccaagcugaagcccuucgagcgggacaucagcacggagaucuaccaggccggcuccaccccgugcaacggccagguggggcugaacugcuacuacccccucgagcgcuacggguuccaccccaccaccggcgugaacuaccagcccuuccgggucguggugcugagcuucgagcugcucaacggcccggcgaccgucugcgggcccaagcuguccacgacccuggugaaggacaagugcgugaacuucaacuucaacggccugaccgggaccggcguccucacgaccagcaagaagcaguuccugcccuuccagcaguucgggcgcgacaucuccgacaccaccgacgccgugcgcgacccccagacgcuggagauccucgacaucaccccgugcagcuucggcggcguguccgucaucacccccgggaccaacacgagcaaccagguggccgugcuguaccaggacgucaacugcaccgaggugcccauggccauccacgccgagcagcugaccccggcguggcggguguacagcgccggcgccaacgucuuccagacccgcgccgggugccucgugggcgccgagcacgugaacaacuccuacgagugcgacauccccgucggcgcggggaucugcgccagcuaccacuccaugagcucccugcggagcgugaaccagcgcuccaucaucgccuacacgaugagccugggcgccgagaacuccguggcguacagcaacaacuccaucgccauccccaccaacuucaccaucagcgucaccacggagauccuccccguguccaugaccaagaccagcguggacugcaccauguacaucugcggggacuccaucgagugcagcaaccugcugcuccaguacggcuccuucugcacgcagcugaaccgggcccugaccgggaucgccgucgagcaggacaagaacacccaggagguguucgcccaggugaagcagaucuacaagaccccgcccaucaaggacuucggcggcuucaacuucagccagauccuccccgaccccagcaagccguccaagcgcagcuucaucgaggaccugcuguucaacaaggucacgcucgcggacgccggguucaucaagcaguacggcgacugccugggggacaucgccgcccgggaccugaucugcgcccagaaguucaacggccucaccgugcugccgccccugcucaccgacgagaugaucgcgcaguacaccuccgcccugcuggccgggacgaucaccagcggcuggaccuucggcgccggggccgcgcuccagauccccuucgccaugcagauggccuaccgcuucaacggcaucggggugacccagaacguccuguacgagaaccagaagcugaucgccaaccaguucaacuccgcgaucggcaagauccaggacagccucuccagcacggccuccgcccuggggaagcugcaggacguggugaaccagaacgcccaggcccucaacacccuggucaagcagcugagcuccaacuucggcgcgaucagcuccgugcucaacgacauccugagccggcuggacaagguggaggccgagguccagaucgaccgccucaucaccggccggcugcagucccugcagaccuacgugacccagcagcucauccgcgccgccgagauccgggccagcgcgaaccuggccgccacgaagauguccgagugcgugcuggggcagagcaagcgcgucgacuucugcggcaagggguaccaccucauguccuucccccagagcgcgccccacggcguggucuuccugcacgugaccuacgugcccgcccaggagaagaacuucaccaccgcccccgccaucugccacgaggggaaggcccacuucccgcgggagggcgucuucgugagcaacggcacgcacugguucaucacccagcgcaacuucuacgagccccagaucaucaccaccgacaacacguucguguccgggagcugcgacgucgugaucggcaucgugaacaacaccgucuacgacccccugcagcccgagcucgacuccuucaaggaggagcuggacaaguacuucaagaaccacaccagcccggacguggaccugggggacaucuccggcaucaacgccagcguggucaacauccagaaggagaucgaccggcucaacgagguggcgaagaaccugaacgagucccugaucgaccuccaggagcugggcaaguacgagcaguacaucaaguggcccugguacaucuggcugggguucaucgccggccucaucgccaucaucauggugaccaucaugcugugcugcaugacgagcugcugcuccugccugaaggggugcugcagcugcggcuccugcugcaaguucgacgaggacgacagcgagcccguccucaagggggugaagcugcacuacaccugaggacuagucccuguucccagagcccacuuuuuuuucuuuuuuugaaauaaaauagccugucuuucagaucucaaaggcucuuuucagagccaccaaaaaaaaaaaaaaaaaaaaaaaaaaaaaaaaaaaaaaaaaaaaaaaaaaaaaaaaaaaaaaaaaaaaaaaaaaaaaaaaaaaaaaaaaaaaaaaaaaaaa

SEQ ID NO: 12338 - RNA, 4094 nt, Artificial Sequence; identical to SEQ ID NO: 149
  SARS-CoV-2/Wuhan/WIV05/2019__EPI_ISL_402128 spike protein mRNA gc (1-1273)(K986P_V987P) R9487, R9491, R9709, R10159, R10160

SEQ ID NO: 12339 - RNA, 4094 nt, Artificial Sequence
  SARS-CoV-2/Wuhan/WIV05/2019__EPI_ISL_402128 spike protein mRNA gc (1-1273)(K986P_V987P_T887WN_A1020W)
aggagagucccgcagucggcguccagcggcucugcuuguucgugugugugucguugcaggccuuauucaagcuuaccauguucguguuccugguccuccugccccuggugagcucccagugcgugaaccucaccacccgcacgcagcugccgcccgccuacaccaacagcuucacccggggcgucuacuaccccgacaagguguuccgcuccagcgugcugcacuccacccaggaccucuuccugcccuucuucagcaacgucacgugguuccacgccauccacguguccgggaccaacggcaccaagcgguucgacaacccggugcugcccuucaacgacggggucuacuucgcgagcaccgagaaguccaacaucauccgcggcuggaucuucgggacgacccucgacagcaagacccagucccugcugaucgugaacaacgccaccaacguggucaucaaggugugcgaguuccaguucugcaacgaccccuuccucggcguguacuaccacaagaacaacaagagcuggauggaguccgaguuccgggucuacagcuccgccaacaacugcacguucgaguacgugagccagcccuuccugauggaccuggagggcaagcaggggaacuucaagaaccuccgcgaguucguguucaagaacaucgacggcuacuucaagaucuacuccaagcacaccccgaucaaccugguccgggaccugccccagggguucagcgcccucgagccccugguggaccugcccaucggcaucaacaucacccgcuuccagacccuccuggcccugcaccgguccuaccucacgccgggggacagcagcuccggcuggaccgcgggcgccgccgccuacuacgugggguaccugcagccccgcaccuuccugcucaaguacaacgagaacggcaccaucacggacgcggucgacugcgcccuggacccccugagcgagaccaagugcacccucaaguccuucaccguggagaaggggaucuaccagacgagcaacuuccgggugcagcccaccgaguccaucguccgcuucccgaacaucaccaaccugugccccuucggcgagguguucaacgccacccgguucgccagcgucuacgccuggaaccgcaagcggaucuccaacugcguggcggacuacagcgugcuguacaacuccgccagcuucuccacguucaagugcuacggcgucagccccaccaagcucaacgaccugugcuucaccaacguguacgccgacuccuucgugauccgcggggacgagguccggcagaucgcccccggccagaccgggaagaucgccgacuacaacuacaagcugccggacgacuucacgggcugcgugaucgcguggaacagcaacaaccucgacuccaaggucgggggcaacuacaacuaccuguaccgccuguuccgcaagagcaaccucaagcccuucgagcgggacaucuccaccgagaucuaccaggccggcagcacccccugcaacgggguggagggcuucaacugcuacuucccccugcaguccuacggguuccagccgaccaacggcgugggguaccagcccuaccggguggucgugcugagcuucgagcuccugcacgcccccgccacggugugcggccccaagaaguccaccaaccuggucaagaacaagugcgugaacuucaacuucaacggccucaccgggaccggcgugcugaccgagagcaacaagaaguuccugccguuccagcaguucgggcgcgacaucgccgacacgaccgacgcgguccgcgacccccagacccuggagauccucgacaucacccccugcagcuucggcgggguguccgugaucacgccgggcaccaacaccagcaaccaggucgccgugcuguaccaggacgugaacugcaccgagguccccguggccauccacgccgaccagcugacgcccaccuggcggguguacuccaccggcagcaacgucuuccagacccgcgccgggugccucaucggcgcggagcacgugaacaacuccuacgagugcgacauccccaucggggccggcaucugcgccagcuaccagacgcagaccaacuccccgcggcgcgcccggagcguggcgucccagagcaucaucgccuacaccaugucccugggcgccgagaacagcgucgccuacuccaacaacagcaucgccauccccaccaacuucacgaucuccgugaccaccgagauccugcccgugagcaugaccaagacgagcgucgacugcaccauguacaucugcggggacuccaccgagugcagcaaccuccugcugcaguacggcuccuucugcacccagcucaaccgcgcgcugacggggaucgccguggagcaggacaagaacacccaggagguguucgcccaggucaagcagaucuacaagacgcccccgaucaaggacuucggcggguucaacuucagccagauccugcccgaccccuccaagcccagcaagcgguccuucaucgaggaccuccuguucaacaaggugacccuggccgacgccggcuucaucaagcaguacggcgacugccucggggacaucgcggcccgcgaccugaucugcgcccagaaguucaacggccugaccgugcucccgccccugcugaccgacgagaugaucgcccaguacaccagcgcccuccuggcggggaccaucacguccggcuggugguucggggccggcgccgcccugcagauccccuucgcgaugcagauggccuaccgguucaacggcaucggggucacccagaacgugcucuacgagaaccagaagcugaucgccaaccaguucaacagcgccaucggcaagauccaggacucccugagcuccaccgccagcgcgcucgggaagcugcaggacguggucaaccagaacgcccaggcccugaacacgcucgugaagcagcuguccagcaacuucggcgccaucuccagcgugcugaacgacauccucucccgccuggacccgcccgaggccgaggugcagaucgaccggcugaucaccgggcgccuccagagccugcagaccuacgugacccagcagcugauccgggcggccgagauccgcuggagcgccaaccucgccgcgaccaagauguccgagugcguccugggccagagcaagcggguggacuucugcggcaagggguaccaccugauguccuucccccagagcgccccgcacggcguggucuuccuccacgugacguacguccccgcccaggagaagaacuucaccaccgcccccgcgaucugccacgacgggaaggcccacuucccccgcgagggcguguucguguccaacgggacccacugguucgucacgcagcggaacuucuacgagccgcagaucaucaccaccgacaacaccuucgugagcggcaacugcgacguggucaucggcaucgugaacaacacgguguacgacccccugcagcccgagcuggacuccuucaaggaggagcucgacaaguacuucaagaaccacaccagccccgacgucgaccugggggacaucuccggcaucaacgccagcguggugaacauccagaaggagaucgaccgccugaacgaggucgccaagaaccucaacgagucccugaucgaccugcaggagcucgggaaguacgagcaguacaucaaguggccgugguacaucuggcugggcuucaucgccggccugaucgcgaucgugauggugaccaucaugcucugcugcaugaccagcugcugcuccugccugaaggggugcugcagcugcggcuccugcugcaaguucgacgaggacgacagcgagcccguccugaagggggugaagcuccacuacacgugaggacuagucccuguucccagagcccacuuuuuuuucuuuuuuugaaauaaaauagccugucuuucagaucucaaaggcucuuuucagagccaccaaaaaaaaaaaaaaaaaaaaaaaaaaaaaaaaaaaaaaaaaaaaaaaaaaaaaaaaaaaaaaaaaaaaaaaaaaaaaaaaaaaaaaaaaaaaaaaaaaaaa

SEQ ID NO: 12340 - RNA, 4094 nt, Artificial Sequence
  SARS-CoV-2/Wuhan/WIV05/2019__EPI_ISL_402128 spike protein mRNA gc (1-1273)(K986P_V987P_P1069F)
aggagagucccgcagucggcguccagcggcucugcuuguucgugugugugucguugcaggccuuauucaagcuuaccauguucguguuccugguccuccugccccuggugagcucccagugcgugaaccucaccacccgcacgcagcugccgcccgccuacaccaacagcuucacccggggcgucuacuaccccgacaagguguuccgcuccagcgugcugcacuccacccaggaccucuuccugcccuucuucagcaacgucacgugguuccacgccauccacguguccgggaccaacggcaccaagcgguucgacaacccggugcugcccuucaacgacggggucuacuucgcgagcaccgagaaguccaacaucauccgcggcuggaucuucgggacgacccucgacagcaagacccagucccugcugaucgugaacaacgccaccaacguggucaucaaggugugcgaguuccaguucugcaacgaccccuuccucggcguguacuaccacaagaacaacaagagcuggauggaguccgaguuccgggucuacagcuccgccaacaacugcacguucgaguacgugagccagcccuuccugauggaccuggagggcaagcaggggaacuucaagaaccuccgcgaguucguguucaagaacaucgacggcuacuucaagaucuacuccaagcacaccccgaucaaccugguccgggaccugccccagggguucagcgcccucgagccccugguggaccugcccaucggcaucaacaucacccgcuuccagacccuccuggcccugcaccgguccuaccucacgccgggggacagcagcuccggcuggaccgcgggcgccgccgccuacuacgugggguaccugcagccccgcaccuuccugcucaaguacaacgagaacggcaccaucacggacgcggucgacugcgcccuggacccccugagcgagaccaagugcacccucaaguccuucaccguggagaaggggaucuaccagacgagcaacuuccgggugcagcccaccgaguccaucguccgcuucccgaacaucaccaaccugugccccuucggcgagguguucaacgccacccgguucgccagcgucuacgccuggaaccgcaagcggaucuccaacugcguggcggacuacagcgugcuguacaacuccgccagcuucuccacguucaagugcuacggcgucagccccaccaagcucaacgaccugugcuucaccaacguguacgccgacuccuucgugauccgcggggacgagguccggcagaucgcccccggccagaccgggaagaucgccgacuacaacuacaagcugccggacgacuucacgggcugcgugaucgcguggaacagcaacaaccucgacuccaaggucgggggcaacuacaacuaccuguaccgccuguuccgcaagagcaaccucaagcccuucgagcgggacaucuccaccgagaucuaccaggccggcagcacccccugcaacgggguggagggcuucaacugcuacuucccccugcaguccuacggguuccagccgaccaacggcgugggguaccagcccuaccggguggucgugcugagcuucgagcuccugcacgcccccgccacggugugcggccccaagaaguccaccaaccuggucaagaacaagugcgugaacuucaacuucaacggccucaccgggaccggcgugcugaccgagagcaacaagaaguuccugccguuccagcaguucgggcgcgacaucgccgacacgaccgacgcgguccgcgacccccagacccuggagauccucgacaucacccccugcagcuucggcgggguguccgugaucacgccgggcaccaacaccagcaaccaggucgccgugcuguaccaggacgugaacugcaccgagguccccguggccauccacgccgaccagcugacgcccaccuggcggguguacuccaccggcagcaacgucuuccagacccgcgccgggugccucaucggcgcggagcacgugaacaacuccuacgagugcgacauccccaucggggccggcaucugcgccagcuaccagacgcagaccaacuccccgcggcgcgcccggagcguggcgucccagagcaucaucgccuacaccaugucccugggcgccgagaacagcgucgccuacuccaacaacagcaucgccauccccaccaacuucacgaucuccgugaccaccgagauccugcccgugagcaugaccaagacgagcgucgacugcaccauguacaucugcggggacuccaccgagugcagcaaccuccugcugcaguacggcuccuucugcacccagcucaaccgcgcgcugacggggaucgccguggagcaggacaagaacacccaggagguguucgcccaggucaagcagaucuacaagacgcccccgaucaaggacuucggcggguucaacuucagccagauccugcccgaccccuccaagcccagcaagcgguccuucaucgaggaccuccuguucaacaaggugacccuggccgacgccggcuucaucaagcaguacggcgacugccucggggacaucgcggcccgcgaccugaucugcgcccagaaguucaacggccugaccgugcucccgccccugcugaccgacgagaugaucgcccaguacaccagcgcccuccuggcggggaccaucacguccggcuggaccuucggggccggcgccgcccugcagauccccuucgcgaugcagauggccuaccgguucaacggcaucggggucacccagaacgugcucuacgagaaccagaagcugaucgccaaccaguucaacagcgccaucggcaagauccaggacucccugagcuccaccgccagcgcgcucgggaagcugcaggacguggucaaccagaacgcccaggcccugaacacgcucgugaagcagcuguccagcaacuucggcgccaucuccagcgugcugaacgacauccucucccgccuggacccgcccgaggccgaggugcagaucgaccggcugaucaccgggcgccuccagagccugcagaccuacgugacccagcagcugauccgggcggccgagauccgcgccagcgccaaccucgccgcgaccaagauguccgagugcguccugggccagagcaagcggguggacuucugcggcaagggguaccaccugauguccuucccccagagcgccccgcacggcguggucuuccuccacgugacguacgucuucgcccaggagaagaacuucaccaccgcccccgcgaucugccacgacgggaaggcccacuucccccgcgagggcguguucguguccaacgggacccacugguucgucacgcagcggaacuucuacgagccgcagaucaucaccaccgacaacaccuucgugagcggcaacugcgacguggucaucggcaucgugaacaacacgguguacgacccccugcagcccgagcuggacuccuucaaggaggagcucgacaaguacuucaagaaccacaccagccccgacgucgaccugggggacaucuccggcaucaacgccagcguggugaacauccagaaggagaucgaccgccugaacgaggucgccaagaaccucaacgagucccugaucgaccugcaggagcucgggaaguacgagcaguacaucaaguggccgugguacaucuggcugggcuucaucgccggccugaucgcgaucgugauggugaccaucaugcucugcugcaugaccagcugcugcuccugccugaaggggugcugcagcugcggcuccugcugcaaguucgacgaggacgacagcgagcccguccugaagggggugaagcuccacuacacgugaggacuagucccuguucccagagcccacuuuuuuuucuuuuuuugaaauaaaauagccugucuuucagaucucaaaggcucuuuucagagccaccaaaaaaaaaaaaaaaaaaaaaaaaaaaaaaaaaaaaaaaaaaaaaaaaaaaaaaaaaaaaaaaaaaaaaaaaaaaaaaaaaaaaaaaaaaaaaaaaaaaaa

SEQ ID NO: 12341 - RNA, 4094 nt, Artificial Sequence
  SARS-CoV-2/Wuhan/WIV05/2019__EPI_ISL_402128 spike protein mRNA gc (1-1273)(K986P_V987P_ H1048Q_H1064N_ H1083N_H1101N)
aggagagucccgcagucggcguccagcggcucugcuuguucgugugugugucguugcaggccuuauucaagcuuaccauguucguguuccugguccuccugccccuggugagcucccagugcgugaaccucaccacccgcacgcagcugccgcccgccuacaccaacagcuucacccggggcgucuacuaccccgacaagguguuccgcuccagcgugcugcacuccacccaggaccucuuccugcccuucuucagcaacgucacgugguuccacgccauccacguguccgggaccaacggcaccaagcgguucgacaacccggugcugcccuucaacgacggggucuacuucgcgagcaccgagaaguccaacaucauccgcggcuggaucuucgggacgacccucgacagcaagacccagucccugcugaucgugaacaacgccaccaacguggucaucaaggugugcgaguuccaguucugcaacgaccccuuccucggcguguacuaccacaagaacaacaagagcuggauggaguccgaguuccgggucuacagcuccgccaacaacugcacguucgaguacgugagccagcccuuccugauggaccuggagggcaagcaggggaacuucaagaaccuccgcgaguucguguucaagaacaucgacggcuacuucaagaucuacuccaagcacaccccgaucaaccugguccgggaccugccccagggguucagcgcccucgagccccugguggaccugcccaucggcaucaacaucacccgcuuccagacccuccuggcccugcaccgguccuaccucacgccgggggacagcagcuccggcuggaccgcgggcgccgccgccuacuacgugggguaccugcagccccgcaccuuccugcucaaguacaacgagaacggcaccaucacggacgcggucgacugcgcccuggacccccugagcgagaccaagugcacccucaaguccuucaccguggagaaggggaucuaccagacgagcaacuuccgggugcagcccaccgaguccaucguccgcuucccgaacaucaccaaccugugccccuucggcgagguguucaacgccacccgguucgccagcgucuacgccuggaaccgcaagcggaucuccaacugcguggcggacuacagcgugcuguacaacuccgccagcuucuccacguucaagugcuacggcgucagccccaccaagcucaacgaccugugcuucaccaacguguacgccgacuccuucgugauccgcggggacgagguccggcagaucgcccccggccagaccgggaagaucgccgacuacaacuacaagcugccggacgacuucacgggcugcgugaucgcguggaacagcaacaaccucgacuccaaggucgggggcaacuacaacuaccuguaccgccuguuccgcaagagcaaccucaagcccuucgagcgggacaucuccaccgagaucuaccaggccggcagcacccccugcaacgggguggagggcuucaacugcuacuucccccugcaguccuacggguuccagccgaccaacggcgugggguaccagcccuaccggguggucgugcugagcuucgagcuccugcacgcccccgccacggugugcggccccaagaaguccaccaaccuggucaagaacaagugcgugaacuucaacuucaacggccucaccgggaccggcgugcugaccgagagcaacaagaaguuccugccguuccagcaguucgggcgcgacaucgccgacacgaccgacgcgguccgcgacccccagacccuggagauccucgacaucacccccugcagcuucggcgggguguccgugaucacgccgggcaccaacaccagcaaccaggucgccgugcuguaccaggacgugaacugcaccgagguccccguggccauccacgccgaccagcugacgcccaccuggcggguguacuccaccggcagcaacgucuuccagacccgcgccgggugccucaucggcgcggagcacgugaacaacuccuacgagugcgacauccccaucggggccggcaucugcgccagcuaccagacgcagaccaacuccccgcggcgcgcccggagcguggcgucccagagcaucaucgccuacaccaugucccugggcgccgagaacagcgucgccuacuccaacaacagcaucgccauccccaccaacuucacgaucuccgugaccaccgagauccugcccgugagcaugaccaagacgagcgucgacugcaccauguacaucugcggggacuccaccgagugcagcaaccuccugcugcaguacggcuccuucugcacccagcucaaccgcgcgcugacggggaucgccguggagcaggacaagaacacccaggagguguucgcccaggucaagcagaucuacaagacgcccccgaucaaggacuucggcggguucaacuucagccagauccugcccgaccccuccaagcccagcaagcgguccuucaucgaggaccuccuguucaacaaggugacccuggccgacgccggcuucaucaagcaguacggcgacugccucggggacaucgcggcccgcgaccugaucugcgcccagaaguucaacggccugaccgugcucccgccccugcugaccgacgagaugaucgcccaguacaccagcgcccuccuggcggggaccaucacguccggcuggaccuucggggccggcgccgcccugcagauccccuucgcgaugcagauggccuaccgguucaacggcaucggggucacccagaacgugcucuacgagaaccagaagcugaucgccaaccaguucaacagcgccaucggcaagauccaggacucccugagcuccaccgccagcgcgcucgggaagcugcaggacguggucaaccagaacgcccaggcccugaacacgcucgugaagcagcuguccagcaacuucggcgccaucuccagcgugcugaacgacauccucucccgccuggacccgcccgaggccgaggugcagaucgaccggcugaucaccgggcgccuccagagccugcagaccuacgugacccagcagcugauccgggcggccgagauccgcgccagcgccaaccucgccgcgaccaagauguccgagugcguccugggccagagcaagcggguggacuucugcggcaagggguaccagcugauguccuucccccagagcgccccgcacggcguggucuuccucaacgugacguacguccccgcccaggagaagaacuucaccaccgcccccgcgaucugcaacgacgggaaggcccacuucccccgcgagggcguguucguguccaacgggaccaacugguucgucacgcagcggaacuucuacgagccgcagaucaucaccaccgacaacaccuucgugagcggcaacugcgacguggucaucggcaucgugaacaacacgguguacgacccccugcagcccgagcuggacuccuucaaggaggagcucgacaaguacuucaagaaccacaccagccccgacgucgaccugggggacaucuccggcaucaacgccagcguggugaacauccagaaggagaucgaccgccugaacgaggucgccaagaaccucaacgagucccugaucgaccugcaggagcucgggaaguacgagcaguacaucaaguggccgugguacaucuggcugggcuucaucgccggccugaucgcgaucgugauggugaccaucaugcucugcugcaugaccagcugcugcuccugccugaaggggugcugcagcugcggcuccugcugcaaguucgacgaggacgacagcgagcccguccugaagggggugaagcuccacuacacgugaggacuagucccuguucccagagcccacuuuuuuuucuuuuuuugaaauaaaauagccugucuuucagaucucaaaggcucuuuucagagccaccaaaaaaaaaaaaaaaaaaaaaaaaaaaaaaaaaaaaaaaaaaaaaaaaaaaaaaaaaaaaaaaaaaaaaaaaaaaaaaaaaaaaaaaaaaaaaaaaaaaaa

SEQ ID NO: 12342 - RNA, 4094 nt, Artificial Sequence
  SARS-CoV-2/Wuhan/WIV05/2019__EPI_ISL_402128 spike protein mRNA gc (1-1273)(I712C_T1077C)
aggagagucccgcagucggcguccagcggcucugcuuguucgugugugugucguugcaggccuuauucaagcuuaccauguucguguuccugguccuccugccccuggugagcucccagugcgugaaccucaccacccgcacgcagcugccgcccgccuacaccaacagcuucacccggggcgucuacuaccccgacaagguguuccgcuccagcgugcugcacuccacccaggaccucuuccugcccuucuucagcaacgucacgugguuccacgccauccacguguccgggaccaacggcaccaagcgguucgacaacccggugcugcccuucaacgacggggucuacuucgcgagcaccgagaaguccaacaucauccgcggcuggaucuucgggacgacccucgacagcaagacccagucccugcugaucgugaacaacgccaccaacguggucaucaaggugugcgaguuccaguucugcaacgaccccuuccucggcguguacuaccacaagaacaacaagagcuggauggaguccgaguuccgggucuacagcuccgccaacaacugcacguucgaguacgugagccagcccuuccugauggaccuggagggcaagcaggggaacuucaagaaccuccgcgaguucguguucaagaacaucgacggcuacuucaagaucuacuccaagcacaccccgaucaaccugguccgggaccugccccagggguucagcgcccucgagccccugguggaccugcccaucggcaucaacaucacccgcuuccagacccuccuggcccugcaccgguccuaccucacgccgggggacagcagcuccggcuggaccgcgggcgccgccgccuacuacgugggguaccugcagccccgcaccuuccugcucaaguacaacgagaacggcaccaucacggacgcggucgacugcgcccuggacccccugagcgagaccaagugcacccucaaguccuucaccguggagaaggggaucuaccagacgagcaacuuccgggugcagcccaccgaguccaucguccgcuucccgaacaucaccaaccugugccccuucggcgagguguucaacgccacccgguucgccagcgucuacgccuggaaccgcaagcggaucuccaacugcguggcggacuacagcgugcuguacaacuccgccagcuucuccacguucaagugcuacggcgucagccccaccaagcucaacgaccugugcuucaccaacguguacgccgacuccuucgugauccgcggggacgagguccggcagaucgcccccggccagaccgggaagaucgccgacuacaacuacaagcugccggacgacuucacgggcugcgugaucgcguggaacagcaacaaccucgacuccaaggucgggggcaacuacaacuaccuguaccgccuguuccgcaagagcaaccucaagcccuucgagcgggacaucuccaccgagaucuaccaggccggcagcacccccugcaacgggguggagggcuucaacugcuacuucccccugcaguccuacggguuccagccgaccaacggcgugggguaccagcccuaccggguggucgugcugagcuucgagcuccugcacgcccccgccacggugugcggccccaagaaguccaccaaccuggucaagaacaagugcgugaacuucaacuucaacggccucaccgggaccggcgugcugaccgagagcaacaagaaguuccugccguuccagcaguucgggcgcgacaucgccgacacgaccgacgcgguccgcgacccccagacccuggagauccucgacaucacccccugcagcuucggcgggguguccgugaucacgccgggcaccaacaccagcaaccaggucgccgugcuguaccaggacgugaacugcaccgagguccccguggccauccacgccgaccagcugacgcccaccuggcggguguacuccaccggcagcaacgucuuccagacccgcgccgggugccucaucggcgcggagcacgugaacaacuccuacgagugcgacauccccaucggggccggcaucugcgccagcuaccagacgcagaccaacuccccgcggcgcgcccggagcguggcgucccagagcaucaucgccuacaccaugucccugggcgccgagaacagcgucgccuacuccaacaacagcugcgccauccccaccaacuucacgaucuccgugaccaccgagauccugcccgugagcaugaccaagacgagcgucgacugcaccauguacaucugcggggacuccaccgagugcagcaaccuccugcugcaguacggcuccuucugcacccagcucaaccgcgcgcugacggggaucgccguggagcaggacaagaacacccaggagguguucgcccaggucaagcagaucuacaagacgcccccgaucaaggacuucggcggguucaacuucagccagauccugcccgaccccuccaagcccagcaagcgguccuucaucgaggaccuccuguucaacaaggugacccuggccgacgccggcuucaucaagcaguacggcgacugccucggggacaucgcggcccgcgaccugaucugcgcccagaaguucaacggccugaccgugcucccgccccugcugaccgacgagaugaucgcccaguacaccagcgcccuccuggcggggaccaucacguccggcuggaccuucggggccggcgccgcccugcagauccccuucgcgaugcagauggccuaccgguucaacggcaucggggucacccagaacgugcucuacgagaaccagaagcugaucgccaaccaguucaacagcgccaucggcaagauccaggacucccugagcuccaccgccagcgcgcucgggaagcugcaggacguggucaaccagaacgcccaggcccugaacacgcucgugaagcagcuguccagcaacuucggcgccaucuccagcgugcugaacgacauccucucccgccuggacaaggucgaggccgaggugcagaucgaccggcugaucaccgggcgccuccagagccugcagaccuacgugacccagcagcugauccgggcggccgagauccgcgccagcgccaaccucgccgcgaccaagauguccgagugcguccugggccagagcaagcggguggacuucugcggcaagggguaccaccugauguccuucccccagagcgccccgcacggcguggucuuccuccacgugacguacguccccgcccaggagaagaacuucaccugcgcccccgcgaucugccacgacgggaaggcccacuucccccgcgagggcguguucguguccaacgggacccacugguucgucacgcagcggaacuucuacgagccgcagaucaucaccaccgacaacaccuucgugagcggcaacugcgacguggucaucggcaucgugaacaacacgguguacgacccccugcagcccgagcuggacuccuucaaggaggagcucgacaaguacuucaagaaccacaccagccccgacgucgaccugggggacaucuccggcaucaacgccagcguggugaacauccagaaggagaucgaccgccugaacgaggucgccaagaaccucaacgagucccugaucgaccugcaggagcucgggaaguacgagcaguacaucaaguggccgugguacaucuggcugggcuucaucgccggccugaucgcgaucgugauggugaccaucaugcucugcugcaugaccagcugcugcuccugccugaaggggugcugcagcugcggcuccugcugcaaguucgacgaggacgacagcgagcccguccugaagggggugaagcuccacuacacgugaggacuagucccuguucccagagcccacuuuuuuuucuuuuuuugaaauaaaauagccugucuuucagaucucaaaggcucuuuucagagccaccaaaaaaaaaaaaaaaaaaaaaaaaaaaaaaaaaaaaaaaaaaaaaaaaaaaaaaaaaaaaaaaaaaaaaaaaaaaaaaaaaaaaaaaaaaaaaaaaaaaaa

SEQ ID NO: 12343 - RNA, 4094 nt, Artificial Sequence
  SARS-CoV-2/Wuhan/WIV05/2019__EPI_ISL_402128 spike protein mRNA gc (1-1273)(I714C_Y1110C)
aggagagucccgcagucggcguccagcggcucugcuuguucgugugugugucguugcaggccuuauucaagcuuaccauguucguguuccugguccuccugccccuggugagcucccagugcgugaaccucaccacccgcacgcagcugccgcccgccuacaccaacagcuucacccggggcgucuacuaccccgacaagguguuccgcuccagcgugcugcacuccacccaggaccucuuccugcccuucuucagcaacgucacgugguuccacgccauccacguguccgggaccaacggcaccaagcgguucgacaacccggugcugcccuucaacgacggggucuacuucgcgagcaccgagaaguccaacaucauccgcggcuggaucuucgggacgacccucgacagcaagacccagucccugcugaucgugaacaacgccaccaacguggucaucaaggugugcgaguuccaguucugcaacgaccccuuccucggcguguacuaccacaagaacaacaagagcuggauggaguccgaguuccgggucuacagcuccgccaacaacugcacguucgaguacgugagccagcccuuccugauggaccuggagggcaagcaggggaacuucaagaaccuccgcgaguucguguucaagaacaucgacggcuacuucaagaucuacuccaagcacaccccgaucaaccugguccgggaccugccccagggguucagcgcccucgagccccugguggaccugcccaucggcaucaacaucacccgcuuccagacccuccuggcccugcaccgguccuaccucacgccgggggacagcagcuccggcuggaccgcgggcgccgccgccuacuacgugggguaccugcagccccgcaccuuccugcucaaguacaacgagaacggcaccaucacggacgcggucgacugcgcccuggacccccugagcgagaccaagugcacccucaaguccuucaccguggagaaggggaucuaccagacgagcaacuuccgggugcagcccaccgaguccaucguccgcuucccgaacaucaccaaccugugccccuucggcgagguguucaacgccacccgguucgccagcgucuacgccuggaaccgcaagcggaucuccaacugcguggcggacuacagcgugcuguacaacuccgccagcuucuccacguucaagugcuacggcgucagccccaccaagcucaacgaccugugcuucaccaacguguacgccgacuccuucgugauccgcggggacgagguccggcagaucgcccccggccagaccgggaagaucgccgacuacaacuacaagcugccggacgacuucacgggcugcgugaucgcguggaacagcaacaaccucgacuccaaggucgggggcaacuacaacuaccuguaccgccuguuccgcaagagcaaccucaagcccuucgagcgggacaucuccaccgagaucuaccaggccggcagcacccccugcaacgggguggagggcuucaacugcuacuucccccugcaguccuacggguuccagccgaccaacggcgugggguaccagcccuaccggguggucgugcugagcuucgagcuccugcacgcccccgccacggugugcggccccaagaaguccaccaaccuggucaagaacaagugcgugaacuucaacuucaacggccucaccgggaccggcgugcugaccgagagcaacaagaaguuccugccguuccagcaguucgggcgcgacaucgccgacacgaccgacgcgguccgcgacccccagacccuggagauccucgacaucacccccugcagcuucggcgggguguccgugaucacgccgggcaccaacaccagcaaccaggucgccgugcuguaccaggacgugaacugcaccgagguccccguggccauccacgccgaccagcugacgcccaccuggcggguguacuccaccggcagcaacgucuuccagacccgcgccgggugccucaucggcgcggagcacgugaacaacuccuacgagugcgacauccccaucggggccggcaucugcgccagcuaccagacgcagaccaacuccccgcggcgcgcccggagcguggcgucccagagcaucaucgccuacaccaugucccugggcgccgagaacagcgucgccuacuccaacaacagcaucgccugccccaccaacuucacgaucuccgugaccaccgagauccugcccgugagcaugaccaagacgagcgucgacugcaccauguacaucugcggggacuccaccgagugcagcaaccuccugcugcaguacggcuccuucugcacccagcucaaccgcgcgcugacggggaucgccguggagcaggacaagaacacccaggagguguucgcccaggucaagcagaucuacaagacgcccccgaucaaggacuucggcggguucaacuucagccagauccugcccgaccccuccaagcccagcaagcgguccuucaucgaggaccuccuguucaacaaggugacccuggccgacgccggcuucaucaagcaguacggcgacugccucggggacaucgcggcccgcgaccugaucugcgcccagaaguucaacggccugaccgugcucccgccccugcugaccgacgagaugaucgcccaguacaccagcgcccuccuggcggggaccaucacguccggcuggaccuucggggccggcgccgcccugcagauccccuucgcgaugcagauggccuaccgguucaacggcaucggggucacccagaacgugcucuacgagaaccagaagcugaucgccaaccaguucaacagcgccaucggcaagauccaggacucccugagcuccaccgccagcgcgcucgggaagcugcaggacguggucaaccagaacgcccaggcccugaacacgcucgugaagcagcuguccagcaacuucggcgccaucuccagcgugcugaacgacauccucucccgccuggacaaggucgaggccgaggugcagaucgaccggcugaucaccgggcgccuccagagccugcagaccuacgugacccagcagcugauccgggcggccgagauccgcgccagcgccaaccucgccgcgaccaagauguccgagugcguccugggccagagcaagcggguggacuucugcggcaagggguaccaccugauguccuucccccagagcgccccgcacggcguggucuuccuccacgugacguacguccccgcccaggagaagaacuucaccaccgcccccgcgaucugccacgacgggaaggcccacuucccccgcgagggcguguucguguccaacgggacccacugguucgucacgcagcggaacuucugcgagccgcagaucaucaccaccgacaacaccuucgugagcggcaacugcgacguggucaucggcaucgugaacaacacgguguacgacccccugcagcccgagcuggacuccuucaaggaggagcucgacaaguacuucaagaaccacaccagccccgacgucgaccugggggacaucuccggcaucaacgccagcguggugaacauccagaaggagaucgaccgccugaacgaggucgccaagaaccucaacgagucccugaucgaccugcaggagcucgggaaguacgagcaguacaucaaguggccgugguacaucuggcugggcuucaucgccggccugaucgcgaucgugauggugaccaucaugcucugcugcaugaccagcugcugcuccugccugaaggggugcugcagcugcggcuccugcugcaaguucgacgaggacgacagcgagcccguccugaagggggugaagcuccacuacacgugaggacuagucccuguucccagagcccacuuuuuuuucuuuuuuugaaauaaaauagccugucuuucagaucucaaaggcucuuuucagagccaccaaaaaaaaaaaaaaaaaaaaaaaaaaaaaaaaaaaaaaaaaaaaaaaaaaaaaaaaaaaaaaaaaaaaaaaaaaaaaaaaaaaaaaaaaaaaaaaaaaaaa

SEQ ID NO: 12344 - RNA, 4094 nt, Artificial Sequence
  SARS-CoV-2/Wuhan/WIV05/2019__EPI_ISL_402128 spike protein mRNA gc (1-1273)(P715C_P1069C)
aggagagucccgcagucggcguccagcggcucugcuuguucgugugugugucguugcaggccuuauucaagcuuaccauguucguguuccugguccuccugccccuggugagcucccagugcgugaaccucaccacccgcacgcagcugccgcccgccuacaccaacagcuucacccggggcgucuacuaccccgacaagguguuccgcuccagcgugcugcacuccacccaggaccucuuccugcccuucuucagcaacgucacgugguuccacgccauccacguguccgggaccaacggcaccaagcgguucgacaacccggugcugcccuucaacgacggggucuacuucgcgagcaccgagaaguccaacaucauccgcggcuggaucuucgggacgacccucgacagcaagacccagucccugcugaucgugaacaacgccaccaacguggucaucaaggugugcgaguuccaguucugcaacgaccccuuccucggcguguacuaccacaagaacaacaagagcuggauggaguccgaguuccgggucuacagcuccgccaacaacugcacguucgaguacgugagccagcccuuccugauggaccuggagggcaagcaggggaacuucaagaaccuccgcgaguucguguucaagaacaucgacggcuacuucaagaucuacuccaagcacaccccgaucaaccugguccgggaccugccccagggguucagcgcccucgagccccugguggaccugcccaucggcaucaacaucacccgcuuccagacccuccuggcccugcaccgguccuaccucacgccgggggacagcagcuccggcuggaccgcgggcgccgccgccuacuacgugggguaccugcagccccgcaccuuccugcucaaguacaacgagaacggcaccaucacggacgcggucgacugcgcccuggacccccugagcgagaccaagugcacccucaaguccuucaccguggagaaggggaucuaccagacgagcaacuuccgggugcagcccaccgaguccaucguccgcuucccgaacaucaccaaccugugccccuucggcgagguguucaacgccacccgguucgccagcgucuacgccuggaaccgcaagcggaucuccaacugcguggcggacuacagcgugcuguacaacuccgccagcuucuccacguucaagugcuacggcgucagccccaccaagcucaacgaccugugcuucaccaacguguacgccgacuccuucgugauccgcggggacgagguccggcagaucgcccccggccagaccgggaagaucgccgacuacaacuacaagcugccggacgacuucacgggcugcgugaucgcguggaacagcaacaaccucgacuccaaggucgggggcaacuacaacuaccuguaccgccuguuccgcaagagcaaccucaagcccuucgagcgggacaucuccaccgagaucuaccaggccggcagcacccccugcaacgggguggagggcuucaacugcuacuucccccugcaguccuacggguuccagccgaccaacggcgugggguaccagcccuaccggguggucgugcugagcuucgagcuccugcacgcccccgccacggugugcggccccaagaaguccaccaaccuggucaagaacaagugcgugaacuucaacuucaacggccucaccgggaccggcgugcugaccgagagcaacaagaaguuccugccguuccagcaguucgggcgcgacaucgccgacacgaccgacgcgguccgcgacccccagacccuggagauccucgacaucacccccugcagcuucggcgggguguccgugaucacgccgggcaccaacaccagcaaccaggucgccgugcuguaccaggacgugaacugcaccgagguccccguggccauccacgccgaccagcugacgcccaccuggcggguguacuccaccggcagcaacgucuuccagacccgcgccgggugccucaucggcgcggagcacgugaacaacuccuacgagugcgacauccccaucggggccggcaucugcgccagcuaccagacgcagaccaacuccccgcggcgcgcccggagcguggcgucccagagcaucaucgccuacaccaugucccugggcgccgagaacagcgucgccuacuccaacaacagcaucgccaucugcaccaacuucacgaucuccgugaccaccgagauccugcccgugagcaugaccaagacgagcgucgacugcaccauguacaucugcggggacuccaccgagugcagcaaccuccugcugcaguacggcuccuucugcacccagcucaaccgcgcgcugacggggaucgccguggagcaggacaagaacacccaggagguguucgcccaggucaagcagaucuacaagacgcccccgaucaaggacuucggcggguucaacuucagccagauccugcccgaccccuccaagcccagcaagcgguccuucaucgaggaccuccuguucaacaaggugacccuggccgacgccggcuucaucaagcaguacggcgacugccucggggacaucgcggcccgcgaccugaucugcgcccagaaguucaacggccugaccgugcucccgccccugcugaccgacgagaugaucgcccaguacaccagcgcccuccuggcggggaccaucacguccggcuggaccuucggggccggcgccgcccugcagauccccuucgcgaugcagauggccuaccgguucaacggcaucggggucacccagaacgugcucuacgagaaccagaagcugaucgccaaccaguucaacagcgccaucggcaagauccaggacucccugagcuccaccgccagcgcgcucgggaagcugcaggacguggucaaccagaacgcccaggcccugaacacgcucgugaagcagcuguccagcaacuucggcgccaucuccagcgugcugaacgacauccucucccgccuggacaaggucgaggccgaggugcagaucgaccggcugaucaccgggcgccuccagagccugcagaccuacgugacccagcagcugauccgggcggccgagauccgcgccagcgccaaccucgccgcgaccaagauguccgagugcguccugggccagagcaagcggguggacuucugcggcaagggguaccaccugauguccuucccccagagcgccccgcacggcguggucuuccuccacgugacguacgucugcgcccaggagaagaacuucaccaccgcccccgcgaucugccacgacgggaaggcccacuucccccgcgagggcguguucguguccaacgggacccacugguucgucacgcagcggaacuucuacgagccgcagaucaucaccaccgacaacaccuucgugagcggcaacugcgacguggucaucggcaucgugaacaacacgguguacgacccccugcagcccgagcuggacuccuucaaggaggagcucgacaaguacuucaagaaccacaccagccccgacgucgaccugggggacaucuccggcaucaacgccagcguggugaacauccagaaggagaucgaccgccugaacgaggucgccaagaaccucaacgagucccugaucgaccugcaggagcucgggaaguacgagcaguacaucaaguggccgugguacaucuggcugggcuucaucgccggccugaucgcgaucgugauggugaccaucaugcucugcugcaugaccagcugcugcuccugccugaaggggugcugcagcugcggcuccugcugcaaguucgacgaggacgacagcgagcccguccugaagggggugaagcuccacuacacgugaggacuagucccuguucccagagcccacuuuuuuuucuuuuuuugaaauaaaauagccugucuuucagaucucaaaggcucuuuucagagccaccaaaaaaaaaaaaaaaaaaaaaaaaaaaaaaaaaaaaaaaaaaaaaaaaaaaaaaaaaaaaaaaaaaaaaaaaaaaaaaaaaaaaaaaaaaaaaaaaaaaaa

SEQ ID NO: 12345 - RNA, 4094 nt, Artificial Sequence
  SARS-CoV-2/Wuhan/WIV05/2019__EPI_ISL_402128 spike protein mRNA gc (1-1273)(G889C_L1034C)
aggagagucccgcagucggcguccagcggcucugcuuguucgugugugugucguugcaggccuuauucaagcuuaccauguucguguuccugguccuccugccccuggugagcucccagugcgugaaccucaccacccgcacgcagcugccgcccgccuacaccaacagcuucacccggggcgucuacuaccccgacaagguguuccgcuccagcgugcugcacuccacccaggaccucuuccugcccuucuucagcaacgucacgugguuccacgccauccacguguccgggaccaacggcaccaagcgguucgacaacccggugcugcccuucaacgacggggucuacuucgcgagcaccgagaaguccaacaucauccgcggcuggaucuucgggacgacccucgacagcaagacccagucccugcugaucgugaacaacgccaccaacguggucaucaaggugugcgaguuccaguucugcaacgaccccuuccucggcguguacuaccacaagaacaacaagagcuggauggaguccgaguuccgggucuacagcuccgccaacaacugcacguucgaguacgugagccagcccuuccugauggaccuggagggcaagcaggggaacuucaagaaccuccgcgaguucguguucaagaacaucgacggcuacuucaagaucuacuccaagcacaccccgaucaaccugguccgggaccugccccagggguucagcgcccucgagccccugguggaccugcccaucggcaucaacaucacccgcuuccagacccuccuggcccugcaccgguccuaccucacgccgggggacagcagcuccggcuggaccgcgggcgccgccgccuacuacgugggguaccugcagccccgcaccuuccugcucaaguacaacgagaacggcaccaucacggacgcggucgacugcgcccuggacccccugagcgagaccaagugcacccucaaguccuucaccguggagaaggggaucuaccagacgagcaacuuccgggugcagcccaccgaguccaucguccgcuucccgaacaucaccaaccugugccccuucggcgagguguucaacgccacccgguucgccagcgucuacgccuggaaccgcaagcggaucuccaacugcguggcggacuacagcgugcuguacaacuccgccagcuucuccacguucaagugcuacggcgucagccccaccaagcucaacgaccugugcuucaccaacguguacgccgacuccuucgugauccgcggggacgagguccggcagaucgcccccggccagaccgggaagaucgccgacuacaacuacaagcugccggacgacuucacgggcugcgugaucgcguggaacagcaacaaccucgacuccaaggucgggggcaacuacaacuaccuguaccgccuguuccgcaagagcaaccucaagcccuucgagcgggacaucuccaccgagaucuaccaggccggcagcacccccugcaacgggguggagggcuucaacugcuacuucccccugcaguccuacggguuccagccgaccaacggcgugggguaccagcccuaccggguggucgugcugagcuucgagcuccugcacgcccccgccacggugugcggccccaagaaguccaccaaccuggucaagaacaagugcgugaacuucaacuucaacggccucaccgggaccggcgugcugaccgagagcaacaagaaguuccugccguuccagcaguucgggcgcgacaucgccgacacgaccgacgcgguccgcgacccccagacccuggagauccucgacaucacccccugcagcuucggcgggguguccgugaucacgccgggcaccaacaccagcaaccaggucgccgugcuguaccaggacgugaacugcaccgagguccccguggccauccacgccgaccagcugacgcccaccuggcggguguacuccaccggcagcaacgucuuccagacccgcgccgggugccucaucggcgcggagcacgugaacaacuccuacgagugcgacauccccaucggggccggcaucugcgccagcuaccagacgcagaccaacuccccgcggcgcgcccggagcguggcgucccagagcaucaucgccuacaccaugucccugggcgccgagaacagcgucgccuacuccaacaacagcaucgccauccccaccaacuucacgaucuccgugaccaccgagauccugcccgugagcaugaccaagacgagcgucgacugcaccauguacaucugcggggacuccaccgagugcagcaaccuccugcugcaguacggcuccuucugcacccagcucaaccgcgcgcugacggggaucgccguggagcaggacaagaacacccaggagguguucgcccaggucaagcagaucuacaagacgcccccgaucaaggacuucggcggguucaacuucagccagauccugcccgaccccuccaagcccagcaagcgguccuucaucgaggaccuccuguucaacaaggugacccuggccgacgccggcuucaucaagcaguacggcgacugccucggggacaucgcggcccgcgaccugaucugcgcccagaaguucaacggccugaccgugcucccgccccugcugaccgacgagaugaucgcccaguacaccagcgcccuccuggcggggaccaucacguccggcuggaccuucugcgccggcgccgcccugcagauccccuucgcgaugcagauggccuaccgguucaacggcaucggggucacccagaacgugcucuacgagaaccagaagcugaucgccaaccaguucaacagcgccaucggcaagauccaggacucccugagcuccaccgccagcgcgcucgggaagcugcaggacguggucaaccagaacgcccaggcccugaacacgcucgugaagcagcuguccagcaacuucggcgccaucuccagcgugcugaacgacauccucucccgccuggacaaggucgaggccgaggugcagaucgaccggcugaucaccgggcgccuccagagccugcagaccuacgugacccagcagcugauccgggcggccgagauccgcgccagcgccaaccucgccgcgaccaagauguccgagugcgucugcggccagagcaagcggguggacuucugcggcaagggguaccaccugauguccuucccccagagcgccccgcacggcguggucuuccuccacgugacguacguccccgcccaggagaagaacuucaccaccgcccccgcgaucugccacgacgggaaggcccacuucccccgcgagggcguguucguguccaacgggacccacugguucgucacgcagcggaacuucuacgagccgcagaucaucaccaccgacaacaccuucgugagcggcaacugcgacguggucaucggcaucgugaacaacacgguguacgacccccugcagcccgagcuggacuccuucaaggaggagcucgacaaguacuucaagaaccacaccagccccgacgucgaccugggggacaucuccggcaucaacgccagcguggugaacauccagaaggagaucgaccgccugaacgaggucgccaagaaccucaacgagucccugaucgaccugcaggagcucgggaaguacgagcaguacaucaaguggccgugguacaucuggcugggcuucaucgccggccugaucgcgaucgugauggugaccaucaugcucugcugcaugaccagcugcugcuccugccugaaggggugcugcagcugcggcuccugcugcaaguucgacgaggacgacagcgagcccguccugaagggggugaagcuccacuacacgugaggacuagucccuguucccagagcccacuuuuuuuucuuuuuuugaaauaaaauagccugucuuucagaucucaaaggcucuuuucagagccaccaaaaaaaaaaaaaaaaaaaaaaaaaaaaaaaaaaaaaaaaaaaaaaaaaaaaaaaaaaaaaaaaaaaaaaaaaaaaaaaaaaaaaaaaaaaaaaaaaaaaa

SEQ ID NO: 12346 - RNA, 4094 nt, Artificial Sequence
  SARS-CoV-2/Wuhan/WIV05/2019__EPI_ISL_402128 spike protein mRNA gc (1-1273)(I909C_Y1047C)
aggagagucccgcagucggcguccagcggcucugcuuguucgugugugugucguugcaggccuuauucaagcuuaccauguucguguuccugguccuccugccccuggugagcucccagugcgugaaccucaccacccgcacgcagcugccgcccgccuacaccaacagcuucacccggggcgucuacuaccccgacaagguguuccgcuccagcgugcugcacuccacccaggaccucuuccugcccuucuucagcaacgucacgugguuccacgccauccacguguccgggaccaacggcaccaagcgguucgacaacccggugcugcccuucaacgacggggucuacuucgcgagcaccgagaaguccaacaucauccgcggcuggaucuucgggacgacccucgacagcaagacccagucccugcugaucgugaacaacgccaccaacguggucaucaaggugugcgaguuccaguucugcaacgaccccuuccucggcguguacuaccacaagaacaacaagagcuggauggaguccgaguuccgggucuacagcuccgccaacaacugcacguucgaguacgugagccagcccuuccugauggaccuggagggcaagcaggggaacuucaagaaccuccgcgaguucguguucaagaacaucgacggcuacuucaagaucuacuccaagcacaccccgaucaaccugguccgggaccugccccagggguucagcgcccucgagccccugguggaccugcccaucggcaucaacaucacccgcuuccagacccuccuggcccugcaccgguccuaccucacgccgggggacagcagcuccggcuggaccgcgggcgccgccgccuacuacgugggguaccugcagccccgcaccuuccugcucaaguacaacgagaacggcaccaucacggacgcggucgacugcgcccuggacccccugagcgagaccaagugcacccucaaguccuucaccguggagaaggggaucuaccagacgagcaacuuccgggugcagcccaccgaguccaucguccgcuucccgaacaucaccaaccugugccccuucggcgagguguucaacgccacccgguucgccagcgucuacgccuggaaccgcaagcggaucuccaacugcguggcggacuacagcgugcuguacaacuccgccagcuucuccacguucaagugcuacggcgucagccccaccaagcucaacgaccugugcuucaccaacguguacgccgacuccuucgugauccgcggggacgagguccggcagaucgcccccggccagaccgggaagaucgccgacuacaacuacaagcugccggacgacuucacgggcugcgugaucgcguggaacagcaacaaccucgacuccaaggucgggggcaacuacaacuaccuguaccgccuguuccgcaagagcaaccucaagcccuucgagcgggacaucuccaccgagaucuaccaggccggcagcacccccugcaacgggguggagggcuucaacugcuacuucccccugcaguccuacggguuccagccgaccaacggcgugggguaccagcccuaccggguggucgugcugagcuucgagcuccugcacgcccccgccacggugugcggccccaagaaguccaccaaccuggucaagaacaagugcgugaacuucaacuucaacggccucaccgggaccggcgugcugaccgagagcaacaagaaguuccugccguuccagcaguucgggcgcgacaucgccgacacgaccgacgcgguccgcgacccccagacccuggagauccucgacaucacccccugcagcuucggcgggguguccgugaucacgccgggcaccaacaccagcaaccaggucgccgugcuguaccaggacgugaacugcaccgagguccccguggccauccacgccgaccagcugacgcccaccuggcggguguacuccaccggcagcaacgucuuccagacccgcgccgggugccucaucggcgcggagcacgugaacaacuccuacgagugcgacauccccaucggggccggcaucugcgccagcuaccagacgcagaccaacuccccgcggcgcgcccggagcguggcgucccagagcaucaucgccuacaccaugucccugggcgccgagaacagcgucgccuacuccaacaacagcaucgccauccccaccaacuucacgaucuccgugaccaccgagauccugcccgugagcaugaccaagacgagcgucgacugcaccauguacaucugcggggacuccaccgagugcagcaaccuccugcugcaguacggcuccuucugcacccagcucaaccgcgcgcugacggggaucgccguggagcaggacaagaacacccaggagguguucgcccaggucaagcagaucuacaagacgcccccgaucaaggacuucggcggguucaacuucagccagauccugcccgaccccuccaagcccagcaagcgguccuucaucgaggaccuccuguucaacaaggugacccuggccgacgccggcuucaucaagcaguacggcgacugccucggggacaucgcggcccgcgaccugaucugcgcccagaaguucaacggccugaccgugcucccgccccugcugaccgacgagaugaucgcccaguacaccagcgcccuccuggcggggaccaucacguccggcuggaccuucggggccggcgccgcccugcagauccccuucgcgaugcagauggccuaccgguucaacggcugcggggucacccagaacgugcucuacgagaaccagaagcugaucgccaaccaguucaacagcgccaucggcaagauccaggacucccugagcuccaccgccagcgcgcucgggaagcugcaggacguggucaaccagaacgcccaggcccugaacacgcucgugaagcagcuguccagcaacuucggcgccaucuccagcgugcugaacgacauccucucccgccuggacaaggucgaggccgaggugcagaucgaccggcugaucaccgggcgccuccagagccugcagaccuacgugacccagcagcugauccgggcggccgagauccgcgccagcgccaaccucgccgcgaccaagauguccgagugcguccugggccagagcaagcggguggacuucugcggcaaggggugccaccugauguccuucccccagagcgccccgcacggcguggucuuccuccacgugacguacguccccgcccaggagaagaacuucaccaccgcccccgcgaucugccacgacgggaaggcccacuucccccgcgagggcguguucguguccaacgggacccacugguucgucacgcagcggaacuucuacgagccgcagaucaucaccaccgacaacaccuucgugagcggcaacugcgacguggucaucggcaucgugaacaacacgguguacgacccccugcagcccgagcuggacuccuucaaggaggagcucgacaaguacuucaagaaccacaccagccccgacgucgaccugggggacaucuccggcaucaacgccagcguggugaacauccagaaggagaucgaccgccugaacgaggucgccaagaaccucaacgagucccugaucgaccugcaggagcucgggaaguacgagcaguacaucaaguggccgugguacaucuggcugggcuucaucgccggccugaucgcgaucgugauggugaccaucaugcucugcugcaugaccagcugcugcuccugccugaaggggugcugcagcugcggcuccugcugcaaguucgacgaggacgacagcgagcccguccugaagggggugaagcuccacuacacgugaggacuagucccuguucccagagcccacuuuuuuuucuuuuuuugaaauaaaauagccugucuuucagaucucaaaggcucuuuucagagccaccaaaaaaaaaaaaaaaaaaaaaaaaaaaaaaaaaaaaaaaaaaaaaaaaaaaaaaaaaaaaaaaaaaaaaaaaaaaaaaaaaaaaaaaaaaaaaaaaaaaaa

SEQ ID NO: 12347 - RNA, 4094 nt, Artificial Sequence
  SARS-CoV-2/Wuhan/WIV05/2019__EPI_ISL_402128 spike protein mRNA gc (1-1273)(Q965C_S1003C)
aggagagucccgcagucggcguccagcggcucugcuuguucgugugugugucguugcaggccuuauucaagcuuaccauguucguguuccugguccuccugccccuggugagcucccagugcgugaaccucaccacccgcacgcagcugccgcccgccuacaccaacagcuucacccggggcgucuacuaccccgacaagguguuccgcuccagcgugcugcacuccacccaggaccucuuccugcccuucuucagcaacgucacgugguuccacgccauccacguguccgggaccaacggcaccaagcgguucgacaacccggugcugcccuucaacgacggggucuacuucgcgagcaccgagaaguccaacaucauccgcggcuggaucuucgggacgacccucgacagcaagacccagucccugcugaucgugaacaacgccaccaacguggucaucaaggugugcgaguuccaguucugcaacgaccccuuccucggcguguacuaccacaagaacaacaagagcuggauggaguccgaguuccgggucuacagcuccgccaacaacugcacguucgaguacgugagccagcccuuccugauggaccuggagggcaagcaggggaacuucaagaaccuccgcgaguucguguucaagaacaucgacggcuacuucaagaucuacuccaagcacaccccgaucaaccugguccgggaccugccccagggguucagcgcccucgagccccugguggaccugcccaucggcaucaacaucacccgcuuccagacccuccuggcccugcaccgguccuaccucacgccgggggacagcagcuccggcuggaccgcgggcgccgccgccuacuacgugggguaccugcagccccgcaccuuccugcucaaguacaacgagaacggcaccaucacggacgcggucgacugcgcccuggacccccugagcgagaccaagugcacccucaaguccuucaccguggagaaggggaucuaccagacgagcaacuuccgggugcagcccaccgaguccaucguccgcuucccgaacaucaccaaccugugccccuucggcgagguguucaacgccacccgguucgccagcgucuacgccuggaaccgcaagcggaucuccaacugcguggcggacuacagcgugcuguacaacuccgccagcuucuccacguucaagugcuacggcgucagccccaccaagcucaacgaccugugcuucaccaacguguacgccgacuccuucgugauccgcggggacgagguccggcagaucgcccccggccagaccgggaagaucgccgacuacaacuacaagcugccggacgacuucacgggcugcgugaucgcguggaacagcaacaaccucgacuccaaggucgggggcaacuacaacuaccuguaccgccuguuccgcaagagcaaccucaagcccuucgagcgggacaucuccaccgagaucuaccaggccggcagcacccccugcaacgggguggagggcuucaacugcuacuucccccugcaguccuacggguuccagccgaccaacggcgugggguaccagcccuaccggguggucgugcugagcuucgagcuccugcacgcccccgccacggugugcggccccaagaaguccaccaaccuggucaagaacaagugcgugaacuucaacuucaacggccucaccgggaccggcgugcugaccgagagcaacaagaaguuccugccguuccagcaguucgggcgcgacaucgccgacacgaccgacgcgguccgcgacccccagacccuggagauccucgacaucacccccugcagcuucggcgggguguccgugaucacgccgggcaccaacaccagcaaccaggucgccgugcuguaccaggacgugaacugcaccgagguccccguggccauccacgccgaccagcugacgcccaccuggcggguguacuccaccggcagcaacgucuuccagacccgcgccgggugccucaucggcgcggagcacgugaacaacuccuacgagugcgacauccccaucggggccggcaucugcgccagcuaccagacgcagaccaacuccccgcggcgcgcccggagcguggcgucccagagcaucaucgccuacaccaugucccugggcgccgagaacagcgucgccuacuccaacaacagcaucgccauccccaccaacuucacgaucuccgugaccaccgagauccugcccgugagcaugaccaagacgagcgucgacugcaccauguacaucugcggggacuccaccgagugcagcaaccuccugcugcaguacggcuccuucugcacccagcucaaccgcgcgcugacggggaucgccguggagcaggacaagaacacccaggagguguucgcccaggucaagcagaucuacaagacgcccccgaucaaggacuucggcggguucaacuucagccagauccugcccgaccccuccaagcccagcaagcgguccuucaucgaggaccuccuguucaacaaggugacccuggccgacgccggcuucaucaagcaguacggcgacugccucggggacaucgcggcccgcgaccugaucugcgcccagaaguucaacggccugaccgugcucccgccccugcugaccgacgagaugaucgcccaguacaccagcgcccuccuggcggggaccaucacguccggcuggaccuucggggccggcgccgcccugcagauccccuucgcgaugcagauggccuaccgguucaacggcaucggggucacccagaacgugcucuacgagaaccagaagcugaucgccaaccaguucaacagcgccaucggcaagauccaggacucccugagcuccaccgccagcgcgcucgggaagcugcaggacguggucaaccagaacgcccaggcccugaacacgcucgugaagugccuguccagcaacuucggcgccaucuccagcgugcugaacgacauccucucccgccuggacaaggucgaggccgaggugcagaucgaccggcugaucaccgggcgccuccagugccugcagaccuacgugacccagcagcugauccgggcggccgagauccgcgccagcgccaaccucgccgcgaccaagauguccgagugcguccugggccagagcaagcggguggacuucugcggcaagggguaccaccugauguccuucccccagagcgccccgcacggcguggucuuccuccacgugacguacguccccgcccaggagaagaacuucaccaccgcccccgcgaucugccacgacgggaaggcccacuucccccgcgagggcguguucguguccaacgggacccacugguucgucacgcagcggaacuucuacgagccgcagaucaucaccaccgacaacaccuucgugagcggcaacugcgacguggucaucggcaucgugaacaacacgguguacgacccccugcagcccgagcuggacuccuucaaggaggagcucgacaaguacuucaagaaccacaccagccccgacgucgaccugggggacaucuccggcaucaacgccagcguggugaacauccagaaggagaucgaccgccugaacgaggucgccaagaaccucaacgagucccugaucgaccugcaggagcucgggaaguacgagcaguacaucaaguggccgugguacaucuggcugggcuucaucgccggccugaucgcgaucgugauggugaccaucaugcucugcugcaugaccagcugcugcuccugccugaaggggugcugcagcugcggcuccugcugcaaguucgacgaggacgacagcgagcccguccugaagggggugaagcuccacuacacgugaggacuagucccuguucccagagcccacuuuuuuuucuuuuuuugaaauaaaauagccugucuuucagaucucaaaggcucuuuucagagccaccaaaaaaaaaaaaaaaaaaaaaaaaaaaaaaaaaaaaaaaaaaaaaaaaaaaaaaaaaaaaaaaaaaaaaaaaaaaaaaaaaaaaaaaaaaaaaaaaaaaaa

SEQ ID NO: 12348 - RNA, 4094 nt, Artificial Sequence
  SARS-CoV-2/Wuhan/WIV05/2019__EPI_ISL_402128 spike protein mRNA gc (1-1273)(F970C_G999C)
aggagagucccgcagucggcguccagcggcucugcuuguucgugugugugucguugcaggccuuauucaagcuuaccauguucguguuccugguccuccugccccuggugagcucccagugcgugaaccucaccacccgcacgcagcugccgcccgccuacaccaacagcuucacccggggcgucuacuaccccgacaagguguuccgcuccagcgugcugcacuccacccaggaccucuuccugcccuucuucagcaacgucacgugguuccacgccauccacguguccgggaccaacggcaccaagcgguucgacaacccggugcugcccuucaacgacggggucuacuucgcgagcaccgagaaguccaacaucauccgcggcuggaucuucgggacgacccucgacagcaagacccagucccugcugaucgugaacaacgccaccaacguggucaucaaggugugcgaguuccaguucugcaacgaccccuuccucggcguguacuaccacaagaacaacaagagcuggauggaguccgaguuccgggucuacagcuccgccaacaacugcacguucgaguacgugagccagcccuuccugauggaccuggagggcaagcaggggaacuucaagaaccuccgcgaguucguguucaagaacaucgacggcuacuucaagaucuacuccaagcacaccccgaucaaccugguccgggaccugccccagggguucagcgcccucgagccccugguggaccugcccaucggcaucaacaucacccgcuuccagacccuccuggcccugcaccgguccuaccucacgccgggggacagcagcuccggcuggaccgcgggcgccgccgccuacuacgugggguaccugcagccccgcaccuuccugcucaaguacaacgagaacggcaccaucacggacgcggucgacugcgcccuggacccccugagcgagaccaagugcacccucaaguccuucaccguggagaaggggaucuaccagacgagcaacuuccgggugcagcccaccgaguccaucguccgcuucccgaacaucaccaaccugugccccuucggcgagguguucaacgccacccgguucgccagcgucuacgccuggaaccgcaagcggaucuccaacugcguggcggacuacagcgugcuguacaacuccgccagcuucuccacguucaagugcuacggcgucagccccaccaagcucaacgaccugugcuucaccaacguguacgccgacuccuucgugauccgcggggacgagguccggcagaucgcccccggccagaccgggaagaucgccgacuacaacuacaagcugccggacgacuucacgggcugcgugaucgcguggaacagcaacaaccucgacuccaaggucgggggcaacuacaacuaccuguaccgccuguuccgcaagagcaaccucaagcccuucgagcgggacaucuccaccgagaucuaccaggccggcagcacccccugcaacgggguggagggcuucaacugcuacuucccccugcaguccuacggguuccagccgaccaacggcgugggguaccagcccuaccggguggucgugcugagcuucgagcuccugcacgcccccgccacggugugcggccccaagaaguccaccaaccuggucaagaacaagugcgugaacuucaacuucaacggccucaccgggaccggcgugcugaccgagagcaacaagaaguuccugccguuccagcaguucgggcgcgacaucgccgacacgaccgacgcgguccgcgacccccagacccuggagauccucgacaucacccccugcagcuucggcgggguguccgugaucacgccgggcaccaacaccagcaaccaggucgccgugcuguaccaggacgugaacugcaccgagguccccguggccauccacgccgaccagcugacgcccaccuggcggguguacuccaccggcagcaacgucuuccagacccgcgccgggugccucaucggcgcggagcacgugaacaacuccuacgagugcgacauccccaucggggccggcaucugcgccagcuaccagacgcagaccaacuccccgcggcgcgcccggagcguggcgucccagagcaucaucgccuacaccaugucccugggcgccgagaacagcgucgccuacuccaacaacagcaucgccauccccaccaacuucacgaucuccgugaccaccgagauccugcccgugagcaugaccaagacgagcgucgacugcaccauguacaucugcggggacuccaccgagugcagcaaccuccugcugcaguacggcuccuucugcacccagcucaaccgcgcgcugacggggaucgccguggagcaggacaagaacacccaggagguguucgcccaggucaagcagaucuacaagacgcccccgaucaaggacuucggcggguucaacuucagccagauccugcccgaccccuccaagcccagcaagcgguccuucaucgaggaccuccuguucaacaaggugacccuggccgacgccggcuucaucaagcaguacggcgacugccucggggacaucgcggcccgcgaccugaucugcgcccagaaguucaacggccugaccgugcucccgccccugcugaccgacgagaugaucgcccaguacaccagcgcccuccuggcggggaccaucacguccggcuggaccuucggggccggcgccgcccugcagauccccuucgcgaugcagauggccuaccgguucaacggcaucggggucacccagaacgugcucuacgagaaccagaagcugaucgccaaccaguucaacagcgccaucggcaagauccaggacucccugagcuccaccgccagcgcgcucgggaagcugcaggacguggucaaccagaacgcccaggcccugaacacgcucgugaagcagcuguccagcaacugcggcgccaucuccagcgugcugaacgacauccucucccgccuggacaaggucgaggccgaggugcagaucgaccggcugaucaccugucgccuccagagccugcagaccuacgugacccagcagcugauccgggcggccgagauccgcgccagcgccaaccucgccgcgaccaagauguccgagugcguccugggccagagcaagcggguggacuucugcggcaagggguaccaccugauguccuucccccagagcgccccgcacggcguggucuuccuccacgugacguacguccccgcccaggagaagaacuucaccaccgcccccgcgaucugccacgacgggaaggcccacuucccccgcgagggcguguucguguccaacgggacccacugguucgucacgcagcggaacuucuacgagccgcagaucaucaccaccgacaacaccuucgugagcggcaacugcgacguggucaucggcaucgugaacaacacgguguacgacccccugcagcccgagcuggacuccuucaaggaggagcucgacaaguacuucaagaaccacaccagccccgacgucgaccugggggacaucuccggcaucaacgccagcguggugaacauccagaaggagaucgaccgccugaacgaggucgccaagaaccucaacgagucccugaucgaccugcaggagcucgggaaguacgagcaguacaucaaguggccgugguacaucuggcugggcuucaucgccggccugaucgcgaucgugauggugaccaucaugcucugcugcaugaccagcugcugcuccugccugaaggggugcugcagcugcggcuccugcugcaaguucgacgaggacgacagcgagcccguccugaagggggugaagcuccacuacacgugaggacuagucccuguucccagagcccacuuuuuuuucuuuuuuugaaauaaaauagccugucuuucagaucucaaaggcucuuuucagagccaccaaaaaaaaaaaaaaaaaaaaaaaaaaaaaaaaaaaaaaaaaaaaaaaaaaaaaaaaaaaaaaaaaaaaaaaaaaaaaaaaaaaaaaaaaaaaaaaaaaaaa

SEQ ID NO: 12349 - RNA, 4094 nt, Artificial Sequence
  SARS-CoV-2/Wuhan/WIV05/2019__EPI_ISL_402128 spike protein mRNA gc (1-1273)(A972C_R995C)
aggagagucccgcagucggcguccagcggcucugcuuguucgugugugugucguugcaggccuuauucaagcuuaccauguucguguuccugguccuccugccccuggugagcucccagugcgugaaccucaccacccgcacgcagcugccgcccgccuacaccaacagcuucacccggggcgucuacuaccccgacaagguguuccgcuccagcgugcugcacuccacccaggaccucuuccugcccuucuucagcaacgucacgugguuccacgccauccacguguccgggaccaacggcaccaagcgguucgacaacccggugcugcccuucaacgacggggucuacuucgcgagcaccgagaaguccaacaucauccgcggcuggaucuucgggacgacccucgacagcaagacccagucccugcugaucgugaacaacgccaccaacguggucaucaaggugugcgaguuccaguucugcaacgaccccuuccucggcguguacuaccacaagaacaacaagagcuggauggaguccgaguuccgggucuacagcuccgccaacaacugcacguucgaguacgugagccagcccuuccugauggaccuggagggcaagcaggggaacuucaagaaccuccgcgaguucguguucaagaacaucgacggcuacuucaagaucuacuccaagcacaccccgaucaaccugguccgggaccugccccagggguucagcgcccucgagccccugguggaccugcccaucggcaucaacaucacccgcuuccagacccuccuggcccugcaccgguccuaccucacgccgggggacagcagcuccggcuggaccgcgggcgccgccgccuacuacgugggguaccugcagccccgcaccuuccugcucaaguacaacgagaacggcaccaucacggacgcggucgacugcgcccuggacccccugagcgagaccaagugcacccucaaguccuucaccguggagaaggggaucuaccagacgagcaacuuccgggugcagcccaccgaguccaucguccgcuucccgaacaucaccaaccugugccccuucggcgagguguucaacgccacccgguucgccagcgucuacgccuggaaccgcaagcggaucuccaacugcguggcggacuacagcgugcuguacaacuccgccagcuucuccacguucaagugcuacggcgucagccccaccaagcucaacgaccugugcuucaccaacguguacgccgacuccuucgugauccgcggggacgagguccggcagaucgcccccggccagaccgggaagaucgccgacuacaacuacaagcugccggacgacuucacgggcugcgugaucgcguggaacagcaacaaccucgacuccaaggucgggggcaacuacaacuaccuguaccgccuguuccgcaagagcaaccucaagcccuucgagcgggacaucuccaccgagaucuaccaggccggcagcacccccugcaacgggguggagggcuucaacugcuacuucccccugcaguccuacggguuccagccgaccaacggcgugggguaccagcccuaccggguggucgugcugagcuucgagcuccugcacgcccccgccacggugugcggccccaagaaguccaccaaccuggucaagaacaagugcgugaacuucaacuucaacggccucaccgggaccggcgugcugaccgagagcaacaagaaguuccugccguuccagcaguucgggcgcgacaucgccgacacgaccgacgcgguccgcgacccccagacccuggagauccucgacaucacccccugcagcuucggcgggguguccgugaucacgccgggcaccaacaccagcaaccaggucgccgugcuguaccaggacgugaacugcaccgagguccccguggccauccacgccgaccagcugacgcccaccuggcggguguacuccaccggcagcaacgucuuccagacccgcgccgggugccucaucggcgcggagcacgugaacaacuccuacgagugcgacauccccaucggggccggcaucugcgccagcuaccagacgcagaccaacuccccgcggcgcgcccggagcguggcgucccagagcaucaucgccuacaccaugucccugggcgccgagaacagcgucgccuacuccaacaacagcaucgccauccccaccaacuucacgaucuccgugaccaccgagauccugcccgugagcaugaccaagacgagcgucgacugcaccauguacaucugcggggacuccaccgagugcagcaaccuccugcugcaguacggcuccuucugcacccagcucaaccgcgcgcugacggggaucgccguggagcaggacaagaacacccaggagguguucgcccaggucaagcagaucuacaagacgcccccgaucaaggacuucggcggguucaacuucagccagauccugcccgaccccuccaagcccagcaagcgguccuucaucgaggaccuccuguucaacaaggugacccuggccgacgccggcuucaucaagcaguacggcgacugccucggggacaucgcggcccgcgaccugaucugcgcccagaaguucaacggccugaccgugcucccgccccugcugaccgacgagaugaucgcccaguacaccagcgcccuccuggcggggaccaucacguccggcuggaccuucggggccggcgccgcccugcagauccccuucgcgaugcagauggccuaccgguucaacggcaucggggucacccagaacgugcucuacgagaaccagaagcugaucgccaaccaguucaacagcgccaucggcaagauccaggacucccugagcuccaccgccagcgcgcucgggaagcugcaggacguggucaaccagaacgcccaggcccugaacacgcucgugaagcagcuguccagcaacuucggcugcaucuccagcgugcugaacgacauccucucccgccuggacaaggucgaggccgaggugcagaucgacugccugaucaccgggcgccuccagagccugcagaccuacgugacccagcagcugauccgggcggccgagauccgcgccagcgccaaccucgccgcgaccaagauguccgagugcguccugggccagagcaagcggguggacuucugcggcaagggguaccaccugauguccuucccccagagcgccccgcacggcguggucuuccuccacgugacguacguccccgcccaggagaagaacuucaccaccgcccccgcgaucugccacgacgggaaggcccacuucccccgcgagggcguguucguguccaacgggacccacugguucgucacgcagcggaacuucuacgagccgcagaucaucaccaccgacaacaccuucgugagcggcaacugcgacguggucaucggcaucgugaacaacacgguguacgacccccugcagcccgagcuggacuccuucaaggaggagcucgacaaguacuucaagaaccacaccagccccgacgucgaccugggggacaucuccggcaucaacgccagcguggugaacauccagaaggagaucgaccgccugaacgaggucgccaagaaccucaacgagucccugaucgaccugcaggagcucgggaaguacgagcaguacaucaaguggccgugguacaucuggcugggcuucaucgccggccugaucgcgaucgugauggugaccaucaugcucugcugcaugaccagcugcugcuccugccugaaggggugcugcagcugcggcuccugcugcaaguucgacgaggacgacagcgagcccguccugaagggggugaagcuccacuacacgugaggacuagucccuguucccagagcccacuuuuuuuucuuuuuuugaaauaaaauagccugucuuucagaucucaaaggcucuuuucagagccaccaaaaaaaaaaaaaaaaaaaaaaaaaaaaaaaaaaaaaaaaaaaaaaaaaaaaaaaaaaaaaaaaaaaaaaaaaaaaaaaaaaaaaaaaaaaaaaaaaaaaa

SEQ ID NO: 12350 - RNA, 4094 nt, Artificial Sequence
  SARS-CoV-2/Wuhan/WIV05/2019__EPI_ISL_402128 spike protein mRNA gc (1-1273)(A890C_V1040C)
aggagagucccgcagucggcguccagcggcucugcuuguucgugugugugucguugcaggccuuauucaagcuuaccauguucguguuccugguccuccugccccuggugagcucccagugcgugaaccucaccacccgcacgcagcugccgcccgccuacaccaacagcuucacccggggcgucuacuaccccgacaagguguuccgcuccagcgugcugcacuccacccaggaccucuuccugcccuucuucagcaacgucacgugguuccacgccauccacguguccgggaccaacggcaccaagcgguucgacaacccggugcugcccuucaacgacggggucuacuucgcgagcaccgagaaguccaacaucauccgcggcuggaucuucgggacgacccucgacagcaagacccagucccugcugaucgugaacaacgccaccaacguggucaucaaggugugcgaguuccaguucugcaacgaccccuuccucggcguguacuaccacaagaacaacaagagcuggauggaguccgaguuccgggucuacagcuccgccaacaacugcacguucgaguacgugagccagcccuuccugauggaccuggagggcaagcaggggaacuucaagaaccuccgcgaguucguguucaagaacaucgacggcuacuucaagaucuacuccaagcacaccccgaucaaccugguccgggaccugccccagggguucagcgcccucgagccccugguggaccugcccaucggcaucaacaucacccgcuuccagacccuccuggcccugcaccgguccuaccucacgccgggggacagcagcuccggcuggaccgcgggcgccgccgccuacuacgugggguaccugcagccccgcaccuuccugcucaaguacaacgagaacggcaccaucacggacgcggucgacugcgcccuggacccccugagcgagaccaagugcacccucaaguccuucaccguggagaaggggaucuaccagacgagcaacuuccgggugcagcccaccgaguccaucguccgcuucccgaacaucaccaaccugugccccuucggcgagguguucaacgccacccgguucgccagcgucuacgccuggaaccgcaagcggaucuccaacugcguggcggacuacagcgugcuguacaacuccgccagcuucuccacguucaagugcuacggcgucagccccaccaagcucaacgaccugugcuucaccaacguguacgccgacuccuucgugauccgcggggacgagguccggcagaucgcccccggccagaccgggaagaucgccgacuacaacuacaagcugccggacgacuucacgggcugcgugaucgcguggaacagcaacaaccucgacuccaaggucgggggcaacuacaacuaccuguaccgccuguuccgcaagagcaaccucaagcccuucgagcgggacaucuccaccgagaucuaccaggccggcagcacccccugcaacgggguggagggcuucaacugcuacuucccccugcaguccuacggguuccagccgaccaacggcgugggguaccagcccuaccggguggucgugcugagcuucgagcuccugcacgcccccgccacggugugcggccccaagaaguccaccaaccuggucaagaacaagugcgugaacuucaacuucaacggccucaccgggaccggcgugcugaccgagagcaacaagaaguuccugccguuccagcaguucgggcgcgacaucgccgacacgaccgacgcgguccgcgacccccagacccuggagauccucgacaucacccccugcagcuucggcgggguguccgugaucacgccgggcaccaacaccagcaaccaggucgccgugcuguaccaggacgugaacugcaccgagguccccguggccauccacgccgaccagcugacgcccaccuggcggguguacuccaccggcagcaacgucuuccagacccgcgccgggugccucaucggcgcggagcacgugaacaacuccuacgagugcgacauccccaucggggccggcaucugcgccagcuaccagacgcagaccaacuccccgcggcgcgcccggagcguggcgucccagagcaucaucgccuacaccaugucccugggcgccgagaacagcgucgccuacuccaacaacagcaucgccauccccaccaacuucacgaucuccgugaccaccgagauccugcccgugagcaugaccaagacgagcgucgacugcaccauguacaucugcggggacuccaccgagugcagcaaccuccugcugcaguacggcuccuucugcacccagcucaaccgcgcgcugacggggaucgccguggagcaggacaagaacacccaggagguguucgcccaggucaagcagaucuacaagacgcccccgaucaaggacuucggcggguucaacuucagccagauccugcccgaccccuccaagcccagcaagcgguccuucaucgaggaccuccuguucaacaaggugacccuggccgacgccggcuucaucaagcaguacggcgacugccucggggacaucgcggcccgcgaccugaucugcgcccagaaguucaacggccugaccgugcucccgccccugcugaccgacgagaugaucgcccaguacaccagcgcccuccuggcggggaccaucacguccggcuggaccuucgggugcggcgccgcccugcagauccccuucgcgaugcagauggccuaccgguucaacggcaucggggucacccagaacgugcucuacgagaaccagaagcugaucgccaaccaguucaacagcgccaucggcaagauccaggacucccugagcuccaccgccagcgcgcucgggaagcugcaggacguggucaaccagaacgcccaggcccugaacacgcucgugaagcagcuguccagcaacuucggcgccaucuccagcgugcugaacgacauccucucccgccuggacaaggucgaggccgaggugcagaucgaccggcugaucaccgggcgccuccagagccugcagaccuacgugacccagcagcugauccgggcggccgagauccgcgccagcgccaaccucgccgcgaccaagauguccgagugcguccugggccagagcaagcggugcgacuucugcggcaagggguaccaccugauguccuucccccagagcgccccgcacggcguggucuuccuccacgugacguacguccccgcccaggagaagaacuucaccaccgcccccgcgaucugccacgacgggaaggcccacuucccccgcgagggcguguucguguccaacgggacccacugguucgucacgcagcggaacuucuacgagccgcagaucaucaccaccgacaacaccuucgugagcggcaacugcgacguggucaucggcaucgugaacaacacgguguacgacccccugcagcccgagcuggacuccuucaaggaggagcucgacaaguacuucaagaaccacaccagccccgacgucgaccugggggacaucuccggcaucaacgccagcguggugaacauccagaaggagaucgaccgccugaacgaggucgccaagaaccucaacgagucccugaucgaccugcaggagcucgggaaguacgagcaguacaucaaguggccgugguacaucuggcugggcuucaucgccggccugaucgcgaucgugauggugaccaucaugcucugcugcaugaccagcugcugcuccugccugaaggggugcugcagcugcggcuccugcugcaaguucgacgaggacgacagcgagcccguccugaagggggugaagcuccacuacacgugaggacuagucccuguucccagagcccacuuuuuuuucuuuuuuugaaauaaaauagccugucuuucagaucucaaaggcucuuuucagagccaccaaaaaaaaaaaaaaaaaaaaaaaaaaaaaaaaaaaaaaaaaaaaaaaaaaaaaaaaaaaaaaaaaaaaaaaaaaaaaaaaaaaaaaaaaaaaaaaaaaaaa

SEQ ID NO: 12351 - RNA, 4094 nt, Artificial Sequence
  SARS-CoV-2/Wuhan/WIV05/2019__EPI_ISL_402128 spike protein mRNA gc (1-1273)(T874C_S1055C)
aggagagucccgcagucggcguccagcggcucugcuuguucgugugugugucguugcaggccuuauucaagcuuaccauguucguguuccugguccuccugccccuggugagcucccagugcgugaaccucaccacccgcacgcagcugccgcccgccuacaccaacagcuucacccggggcgucuacuaccccgacaagguguuccgcuccagcgugcugcacuccacccaggaccucuuccugcccuucuucagcaacgucacgugguuccacgccauccacguguccgggaccaacggcaccaagcgguucgacaacccggugcugcccuucaacgacggggucuacuucgcgagcaccgagaaguccaacaucauccgcggcuggaucuucgggacgacccucgacagcaagacccagucccugcugaucgugaacaacgccaccaacguggucaucaaggugugcgaguuccaguucugcaacgaccccuuccucggcguguacuaccacaagaacaacaagagcuggauggaguccgaguuccgggucuacagcuccgccaacaacugcacguucgaguacgugagccagcccuuccugauggaccuggagggcaagcaggggaacuucaagaaccuccgcgaguucguguucaagaacaucgacggcuacuucaagaucuacuccaagcacaccccgaucaaccugguccgggaccugccccagggguucagcgcccucgagccccugguggaccugcccaucggcaucaacaucacccgcuuccagacccuccuggcccugcaccgguccuaccucacgccgggggacagcagcuccggcuggaccgcgggcgccgccgccuacuacgugggguaccugcagccccgcaccuuccugcucaaguacaacgagaacggcaccaucacggacgcggucgacugcgcccuggacccccugagcgagaccaagugcacccucaaguccuucaccguggagaaggggaucuaccagacgagcaacuuccgggugcagcccaccgaguccaucguccgcuucccgaacaucaccaaccugugccccuucggcgagguguucaacgccacccgguucgccagcgucuacgccuggaaccgcaagcggaucuccaacugcguggcggacuacagcgugcuguacaacuccgccagcuucuccacguucaagugcuacggcgucagccccaccaagcucaacgaccugugcuucaccaacguguacgccgacuccuucgugauccgcggggacgagguccggcagaucgcccccggccagaccgggaagaucgccgacuacaacuacaagcugccggacgacuucacgggcugcgugaucgcguggaacagcaacaaccucgacuccaaggucgggggcaacuacaacuaccuguaccgccuguuccgcaagagcaaccucaagcccuucgagcgggacaucuccaccgagaucuaccaggccggcagcacccccugcaacgggguggagggcuucaacugcuacuucccccugcaguccuacggguuccagccgaccaacggcgugggguaccagcccuaccggguggucgugcugagcuucgagcuccugcacgcccccgccacggugugcggccccaagaaguccaccaaccuggucaagaacaagugcgugaacuucaacuucaacggccucaccgggaccggcgugcugaccgagagcaacaagaaguuccugccguuccagcaguucgggcgcgacaucgccgacacgaccgacgcgguccgcgacccccagacccuggagauccucgacaucacccccugcagcuucggcgggguguccgugaucacgccgggcaccaacaccagcaaccaggucgccgugcuguaccaggacgugaacugcaccgagguccccguggccauccacgccgaccagcugacgcccaccuggcggguguacuccaccggcagcaacgucuuccagacccgcgccgggugccucaucggcgcggagcacgugaacaacuccuacgagugcgacauccccaucggggccggcaucugcgccagcuaccagacgcagaccaacuccccgcggcgcgcccggagcguggcgucccagagcaucaucgccuacaccaugucccugggcgccgagaacagcgucgccuacuccaacaacagcaucgccauccccaccaacuucacgaucuccgugaccaccgagauccugcccgugagcaugaccaagacgagcgucgacugcaccauguacaucugcggggacuccaccgagugcagcaaccuccugcugcaguacggcuccuucugcacccagcucaaccgcgcgcugacggggaucgccguggagcaggacaagaacacccaggagguguucgcccaggucaagcagaucuacaagacgcccccgaucaaggacuucggcggguucaacuucagccagauccugcccgaccccuccaagcccagcaagcgguccuucaucgaggaccuccuguucaacaaggugacccuggccgacgccggcuucaucaagcaguacggcgacugccucggggacaucgcggcccgcgaccugaucugcgcccagaaguucaacggccugaccgugcucccgccccugcugaccgacgagaugaucgcccaguacugcagcgcccuccuggcggggaccaucacguccggcuggaccuucggggccggcgccgcccugcagauccccuucgcgaugcagauggccuaccgguucaacggcaucggggucacccagaacgugcucuacgagaaccagaagcugaucgccaaccaguucaacagcgccaucggcaagauccaggacucccugagcuccaccgccagcgcgcucgggaagcugcaggacguggucaaccagaacgcccaggcccugaacacgcucgugaagcagcuguccagcaacuucggcgccaucuccagcgugcugaacgacauccucucccgccuggacaaggucgaggccgaggugcagaucgaccggcugaucaccgggcgccuccagagccugcagaccuacgugacccagcagcugauccgggcggccgagauccgcgccagcgccaaccucgccgcgaccaagauguccgagugcguccugggccagagcaagcggguggacuucugcggcaagggguaccaccugauguccuucccccagugcgccccgcacggcguggucuuccuccacgugacguacguccccgcccaggagaagaacuucaccaccgcccccgcgaucugccacgacgggaaggcccacuucccccgcgagggcguguucguguccaacgggacccacugguucgucacgcagcggaacuucuacgagccgcagaucaucaccaccgacaacaccuucgugagcggcaacugcgacguggucaucggcaucgugaacaacacgguguacgacccccugcagcccgagcuggacuccuucaaggaggagcucgacaaguacuucaagaaccacaccagccccgacgucgaccugggggacaucuccggcaucaacgccagcguggugaacauccagaaggagaucgaccgccugaacgaggucgccaagaaccucaacgagucccugaucgaccugcaggagcucgggaaguacgagcaguacaucaaguggccgugguacaucuggcugggcuucaucgccggccugaucgcgaucgugauggugaccaucaugcucugcugcaugaccagcugcugcuccugccugaaggggugcugcagcugcggcuccugcugcaaguucgacgaggacgacagcgagcccguccugaagggggugaagcuccacuacacgugaggacuagucccuguucccagagcccacuuuuuuuucuuuuuuugaaauaaaauagccugucuuucagaucucaaaggcucuuuucagagccaccaaaaaaaaaaaaaaaaaaaaaaaaaaaaaaaaaaaaaaaaaaaaaaaaaaaaaaaaaaaaaaaaaaaaaaaaaaaaaaaaaaaaaaaaaaaaaaaaaaaaa

SEQ ID NO: 12352 - RNA, 2318 nt, Artificial Sequence; identical to SEQ ID NO: 152
  SARS-CoV-2/Wuhan/WIV05/2019__EPI_ISL_402128 spike protein mRNA gc (1-681) R9489, R9493

SEQ ID NO: 12353 - RNA, 4388 nt, Artificial Sequence
  SARS-CoV-2/Wuhan/WIV05/2019__EPI_ISL_402128 spike protein mRNA gc (1-1211) LumSynth construct
aggagagucccgcagucggcguccagcggcucugcuuguucgugugugugucguugcaggccuuauucaagcuuaccauguucguguuccugguccuccugccccuggugagcucccagugcgugaaccucaccacccgcacgcagcugccgcccgccuacaccaacagcuucacccggggcgucuacuaccccgacaagguguuccgcuccagcgugcugcacuccacccaggaccucuuccugcccuucuucagcaacgucacgugguuccacgccauccacguguccgggaccaacggcaccaagcgguucgacaacccggugcugcccuucaacgacggggucuacuucgcgagcaccgagaaguccaacaucauccgcggcuggaucuucgggacgacccucgacagcaagacccagucccugcugaucgugaacaacgccaccaacguggucaucaaggugugcgaguuccaguucugcaacgaccccuuccucggcguguacuaccacaagaacaacaagagcuggauggaguccgaguuccgggucuacagcuccgccaacaacugcacguucgaguacgugagccagcccuuccugauggaccuggagggcaagcaggggaacuucaagaaccuccgcgaguucguguucaagaacaucgacggcuacuucaagaucuacuccaagcacaccccgaucaaccugguccgggaccugccccagggguucagcgcccucgagccccugguggaccugcccaucggcaucaacaucacccgcuuccagacccuccuggcccugcaccgguccuaccucacgccgggggacagcagcuccggcuggaccgcgggcgccgccgccuacuacgugggguaccugcagccccgcaccuuccugcucaaguacaacgagaacggcaccaucacggacgcggucgacugcgcccuggacccccugagcgagaccaagugcacccucaaguccuucaccguggagaaggggaucuaccagacgagcaacuuccgggugcagcccaccgaguccaucguccgcuucccgaacaucaccaaccugugccccuucggcgagguguucaacgccacccgguucgccagcgucuacgccuggaaccgcaagcggaucuccaacugcguggcggacuacagcgugcuguacaacuccgccagcuucuccacguucaagugcuacggcgucagccccaccaagcucaacgaccugugcuucaccaacguguacgccgacuccuucgugauccgcggggacgagguccggcagaucgcccccggccagaccgggaagaucgccgacuacaacuacaagcugccggacgacuucacgggcugcgugaucgcguggaacagcaacaaccucgacuccaaggucgggggcaacuacaacuaccuguaccgccuguuccgcaagagcaaccucaagcccuucgagcgggacaucuccaccgagaucuaccaggccggcagcacccccugcaacgggguggagggcuucaacugcuacuucccccugcaguccuacggguuccagccgaccaacggcgugggguaccagcccuaccggguggucgugcugagcuucgagcuccugcacgcccccgccacggugugcggccccaagaaguccaccaaccuggucaagaacaagugcgugaacuucaacuucaacggccucaccgggaccggcgugcugaccgagagcaacaagaaguuccugccguuccagcaguucgggcgcgacaucgccgacacgaccgacgcgguccgcgacccccagacccuggagauccucgacaucacccccugcagcuucggcgggguguccgugaucacgccgggcaccaacaccagcaaccaggucgccgugcuguaccaggacgugaacugcaccgagguccccguggccauccacgccgaccagcugacgcccaccuggcggguguacuccaccggcagcaacgucuuccagacccgcgccgggugccucaucggcgcggagcacgugaacaacuccuacgagugcgacauccccaucggggccggcaucugcgccagcuaccagacgcagaccaacuccccgcggcgcgcccggagcguggcgucccagagcaucaucgccuacaccaugucccugggcgccgagaacagcgucgccuacuccaacaacagcaucgccauccccaccaacuucacgaucuccgugaccaccgagauccugcccgugagcaugaccaagacgagcgucgacugcaccauguacaucugcggggacuccaccgagugcagcaaccuccugcugcaguacggcuccuucugcacccagcucaaccgcgcgcugacggggaucgccguggagcaggacaagaacacccaggagguguucgcccaggucaagcagaucuacaagacgcccccgaucaaggacuucggcggguucaacuucagccagauccugcccgaccccuccaagcccagcaagcgguccuucaucgaggaccuccuguucaacaaggugacccuggccgacgccggcuucaucaagcaguacggcgacugccucggggacaucgcggcccgcgaccugaucugcgcccagaaguucaacggccugaccgugcucccgccccugcugaccgacgagaugaucgcccaguacaccagcgcccuccuggcggggaccaucacguccggcuggaccuucggggccggcgccgcccugcagauccccuucgcgaugcagauggccuaccgguucaacggcaucggggucacccagaacgugcucuacgagaaccagaagcugaucgccaaccaguucaacagcgccaucggcaagauccaggacucccugagcuccaccgccagcgcgcucgggaagcugcaggacguggucaaccagaacgcccaggcccugaacacgcucgugaagcagcuguccagcaacuucggcgccaucuccagcgugcugaacgacauccucucccgccuggacaaggucgaggccgaggugcagaucgaccggcugaucaccgggcgccuccagagccugcagaccuacgugacccagcagcugauccgggcggccgagauccgcgccagcgccaaccucgccgcgaccaagauguccgagugcguccugggccagagcaagcggguggacuucugcggcaagggguaccaccugauguccuucccccagagcgccccgcacggcguggucuuccuccacgugacguacguccccgcccaggagaagaacuucaccaccgcccccgcgaucugccacgacgggaaggcccacuucccccgcgagggcguguucguguccaacgggacccacugguucgucacgcagcggaacuucuacgagccgcagaucaucaccaccgacaacaccuucgugagcggcaacugcgacguggucaucggcaucgugaacaacacgguguacgacccccugcagcccgagcuggacuccuucaaggaggagcucgacaaguacuucaagaaccacaccagccccgacgucgaccugggggacaucuccggcaucaacgccagcguggugaacauccagaaggagaucgaccgccugaacgaggucgccaagaaccucaacgagucccugaucgaccugcaggagcucgggaaguacgagcaguacaucaagggcggcgggagcgggggcgggcagaucuacgagggcaagcugaccgccgaggggcuccgcuucggcaucguggccagccgguucaaccacgcgcuggucgaccgccugguggagggggccaucgacgccaucgugcggcacggcgggcgcgaggaggacaucacccucguccgggugcccggcuccugggagaucccgguggccgccggcgagcuggcccgcaaggaggacaucgacgcggucaucgccaucggggugcugauccggggcgccacgccccacuucgacuacaucgccagcgagguguccaaggggcucgcggaccugagccuggagcuccgcaagcccaucaccuucggcgucaucaccgccgacacccuggagcaggccaucgagcgggccgggacgaagcacggcaacaagggcugggaggccgcgcuguccgccaucgagauggccaaccucuucaagagccugcgcugaggacuagucccuguucccagagcccacuuuuuuuucuuuuuuugaaauaaaauagccugucuuucagaucucaaaggcucuuuucagagccaccaaaaaaaaaaaaaaaaaaaaaaaaaaaaaaaaaaaaaaaaaaaaaaaaaaaaaaaaaaaaaaaaaaaaaaaaaaaaaaaaaaaaaaaaaaaaaaaaaaaaa

SEQ ID NO: 12354 - RNA, 4388 nt, Artificial Sequence
  SARS-CoV-2/Wuhan/WIV05/2019__EPI_ISL_402128 spike protein mRNA gc (1-1211)(K986P_V987P) LumSynth construct
aggagagucccgcagucggcguccagcggcucugcuuguucgugugugugucguugcaggccuuauucaagcuuaccauguucguguuccugguccuccugccccuggugagcucccagugcgugaaccucaccacccgcacgcagcugccgcccgccuacaccaacagcuucacccggggcgucuacuaccccgacaagguguuccgcuccagcgugcugcacuccacccaggaccucuuccugcccuucuucagcaacgucacgugguuccacgccauccacguguccgggaccaacggcaccaagcgguucgacaacccggugcugcccuucaacgacggggucuacuucgcgagcaccgagaaguccaacaucauccgcggcuggaucuucgggacgacccucgacagcaagacccagucccugcugaucgugaacaacgccaccaacguggucaucaaggugugcgaguuccaguucugcaacgaccccuuccucggcguguacuaccacaagaacaacaagagcuggauggaguccgaguuccgggucuacagcuccgccaacaacugcacguucgaguacgugagccagcccuuccugauggaccuggagggcaagcaggggaacuucaagaaccuccgcgaguucguguucaagaacaucgacggcuacuucaagaucuacuccaagcacaccccgaucaaccugguccgggaccugccccagggguucagcgcccucgagccccugguggaccugcccaucggcaucaacaucacccgcuuccagacccuccuggcccugcaccgguccuaccucacgccgggggacagcagcuccggcuggaccgcgggcgccgccgccuacuacgugggguaccugcagccccgcaccuuccugcucaaguacaacgagaacggcaccaucacggacgcggucgacugcgcccuggacccccugagcgagaccaagugcacccucaaguccuucaccguggagaaggggaucuaccagacgagcaacuuccgggugcagcccaccgaguccaucguccgcuucccgaacaucaccaaccugugccccuucggcgagguguucaacgccacccgguucgccagcgucuacgccuggaaccgcaagcggaucuccaacugcguggcggacuacagcgugcuguacaacuccgccagcuucuccacguucaagugcuacggcgucagccccaccaagcucaacgaccugugcuucaccaacguguacgccgacuccuucgugauccgcggggacgagguccggcagaucgcccccggccagaccgggaagaucgccgacuacaacuacaagcugccggacgacuucacgggcugcgugaucgcguggaacagcaacaaccucgacuccaaggucgggggcaacuacaacuaccuguaccgccuguuccgcaagagcaaccucaagcccuucgagcgggacaucuccaccgagaucuaccaggccggcagcacccccugcaacgggguggagggcuucaacugcuacuucccccugcaguccuacggguuccagccgaccaacggcgugggguaccagcccuaccggguggucgugcugagcuucgagcuccugcacgcccccgccacggugugcggccccaagaaguccaccaaccuggucaagaacaagugcgugaacuucaacuucaacggccucaccgggaccggcgugcugaccgagagcaacaagaaguuccugccguuccagcaguucgggcgcgacaucgccgacacgaccgacgcgguccgcgacccccagacccuggagauccucgacaucacccccugcagcuucggcgggguguccgugaucacgccgggcaccaacaccagcaaccaggucgccgugcuguaccaggacgugaacugcaccgagguccccguggccauccacgccgaccagcugacgcccaccuggcggguguacuccaccggcagcaacgucuuccagacccgcgccgggugccucaucggcgcggagcacgugaacaacuccuacgagugcgacauccccaucggggccggcaucugcgccagcuaccagacgcagaccaacuccccgcggcgcgcccggagcguggcgucccagagcaucaucgccuacaccaugucccugggcgccgagaacagcgucgccuacuccaacaacagcaucgccauccccaccaacuucacgaucuccgugaccaccgagauccugcccgugagcaugaccaagacgagcgucgacugcaccauguacaucugcggggacuccaccgagugcagcaaccuccugcugcaguacggcuccuucugcacccagcucaaccgcgcgcugacggggaucgccguggagcaggacaagaacacccaggagguguucgcccaggucaagcagaucuacaagacgcccccgaucaaggacuucggcggguucaacuucagccagauccugcccgaccccuccaagcccagcaagcgguccuucaucgaggaccuccuguucaacaaggugacccuggccgacgccggcuucaucaagcaguacggcgacugccucggggacaucgcggcccgcgaccugaucugcgcccagaaguucaacggccugaccgugcucccgccccugcugaccgacgagaugaucgcccaguacaccagcgcccuccuggcggggaccaucacguccggcuggaccuucggggccggcgccgcccugcagauccccuucgcgaugcagauggccuaccgguucaacggcaucggggucacccagaacgugcucuacgagaaccagaagcugaucgccaaccaguucaacagcgccaucggcaagauccaggacucccugagcuccaccgccagcgcgcucgggaagcugcaggacguggucaaccagaacgcccaggcccugaacacgcucgugaagcagcuguccagcaacuucggcgccaucuccagcgugcugaacgacauccucucccgccuggacccgcccgaggccgaggugcagaucgaccggcugaucaccgggcgccuccagagccugcagaccuacgugacccagcagcugauccgggcggccgagauccgcgccagcgccaaccucgccgcgaccaagauguccgagugcguccugggccagagcaagcggguggacuucugcggcaagggguaccaccugauguccuucccccagagcgccccgcacggcguggucuuccuccacgugacguacguccccgcccaggagaagaacuucaccaccgcccccgcgaucugccacgacgggaaggcccacuucccccgcgagggcguguucguguccaacgggacccacugguucgucacgcagcggaacuucuacgagccgcagaucaucaccaccgacaacaccuucgugagcggcaacugcgacguggucaucggcaucgugaacaacacgguguacgacccccugcagcccgagcuggacuccuucaaggaggagcucgacaaguacuucaagaaccacaccagccccgacgucgaccugggggacaucuccggcaucaacgccagcguggugaacauccagaaggagaucgaccgccugaacgaggucgccaagaaccucaacgagucccugaucgaccugcaggagcucgggaaguacgagcaguacaucaagggcggcgggagcgggggcgggcagaucuacgagggcaagcugaccgccgaggggcuccgcuucggcaucguggccagccgguucaaccacgcgcuggucgaccgccugguggagggggccaucgacgccaucgugcggcacggcgggcgcgaggaggacaucacccucguccgggugcccggcuccugggagaucccgguggccgccggcgagcuggcccgcaaggaggacaucgacgcggucaucgccaucggggugcugauccggggcgccacgccccacuucgacuacaucgccagcgagguguccaaggggcucgcggaccugagccuggagcuccgcaagcccaucaccuucggcgucaucaccgccgacacccuggagcaggccaucgagcgggccgggacgaagcacggcaacaagggcugggaggccgcgcuguccgccaucgagauggccaaccucuucaagagccugcgcugaggacuagucccuguucccagagcccacuuuuuuuucuuuuuuugaaauaaaauagccugucuuucagaucucaaaggcucuuuucagagccaccaaaaaaaaaaaaaaaaaaaaaaaaaaaaaaaaaaaaaaaaaaaaaaaaaaaaaaaaaaaaaaaaaaaaaaaaaaaaaaaaaaaaaaaaaaaaaaaaaaaaa

SEQ ID NO: 12355 - RNA, 4388 nt, Artificial Sequence
  SARS-CoV-2/Wuhan/WIV05/2019__EPI_ISL_402128 spike protein mRNA gc (1-1211)(K986P_V987P_T887WN_A1020W) LumSynth construct
aggagagucccgcagucggcguccagcggcucugcuuguucgugugugugucguugcaggccuuauucaagcuuaccauguucguguuccugguccuccugccccuggugagcucccagugcgugaaccucaccacccgcacgcagcugccgcccgccuacaccaacagcuucacccggggcgucuacuaccccgacaagguguuccgcuccagcgugcugcacuccacccaggaccucuuccugcccuucuucagcaacgucacgugguuccacgccauccacguguccgggaccaacggcaccaagcgguucgacaacccggugcugcccuucaacgacggggucuacuucgcgagcaccgagaaguccaacaucauccgcggcuggaucuucgggacgacccucgacagcaagacccagucccugcugaucgugaacaacgccaccaacguggucaucaaggugugcgaguuccaguucugcaacgaccccuuccucggcguguacuaccacaagaacaacaagagcuggauggaguccgaguuccgggucuacagcuccgccaacaacugcacguucgaguacgugagccagcccuuccugauggaccuggagggcaagcaggggaacuucaagaaccuccgcgaguucguguucaagaacaucgacggcuacuucaagaucuacuccaagcacaccccgaucaaccugguccgggaccugccccagggguucagcgcccucgagccccugguggaccugcccaucggcaucaacaucacccgcuuccagacccuccuggcccugcaccgguccuaccucacgccgggggacagcagcuccggcuggaccgcgggcgccgccgccuacuacgugggguaccugcagccccgcaccuuccugcucaaguacaacgagaacggcaccaucacggacgcggucgacugcgcccuggacccccugagcgagaccaagugcacccucaaguccuucaccguggagaaggggaucuaccagacgagcaacuuccgggugcagcccaccgaguccaucguccgcuucccgaacaucaccaaccugugccccuucggcgagguguucaacgccacccgguucgccagcgucuacgccuggaaccgcaagcggaucuccaacugcguggcggacuacagcgugcuguacaacuccgccagcuucuccacguucaagugcuacggcgucagccccaccaagcucaacgaccugugcuucaccaacguguacgccgacuccuucgugauccgcggggacgagguccggcagaucgcccccggccagaccgggaagaucgccgacuacaacuacaagcugccggacgacuucacgggcugcgugaucgcguggaacagcaacaaccucgacuccaaggucgggggcaacuacaacuaccuguaccgccuguuccgcaagagcaaccucaagcccuucgagcgggacaucuccaccgagaucuaccaggccggcagcacccccugcaacgggguggagggcuucaacugcuacuucccccugcaguccuacggguuccagccgaccaacggcgugggguaccagcccuaccggguggucgugcugagcuucgagcuccugcacgcccccgccacggugugcggccccaagaaguccaccaaccuggucaagaacaagugcgugaacuucaacuucaacggccucaccgggaccggcgugcugaccgagagcaacaagaaguuccugccguuccagcaguucgggcgcgacaucgccgacacgaccgacgcgguccgcgacccccagacccuggagauccucgacaucacccccugcagcuucggcgggguguccgugaucacgccgggcaccaacaccagcaaccaggucgccgugcuguaccaggacgugaacugcaccgagguccccguggccauccacgccgaccagcugacgcccaccuggcggguguacuccaccggcagcaacgucuuccagacccgcgccgggugccucaucggcgcggagcacgugaacaacuccuacgagugcgacauccccaucggggccggcaucugcgccagcuaccagacgcagaccaacuccccgcggcgcgcccggagcguggcgucccagagcaucaucgccuacaccaugucccugggcgccgagaacagcgucgccuacuccaacaacagcaucgccauccccaccaacuucacgaucuccgugaccaccgagauccugcccgugagcaugaccaagacgagcgucgacugcaccauguacaucugcggggacuccaccgagugcagcaaccuccugcugcaguacggcuccuucugcacccagcucaaccgcgcgcugacggggaucgccguggagcaggacaagaacacccaggagguguucgcccaggucaagcagaucuacaagacgcccccgaucaaggacuucggcggguucaacuucagccagauccugcccgaccccuccaagcccagcaagcgguccuucaucgaggaccuccuguucaacaaggugacccuggccgacgccggcuucaucaagcaguacggcgacugccucggggacaucgcggcccgcgaccugaucugcgcccagaaguucaacggccugaccgugcucccgccccugcugaccgacgagaugaucgcccaguacaccagcgcccuccuggcggggaccaucacguccggcuggugguucggggccggcgccgcccugcagauccccuucgcgaugcagauggccuaccgguucaacggcaucggggucacccagaacgugcucuacgagaaccagaagcugaucgccaaccaguucaacagcgccaucggcaagauccaggacucccugagcuccaccgccagcgcgcucgggaagcugcaggacguggucaaccagaacgcccaggcccugaacacgcucgugaagcagcuguccagcaacuucggcgccaucuccagcgugcugaacgacauccucucccgccuggacccgcccgaggccgaggugcagaucgaccggcugaucaccgggcgccuccagagccugcagaccuacgugacccagcagcugauccgggcggccgagauccgcuggagcgccaaccucgccgcgaccaagauguccgagugcguccugggccagagcaagcggguggacuucugcggcaagggguaccaccugauguccuucccccagagcgccccgcacggcguggucuuccuccacgugacguacguccccgcccaggagaagaacuucaccaccgcccccgcgaucugccacgacgggaaggcccacuucccccgcgagggcguguucguguccaacgggacccacugguucgucacgcagcggaacuucuacgagccgcagaucaucaccaccgacaacaccuucgugagcggcaacugcgacguggucaucggcaucgugaacaacacgguguacgacccccugcagcccgagcuggacuccuucaaggaggagcucgacaaguacuucaagaaccacaccagccccgacgucgaccugggggacaucuccggcaucaacgccagcguggugaacauccagaaggagaucgaccgccugaacgaggucgccaagaaccucaacgagucccugaucgaccugcaggagcucgggaaguacgagcaguacaucaagggcggcgggagcgggggcgggcagaucuacgagggcaagcugaccgccgaggggcuccgcuucggcaucguggccagccgguucaaccacgcgcuggucgaccgccugguggagggggccaucgacgccaucgugcggcacggcgggcgcgaggaggacaucacccucguccgggugcccggcuccugggagaucccgguggccgccggcgagcuggcccgcaaggaggacaucgacgcggucaucgccaucggggugcugauccggggcgccacgccccacuucgacuacaucgccagcgagguguccaaggggcucgcggaccugagccuggagcuccgcaagcccaucaccuucggcgucaucaccgccgacacccuggagcaggccaucgagcgggccgggacgaagcacggcaacaagggcugggaggccgcgcuguccgccaucgagauggccaaccucuucaagagccugcgcugaggacuagucccuguucccagagcccacuuuuuuuucuuuuuuugaaauaaaauagccugucuuucagaucucaaaggcucuuuucagagccaccaaaaaaaaaaaaaaaaaaaaaaaaaaaaaaaaaaaaaaaaaaaaaaaaaaaaaaaaaaaaaaaaaaaaaaaaaaaaaaaaaaaaaaaaaaaaaaaaaaaaa

SEQ ID NO: 12356 - RNA, 4388 nt, Artificial Sequence
  SARS-CoV-2/Wuhan/WIV05/2019__EPI_ISL_402128 spike protein mRNA gc (1-1211)(K986P_V987P_P1069F) LumSynth construct
aggagagucccgcagucggcguccagcggcucugcuuguucgugugugugucguugcaggccuuauucaagcuuaccauguucguguuccugguccuccugccccuggugagcucccagugcgugaaccucaccacccgcacgcagcugccgcccgccuacaccaacagcuucacccggggcgucuacuaccccgacaagguguuccgcuccagcgugcugcacuccacccaggaccucuuccugcccuucuucagcaacgucacgugguuccacgccauccacguguccgggaccaacggcaccaagcgguucgacaacccggugcugcccuucaacgacggggucuacuucgcgagcaccgagaaguccaacaucauccgcggcuggaucuucgggacgacccucgacagcaagacccagucccugcugaucgugaacaacgccaccaacguggucaucaaggugugcgaguuccaguucugcaacgaccccuuccucggcguguacuaccacaagaacaacaagagcuggauggaguccgaguuccgggucuacagcuccgccaacaacugcacguucgaguacgugagccagcccuuccugauggaccuggagggcaagcaggggaacuucaagaaccuccgcgaguucguguucaagaacaucgacggcuacuucaagaucuacuccaagcacaccccgaucaaccugguccgggaccugccccagggguucagcgcccucgagccccugguggaccugcccaucggcaucaacaucacccgcuuccagacccuccuggcccugcaccgguccuaccucacgccgggggacagcagcuccggcuggaccgcgggcgccgccgccuacuacgugggguaccugcagccccgcaccuuccugcucaaguacaacgagaacggcaccaucacggacgcggucgacugcgcccuggacccccugagcgagaccaagugcacccucaaguccuucaccguggagaaggggaucuaccagacgagcaacuuccgggugcagcccaccgaguccaucguccgcuucccgaacaucaccaaccugugccccuucggcgagguguucaacgccacccgguucgccagcgucuacgccuggaaccgcaagcggaucuccaacugcguggcggacuacagcgugcuguacaacuccgccagcuucuccacguucaagugcuacggcgucagccccaccaagcucaacgaccugugcuucaccaacguguacgccgacuccuucgugauccgcggggacgagguccggcagaucgcccccggccagaccgggaagaucgccgacuacaacuacaagcugccggacgacuucacgggcugcgugaucgcguggaacagcaacaaccucgacuccaaggucgggggcaacuacaacuaccuguaccgccuguuccgcaagagcaaccucaagcccuucgagcgggacaucuccaccgagaucuaccaggccggcagcacccccugcaacgggguggagggcuucaacugcuacuucccccugcaguccuacggguuccagccgaccaacggcgugggguaccagcccuaccggguggucgugcugagcuucgagcuccugcacgcccccgccacggugugcggccccaagaaguccaccaaccuggucaagaacaagugcgugaacuucaacuucaacggccucaccgggaccggcgugcugaccgagagcaacaagaaguuccugccguuccagcaguucgggcgcgacaucgccgacacgaccgacgcgguccgcgacccccagacccuggagauccucgacaucacccccugcagcuucggcgggguguccgugaucacgccgggcaccaacaccagcaaccaggucgccgugcuguaccaggacgugaacugcaccgagguccccguggccauccacgccgaccagcugacgcccaccuggcggguguacuccaccggcagcaacgucuuccagacccgcgccgggugccucaucggcgcggagcacgugaacaacuccuacgagugcgacauccccaucggggccggcaucugcgccagcuaccagacgcagaccaacuccccgcggcgcgcccggagcguggcgucccagagcaucaucgccuacaccaugucccugggcgccgagaacagcgucgccuacuccaacaacagcaucgccauccccaccaacuucacgaucuccgugaccaccgagauccugcccgugagcaugaccaagacgagcgucgacugcaccauguacaucugcggggacuccaccgagugcagcaaccuccugcugcaguacggcuccuucugcacccagcucaaccgcgcgcugacggggaucgccguggagcaggacaagaacacccaggagguguucgcccaggucaagcagaucuacaagacgcccccgaucaaggacuucggcggguucaacuucagccagauccugcccgaccccuccaagcccagcaagcgguccuucaucgaggaccuccuguucaacaaggugacccuggccgacgccggcuucaucaagcaguacggcgacugccucggggacaucgcggcccgcgaccugaucugcgcccagaaguucaacggccugaccgugcucccgccccugcugaccgacgagaugaucgcccaguacaccagcgcccuccuggcggggaccaucacguccggcuggaccuucggggccggcgccgcccugcagauccccuucgcgaugcagauggccuaccgguucaacggcaucggggucacccagaacgugcucuacgagaaccagaagcugaucgccaaccaguucaacagcgccaucggcaagauccaggacucccugagcuccaccgccagcgcgcucgggaagcugcaggacguggucaaccagaacgcccaggcccugaacacgcucgugaagcagcuguccagcaacuucggcgccaucuccagcgugcugaacgacauccucucccgccuggacccgcccgaggccgaggugcagaucgaccggcugaucaccgggcgccuccagagccugcagaccuacgugacccagcagcugauccgggcggccgagauccgcgccagcgccaaccucgccgcgaccaagauguccgagugcguccugggccagagcaagcggguggacuucugcggcaagggguaccaccugauguccuucccccagagcgccccgcacggcguggucuuccuccacgugacguacgucuucgcccaggagaagaacuucaccaccgcccccgcgaucugccacgacgggaaggcccacuucccccgcgagggcguguucguguccaacgggacccacugguucgucacgcagcggaacuucuacgagccgcagaucaucaccaccgacaacaccuucgugagcggcaacugcgacguggucaucggcaucgugaacaacacgguguacgacccccugcagcccgagcuggacuccuucaaggaggagcucgacaaguacuucaagaaccacaccagccccgacgucgaccugggggacaucuccggcaucaacgccagcguggugaacauccagaaggagaucgaccgccugaacgaggucgccaagaaccucaacgagucccugaucgaccugcaggagcucgggaaguacgagcaguacaucaagggcggcgggagcgggggcgggcagaucuacgagggcaagcugaccgccgaggggcuccgcuucggcaucguggccagccgguucaaccacgcgcuggucgaccgccugguggagggggccaucgacgccaucgugcggcacggcgggcgcgaggaggacaucacccucguccgggugcccggcuccugggagaucccgguggccgccggcgagcuggcccgcaaggaggacaucgacgcggucaucgccaucggggugcugauccggggcgccacgccccacuucgacuacaucgccagcgagguguccaaggggcucgcggaccugagccuggagcuccgcaagcccaucaccuucggcgucaucaccgccgacacccuggagcaggccaucgagcgggccgggacgaagcacggcaacaagggcugggaggccgcgcuguccgccaucgagauggccaaccucuucaagagccugcgcugaggacuagucccuguucccagagcccacuuuuuuuucuuuuuuugaaauaaaauagccugucuuucagaucucaaaggcucuuuucagagccaccaaaaaaaaaaaaaaaaaaaaaaaaaaaaaaaaaaaaaaaaaaaaaaaaaaaaaaaaaaaaaaaaaaaaaaaaaaaaaaaaaaaaaaaaaaaaaaaaaaaaa

SEQ ID NO: 12357 - RNA, 4388 nt, Artificial Sequence
  SARS-CoV-2/Wuhan/WIV05/2019__EPI_ISL_402128 spike protein mRNA gc (1-1211)(K986P_V987P_ H1048Q_H1064N_ H1083N_H1101N) LumSynth construct
aggagagucccgcagucggcguccagcggcucugcuuguucgugugugugucguugcaggccuuauucaagcuuaccauguucguguuccugguccuccugccccuggugagcucccagugcgugaaccucaccacccgcacgcagcugccgcccgccuacaccaacagcuucacccggggcgucuacuaccccgacaagguguuccgcuccagcgugcugcacuccacccaggaccucuuccugcccuucuucagcaacgucacgugguuccacgccauccacguguccgggaccaacggcaccaagcgguucgacaacccggugcugcccuucaacgacggggucuacuucgcgagcaccgagaaguccaacaucauccgcggcuggaucuucgggacgacccucgacagcaagacccagucccugcugaucgugaacaacgccaccaacguggucaucaaggugugcgaguuccaguucugcaacgaccccuuccucggcguguacuaccacaagaacaacaagagcuggauggaguccgaguuccgggucuacagcuccgccaacaacugcacguucgaguacgugagccagcccuuccugauggaccuggagggcaagcaggggaacuucaagaaccuccgcgaguucguguucaagaacaucgacggcuacuucaagaucuacuccaagcacaccccgaucaaccugguccgggaccugccccagggguucagcgcccucgagccccugguggaccugcccaucggcaucaacaucacccgcuuccagacccuccuggcccugcaccgguccuaccucacgccgggggacagcagcuccggcuggaccgcgggcgccgccgccuacuacgugggguaccugcagccccgcaccuuccugcucaaguacaacgagaacggcaccaucacggacgcggucgacugcgcccuggacccccugagcgagaccaagugcacccucaaguccuucaccguggagaaggggaucuaccagacgagcaacuuccgggugcagcccaccgaguccaucguccgcuucccgaacaucaccaaccugugccccuucggcgagguguucaacgccacccgguucgccagcgucuacgccuggaaccgcaagcggaucuccaacugcguggcggacuacagcgugcuguacaacuccgccagcuucuccacguucaagugcuacggcgucagccccaccaagcucaacgaccugugcuucaccaacguguacgccgacuccuucgugauccgcggggacgagguccggcagaucgcccccggccagaccgggaagaucgccgacuacaacuacaagcugccggacgacuucacgggcugcgugaucgcguggaacagcaacaaccucgacuccaaggucgggggcaacuacaacuaccuguaccgccuguuccgcaagagcaaccucaagcccuucgagcgggacaucuccaccgagaucuaccaggccggcagcacccccugcaacgggguggagggcuucaacugcuacuucccccugcaguccuacggguuccagccgaccaacggcgugggguaccagcccuaccggguggucgugcugagcuucgagcuccugcacgcccccgccacggugugcggccccaagaaguccaccaaccuggucaagaacaagugcgugaacuucaacuucaacggccucaccgggaccggcgugcugaccgagagcaacaagaaguuccugccguuccagcaguucgggcgcgacaucgccgacacgaccgacgcgguccgcgacccccagacccuggagauccucgacaucacccccugcagcuucggcgggguguccgugaucacgccgggcaccaacaccagcaaccaggucgccgugcuguaccaggacgugaacugcaccgagguccccguggccauccacgccgaccagcugacgcccaccuggcggguguacuccaccggcagcaacgucuuccagacccgcgccgggugccucaucggcgcggagcacgugaacaacuccuacgagugcgacauccccaucggggccggcaucugcgccagcuaccagacgcagaccaacuccccgcggcgcgcccggagcguggcgucccagagcaucaucgccuacaccaugucccugggcgccgagaacagcgucgccuacuccaacaacagcaucgccauccccaccaacuucacgaucuccgugaccaccgagauccugcccgugagcaugaccaagacgagcgucgacugcaccauguacaucugcggggacuccaccgagugcagcaaccuccugcugcaguacggcuccuucugcacccagcucaaccgcgcgcugacggggaucgccguggagcaggacaagaacacccaggagguguucgcccaggucaagcagaucuacaagacgcccccgaucaaggacuucggcggguucaacuucagccagauccugcccgaccccuccaagcccagcaagcgguccuucaucgaggaccuccuguucaacaaggugacccuggccgacgccggcuucaucaagcaguacggcgacugccucggggacaucgcggcccgcgaccugaucugcgcccagaaguucaacggccugaccgugcucccgccccugcugaccgacgagaugaucgcccaguacaccagcgcccuccuggcggggaccaucacguccggcuggaccuucggggccggcgccgcccugcagauccccuucgcgaugcagauggccuaccgguucaacggcaucggggucacccagaacgugcucuacgagaaccagaagcugaucgccaaccaguucaacagcgccaucggcaagauccaggacucccugagcuccaccgccagcgcgcucgggaagcugcaggacguggucaaccagaacgcccaggcccugaacacgcucgugaagcagcuguccagcaacuucggcgccaucuccagcgugcugaacgacauccucucccgccuggacccgcccgaggccgaggugcagaucgaccggcugaucaccgggcgccuccagagccugcagaccuacgugacccagcagcugauccgggcggccgagauccgcgccagcgccaaccucgccgcgaccaagauguccgagugcguccugggccagagcaagcggguggacuucugcggcaagggguaccagcugauguccuucccccagagcgccccgcacggcguggucuuccucaacgugacguacguccccgcccaggagaagaacuucaccaccgcccccgcgaucugcaacgacgggaaggcccacuucccccgcgagggcguguucguguccaacgggaccaacugguucgucacgcagcggaacuucuacgagccgcagaucaucaccaccgacaacaccuucgugagcggcaacugcgacguggucaucggcaucgugaacaacacgguguacgacccccugcagcccgagcuggacuccuucaaggaggagcucgacaaguacuucaagaaccacaccagccccgacgucgaccugggggacaucuccggcaucaacgccagcguggugaacauccagaaggagaucgaccgccugaacgaggucgccaagaaccucaacgagucccugaucgaccugcaggagcucgggaaguacgagcaguacaucaagggcggcgggagcgggggcgggcagaucuacgagggcaagcugaccgccgaggggcuccgcuucggcaucguggccagccgguucaaccacgcgcuggucgaccgccugguggagggggccaucgacgccaucgugcggcacggcgggcgcgaggaggacaucacccucguccgggugcccggcuccugggagaucccgguggccgccggcgagcuggcccgcaaggaggacaucgacgcggucaucgccaucggggugcugauccggggcgccacgccccacuucgacuacaucgccagcgagguguccaaggggcucgcggaccugagccuggagcuccgcaagcccaucaccuucggcgucaucaccgccgacacccuggagcaggccaucgagcgggccgggacgaagcacggcaacaagggcugggaggccgcgcuguccgccaucgagauggccaaccucuucaagagccugcgcugaggacuagucccuguucccagagcccacuuuuuuuucuuuuuuugaaauaaaauagccugucuuucagaucucaaaggcucuuuucagagccaccaaaaaaaaaaaaaaaaaaaaaaaaaaaaaaaaaaaaaaaaaaaaaaaaaaaaaaaaaaaaaaaaaaaaaaaaaaaaaaaaaaaaaaaaaaaaaaaaaaaaa

SEQ ID NO: 12358 - RNA, 4388 nt, Artificial Sequence
  SARS-CoV-2/Wuhan/WIV05/2019__EPI_ISL_402128 spike protein mRNA gc (1-1211)(I712C_T1077C) LumSynth construct
aggagagucccgcagucggcguccagcggcucugcuuguucgugugugugucguugcaggccuuauucaagcuuaccauguucguguuccugguccuccugccccuggugagcucccagugcgugaaccucaccacccgcacgcagcugccgcccgccuacaccaacagcuucacccggggcgucuacuaccccgacaagguguuccgcuccagcgugcugcacuccacccaggaccucuuccugcccuucuucagcaacgucacgugguuccacgccauccacguguccgggaccaacggcaccaagcgguucgacaacccggugcugcccuucaacgacggggucuacuucgcgagcaccgagaaguccaacaucauccgcggcuggaucuucgggacgacccucgacagcaagacccagucccugcugaucgugaacaacgccaccaacguggucaucaaggugugcgaguuccaguucugcaacgaccccuuccucggcguguacuaccacaagaacaacaagagcuggauggaguccgaguuccgggucuacagcuccgccaacaacugcacguucgaguacgugagccagcccuuccugauggaccuggagggcaagcaggggaacuucaagaaccuccgcgaguucguguucaagaacaucgacggcuacuucaagaucuacuccaagcacaccccgaucaaccugguccgggaccugccccagggguucagcgcccucgagccccugguggaccugcccaucggcaucaacaucacccgcuuccagacccuccuggcccugcaccgguccuaccucacgccgggggacagcagcuccggcuggaccgcgggcgccgccgccuacuacgugggguaccugcagccccgcaccuuccugcucaaguacaacgagaacggcaccaucacggacgcggucgacugcgcccuggacccccugagcgagaccaagugcacccucaaguccuucaccguggagaaggggaucuaccagacgagcaacuuccgggugcagcccaccgaguccaucguccgcuucccgaacaucaccaaccugugccccuucggcgagguguucaacgccacccgguucgccagcgucuacgccuggaaccgcaagcggaucuccaacugcguggcggacuacagcgugcuguacaacuccgccagcuucuccacguucaagugcuacggcgucagccccaccaagcucaacgaccugugcuucaccaacguguacgccgacuccuucgugauccgcggggacgagguccggcagaucgcccccggccagaccgggaagaucgccgacuacaacuacaagcugccggacgacuucacgggcugcgugaucgcguggaacagcaacaaccucgacuccaaggucgggggcaacuacaacuaccuguaccgccuguuccgcaagagcaaccucaagcccuucgagcgggacaucuccaccgagaucuaccaggccggcagcacccccugcaacgggguggagggcuucaacugcuacuucccccugcaguccuacggguuccagccgaccaacggcgugggguaccagcccuaccggguggucgugcugagcuucgagcuccugcacgcccccgccacggugugcggccccaagaaguccaccaaccuggucaagaacaagugcgugaacuucaacuucaacggccucaccgggaccggcgugcugaccgagagcaacaagaaguuccugccguuccagcaguucgggcgcgacaucgccgacacgaccgacgcgguccgcgacccccagacccuggagauccucgacaucacccccugcagcuucggcgggguguccgugaucacgccgggcaccaacaccagcaaccaggucgccgugcuguaccaggacgugaacugcaccgagguccccguggccauccacgccgaccagcugacgcccaccuggcggguguacuccaccggcagcaacgucuuccagacccgcgccgggugccucaucggcgcggagcacgugaacaacuccuacgagugcgacauccccaucggggccggcaucugcgccagcuaccagacgcagaccaacuccccgcggcgcgcccggagcguggcgucccagagcaucaucgccuacaccaugucccugggcgccgagaacagcgucgccuacuccaacaacagcugcgccauccccaccaacuucacgaucuccgugaccaccgagauccugcccgugagcaugaccaagacgagcgucgacugcaccauguacaucugcggggacuccaccgagugcagcaaccuccugcugcaguacggcuccuucugcacccagcucaaccgcgcgcugacggggaucgccguggagcaggacaagaacacccaggagguguucgcccaggucaagcagaucuacaagacgcccccgaucaaggacuucggcggguucaacuucagccagauccugcccgaccccuccaagcccagcaagcgguccuucaucgaggaccuccuguucaacaaggugacccuggccgacgccggcuucaucaagcaguacggcgacugccucggggacaucgcggcccgcgaccugaucugcgcccagaaguucaacggccugaccgugcucccgccccugcugaccgacgagaugaucgcccaguacaccagcgcccuccuggcggggaccaucacguccggcuggaccuucggggccggcgccgcccugcagauccccuucgcgaugcagauggccuaccgguucaacggcaucggggucacccagaacgugcucuacgagaaccagaagcugaucgccaaccaguucaacagcgccaucggcaagauccaggacucccugagcuccaccgccagcgcgcucgggaagcugcaggacguggucaaccagaacgcccaggcccugaacacgcucgugaagcagcuguccagcaacuucggcgccaucuccagcgugcugaacgacauccucucccgccuggacaaggucgaggccgaggugcagaucgaccggcugaucaccgggcgccuccagagccugcagaccuacgugacccagcagcugauccgggcggccgagauccgcgccagcgccaaccucgccgcgaccaagauguccgagugcguccugggccagagcaagcggguggacuucugcggcaagggguaccaccugauguccuucccccagagcgccccgcacggcguggucuuccuccacgugacguacguccccgcccaggagaagaacuucaccugcgcccccgcgaucugccacgacgggaaggcccacuucccccgcgagggcguguucguguccaacgggacccacugguucgucacgcagcggaacuucuacgagccgcagaucaucaccaccgacaacaccuucgugagcggcaacugcgacguggucaucggcaucgugaacaacacgguguacgacccccugcagcccgagcuggacuccuucaaggaggagcucgacaaguacuucaagaaccacaccagccccgacgucgaccugggggacaucuccggcaucaacgccagcguggugaacauccagaaggagaucgaccgccugaacgaggucgccaagaaccucaacgagucccugaucgaccugcaggagcucgggaaguacgagcaguacaucaagggcggcgggagcgggggcgggcagaucuacgagggcaagcugaccgccgaggggcuccgcuucggcaucguggccagccgguucaaccacgcgcuggucgaccgccugguggagggggccaucgacgccaucgugcggcacggcgggcgcgaggaggacaucacccucguccgggugcccggcuccugggagaucccgguggccgccggcgagcuggcccgcaaggaggacaucgacgcggucaucgccaucggggugcugauccggggcgccacgccccacuucgacuacaucgccagcgagguguccaaggggcucgcggaccugagccuggagcuccgcaagcccaucaccuucggcgucaucaccgccgacacccuggagcaggccaucgagcgggccgggacgaagcacggcaacaagggcugggaggccgcgcuguccgccaucgagauggccaaccucuucaagagccugcgcugaggacuagucccuguucccagagcccacuuuuuuuucuuuuuuugaaauaaaauagccugucuuucagaucucaaaggcucuuuucagagccaccaaaaaaaaaaaaaaaaaaaaaaaaaaaaaaaaaaaaaaaaaaaaaaaaaaaaaaaaaaaaaaaaaaaaaaaaaaaaaaaaaaaaaaaaaaaaaaaaaaaaa

SEQ ID NO: 12359 - RNA, 4388 nt, Artificial Sequence
  SARS-CoV-2/Wuhan/WIV05/2019__EPI_ISL_402128 spike protein mRNA gc (1-1211)(I714C_Y1110C) LumSynth construct
aggagagucccgcagucggcguccagcggcucugcuuguucgugugugugucguugcaggccuuauucaagcuuaccauguucguguuccugguccuccugccccuggugagcucccagugcgugaaccucaccacccgcacgcagcugccgcccgccuacaccaacagcuucacccggggcgucuacuaccccgacaagguguuccgcuccagcgugcugcacuccacccaggaccucuuccugcccuucuucagcaacgucacgugguuccacgccauccacguguccgggaccaacggcaccaagcgguucgacaacccggugcugcccuucaacgacggggucuacuucgcgagcaccgagaaguccaacaucauccgcggcuggaucuucgggacgacccucgacagcaagacccagucccugcugaucgugaacaacgccaccaacguggucaucaaggugugcgaguuccaguucugcaacgaccccuuccucggcguguacuaccacaagaacaacaagagcuggauggaguccgaguuccgggucuacagcuccgccaacaacugcacguucgaguacgugagccagcccuuccugauggaccuggagggcaagcaggggaacuucaagaaccuccgcgaguucguguucaagaacaucgacggcuacuucaagaucuacuccaagcacaccccgaucaaccugguccgggaccugccccagggguucagcgcccucgagccccugguggaccugcccaucggcaucaacaucacccgcuuccagacccuccuggcccugcaccgguccuaccucacgccgggggacagcagcuccggcuggaccgcgggcgccgccgccuacuacgugggguaccugcagccccgcaccuuccugcucaaguacaacgagaacggcaccaucacggacgcggucgacugcgcccuggacccccugagcgagaccaagugcacccucaaguccuucaccguggagaaggggaucuaccagacgagcaacuuccgggugcagcccaccgaguccaucguccgcuucccgaacaucaccaaccugugccccuucggcgagguguucaacgccacccgguucgccagcgucuacgccuggaaccgcaagcggaucuccaacugcguggcggacuacagcgugcuguacaacuccgccagcuucuccacguucaagugcuacggcgucagccccaccaagcucaacgaccugugcuucaccaacguguacgccgacuccuucgugauccgcggggacgagguccggcagaucgcccccggccagaccgggaagaucgccgacuacaacuacaagcugccggacgacuucacgggcugcgugaucgcguggaacagcaacaaccucgacuccaaggucgggggcaacuacaacuaccuguaccgccuguuccgcaagagcaaccucaagcccuucgagcgggacaucuccaccgagaucuaccaggccggcagcacccccugcaacgggguggagggcuucaacugcuacuucccccugcaguccuacggguuccagccgaccaacggcgugggguaccagcccuaccggguggucgugcugagcuucgagcuccugcacgcccccgccacggugugcggccccaagaaguccaccaaccuggucaagaacaagugcgugaacuucaacuucaacggccucaccgggaccggcgugcugaccgagagcaacaagaaguuccugccguuccagcaguucgggcgcgacaucgccgacacgaccgacgcgguccgcgacccccagacccuggagauccucgacaucacccccugcagcuucggcgggguguccgugaucacgccgggcaccaacaccagcaaccaggucgccgugcuguaccaggacgugaacugcaccgagguccccguggccauccacgccgaccagcugacgcccaccuggcggguguacuccaccggcagcaacgucuuccagacccgcgccgggugccucaucggcgcggagcacgugaacaacuccuacgagugcgacauccccaucggggccggcaucugcgccagcuaccagacgcagaccaacuccccgcggcgcgcccggagcguggcgucccagagcaucaucgccuacaccaugucccugggcgccgagaacagcgucgccuacuccaacaacagcaucgccugccccaccaacuucacgaucuccgugaccaccgagauccugcccgugagcaugaccaagacgagcgucgacugcaccauguacaucugcggggacuccaccgagugcagcaaccuccugcugcaguacggcuccuucugcacccagcucaaccgcgcgcugacggggaucgccguggagcaggacaagaacacccaggagguguucgcccaggucaagcagaucuacaagacgcccccgaucaaggacuucggcggguucaacuucagccagauccugcccgaccccuccaagcccagcaagcgguccuucaucgaggaccuccuguucaacaaggugacccuggccgacgccggcuucaucaagcaguacggcgacugccucggggacaucgcggcccgcgaccugaucugcgcccagaaguucaacggccugaccgugcucccgccccugcugaccgacgagaugaucgcccaguacaccagcgcccuccuggcggggaccaucacguccggcuggaccuucggggccggcgccgcccugcagauccccuucgcgaugcagauggccuaccgguucaacggcaucggggucacccagaacgugcucuacgagaaccagaagcugaucgccaaccaguucaacagcgccaucggcaagauccaggacucccugagcuccaccgccagcgcgcucgggaagcugcaggacguggucaaccagaacgcccaggcccugaacacgcucgugaagcagcuguccagcaacuucggcgccaucuccagcgugcugaacgacauccucucccgccuggacaaggucgaggccgaggugcagaucgaccggcugaucaccgggcgccuccagagccugcagaccuacgugacccagcagcugauccgggcggccgagauccgcgccagcgccaaccucgccgcgaccaagauguccgagugcguccugggccagagcaagcggguggacuucugcggcaagggguaccaccugauguccuucccccagagcgccccgcacggcguggucuuccuccacgugacguacguccccgcccaggagaagaacuucaccaccgcccccgcgaucugccacgacgggaaggcccacuucccccgcgagggcguguucguguccaacgggacccacugguucgucacgcagcggaacuucugcgagccgcagaucaucaccaccgacaacaccuucgugagcggcaacugcgacguggucaucggcaucgugaacaacacgguguacgacccccugcagcccgagcuggacuccuucaaggaggagcucgacaaguacuucaagaaccacaccagccccgacgucgaccugggggacaucuccggcaucaacgccagcguggugaacauccagaaggagaucgaccgccugaacgaggucgccaagaaccucaacgagucccugaucgaccugcaggagcucgggaaguacgagcaguacaucaagggcggcgggagcgggggcgggcagaucuacgagggcaagcugaccgccgaggggcuccgcuucggcaucguggccagccgguucaaccacgcgcuggucgaccgccugguggagggggccaucgacgccaucgugcggcacggcgggcgcgaggaggacaucacccucguccgggugcccggcuccugggagaucccgguggccgccggcgagcuggcccgcaaggaggacaucgacgcggucaucgccaucggggugcugauccggggcgccacgccccacuucgacuacaucgccagcgagguguccaaggggcucgcggaccugagccuggagcuccgcaagcccaucaccuucggcgucaucaccgccgacacccuggagcaggccaucgagcgggccgggacgaagcacggcaacaagggcugggaggccgcgcuguccgccaucgagauggccaaccucuucaagagccugcgcugaggacuagucccuguucccagagcccacuuuuuuuucuuuuuuugaaauaaaauagccugucuuucagaucucaaaggcucuuuucagagccaccaaaaaaaaaaaaaaaaaaaaaaaaaaaaaaaaaaaaaaaaaaaaaaaaaaaaaaaaaaaaaaaaaaaaaaaaaaaaaaaaaaaaaaaaaaaaaaaaaaaaa

SEQ ID NO: 12360 - RNA, 4388 nt, Artificial Sequence
  SARS-CoV-2/Wuhan/WIV05/2019__EPI_ISL_402128 spike protein mRNA gc (1-1211)(P715C_P1069C) LumSynth construct
aggagagucccgcagucggcguccagcggcucugcuuguucgugugugugucguugcaggccuuauucaagcuuaccauguucguguuccugguccuccugccccuggugagcucccagugcgugaaccucaccacccgcacgcagcugccgcccgccuacaccaacagcuucacccggggcgucuacuaccccgacaagguguuccgcuccagcgugcugcacuccacccaggaccucuuccugcccuucuucagcaacgucacgugguuccacgccauccacguguccgggaccaacggcaccaagcgguucgacaacccggugcugcccuucaacgacggggucuacuucgcgagcaccgagaaguccaacaucauccgcggcuggaucuucgggacgacccucgacagcaagacccagucccugcugaucgugaacaacgccaccaacguggucaucaaggugugcgaguuccaguucugcaacgaccccuuccucggcguguacuaccacaagaacaacaagagcuggauggaguccgaguuccgggucuacagcuccgccaacaacugcacguucgaguacgugagccagcccuuccugauggaccuggagggcaagcaggggaacuucaagaaccuccgcgaguucguguucaagaacaucgacggcuacuucaagaucuacuccaagcacaccccgaucaaccugguccgggaccugccccagggguucagcgcccucgagccccugguggaccugcccaucggcaucaacaucacccgcuuccagacccuccuggcccugcaccgguccuaccucacgccgggggacagcagcuccggcuggaccgcgggcgccgccgccuacuacgugggguaccugcagccccgcaccuuccugcucaaguacaacgagaacggcaccaucacggacgcggucgacugcgcccuggacccccugagcgagaccaagugcacccucaaguccuucaccguggagaaggggaucuaccagacgagcaacuuccgggugcagcccaccgaguccaucguccgcuucccgaacaucaccaaccugugccccuucggcgagguguucaacgccacccgguucgccagcgucuacgccuggaaccgcaagcggaucuccaacugcguggcggacuacagcgugcuguacaacuccgccagcuucuccacguucaagugcuacggcgucagccccaccaagcucaacgaccugugcuucaccaacguguacgccgacuccuucgugauccgcggggacgagguccggcagaucgcccccggccagaccgggaagaucgccgacuacaacuacaagcugccggacgacuucacgggcugcgugaucgcguggaacagcaacaaccucgacuccaaggucgggggcaacuacaacuaccuguaccgccuguuccgcaagagcaaccucaagcccuucgagcgggacaucuccaccgagaucuaccaggccggcagcacccccugcaacgggguggagggcuucaacugcuacuucccccugcaguccuacggguuccagccgaccaacggcgugggguaccagcccuaccggguggucgugcugagcuucgagcuccugcacgcccccgccacggugugcggccccaagaaguccaccaaccuggucaagaacaagugcgugaacuucaacuucaacggccucaccgggaccggcgugcugaccgagagcaacaagaaguuccugccguuccagcaguucgggcgcgacaucgccgacacgaccgacgcgguccgcgacccccagacccuggagauccucgacaucacccccugcagcuucggcgggguguccgugaucacgccgggcaccaacaccagcaaccaggucgccgugcuguaccaggacgugaacugcaccgagguccccguggccauccacgccgaccagcugacgcccaccuggcggguguacuccaccggcagcaacgucuuccagacccgcgccgggugccucaucggcgcggagcacgugaacaacuccuacgagugcgacauccccaucggggccggcaucugcgccagcuaccagacgcagaccaacuccccgcggcgcgcccggagcguggcgucccagagcaucaucgccuacaccaugucccugggcgccgagaacagcgucgccuacuccaacaacagcaucgccaucugcaccaacuucacgaucuccgugaccaccgagauccugcccgugagcaugaccaagacgagcgucgacugcaccauguacaucugcggggacuccaccgagugcagcaaccuccugcugcaguacggcuccuucugcacccagcucaaccgcgcgcugacggggaucgccguggagcaggacaagaacacccaggagguguucgcccaggucaagcagaucuacaagacgcccccgaucaaggacuucggcggguucaacuucagccagauccugcccgaccccuccaagcccagcaagcgguccuucaucgaggaccuccuguucaacaaggugacccuggccgacgccggcuucaucaagcaguacggcgacugccucggggacaucgcggcccgcgaccugaucugcgcccagaaguucaacggccugaccgugcucccgccccugcugaccgacgagaugaucgcccaguacaccagcgcccuccuggcggggaccaucacguccggcuggaccuucggggccggcgccgcccugcagauccccuucgcgaugcagauggccuaccgguucaacggcaucggggucacccagaacgugcucuacgagaaccagaagcugaucgccaaccaguucaacagcgccaucggcaagauccaggacucccugagcuccaccgccagcgcgcucgggaagcugcaggacguggucaaccagaacgcccaggcccugaacacgcucgugaagcagcuguccagcaacuucggcgccaucuccagcgugcugaacgacauccucucccgccuggacaaggucgaggccgaggugcagaucgaccggcugaucaccgggcgccuccagagccugcagaccuacgugacccagcagcugauccgggcggccgagauccgcgccagcgccaaccucgccgcgaccaagauguccgagugcguccugggccagagcaagcggguggacuucugcggcaagggguaccaccugauguccuucccccagagcgccccgcacggcguggucuuccuccacgugacguacgucugcgcccaggagaagaacuucaccaccgcccccgcgaucugccacgacgggaaggcccacuucccccgcgagggcguguucguguccaacgggacccacugguucgucacgcagcggaacuucuacgagccgcagaucaucaccaccgacaacaccuucgugagcggcaacugcgacguggucaucggcaucgugaacaacacgguguacgacccccugcagcccgagcuggacuccuucaaggaggagcucgacaaguacuucaagaaccacaccagccccgacgucgaccugggggacaucuccggcaucaacgccagcguggugaacauccagaaggagaucgaccgccugaacgaggucgccaagaaccucaacgagucccugaucgaccugcaggagcucgggaaguacgagcaguacaucaagggcggcgggagcgggggcgggcagaucuacgagggcaagcugaccgccgaggggcuccgcuucggcaucguggccagccgguucaaccacgcgcuggucgaccgccugguggagggggccaucgacgccaucgugcggcacggcgggcgcgaggaggacaucacccucguccgggugcccggcuccugggagaucccgguggccgccggcgagcuggcccgcaaggaggacaucgacgcggucaucgccaucggggugcugauccggggcgccacgccccacuucgacuacaucgccagcgagguguccaaggggcucgcggaccugagccuggagcuccgcaagcccaucaccuucggcgucaucaccgccgacacccuggagcaggccaucgagcgggccgggacgaagcacggcaacaagggcugggaggccgcgcuguccgccaucgagauggccaaccucuucaagagccugcgcugaggacuagucccuguucccagagcccacuuuuuuuucuuuuuuugaaauaaaauagccugucuuucagaucucaaaggcucuuuucagagccaccaaaaaaaaaaaaaaaaaaaaaaaaaaaaaaaaaaaaaaaaaaaaaaaaaaaaaaaaaaaaaaaaaaaaaaaaaaaaaaaaaaaaaaaaaaaaaaaaaaaaa

SEQ ID NO: 12361 - RNA, 4388 nt, Artificial Sequence
  SARS-CoV-2/Wuhan/WIV05/2019__EPI_ISL_402128 spike protein mRNA gc (1-1211)(G889C_L1034C) LumSynth construct
aggagagucccgcagucggcguccagcggcucugcuuguucgugugugugucguugcaggccuuauucaagcuuaccauguucguguuccugguccuccugccccuggugagcucccagugcgugaaccucaccacccgcacgcagcugccgcccgccuacaccaacagcuucacccggggcgucuacuaccccgacaagguguuccgcuccagcgugcugcacuccacccaggaccucuuccugcccuucuucagcaacgucacgugguuccacgccauccacguguccgggaccaacggcaccaagcgguucgacaacccggugcugcccuucaacgacggggucuacuucgcgagcaccgagaaguccaacaucauccgcggcuggaucuucgggacgacccucgacagcaagacccagucccugcugaucgugaacaacgccaccaacguggucaucaaggugugcgaguuccaguucugcaacgaccccuuccucggcguguacuaccacaagaacaacaagagcuggauggaguccgaguuccgggucuacagcuccgccaacaacugcacguucgaguacgugagccagcccuuccugauggaccuggagggcaagcaggggaacuucaagaaccuccgcgaguucguguucaagaacaucgacggcuacuucaagaucuacuccaagcacaccccgaucaaccugguccgggaccugccccagggguucagcgcccucgagccccugguggaccugcccaucggcaucaacaucacccgcuuccagacccuccuggcccugcaccgguccuaccucacgccgggggacagcagcuccggcuggaccgcgggcgccgccgccuacuacgugggguaccugcagccccgcaccuuccugcucaaguacaacgagaacggcaccaucacggacgcggucgacugcgcccuggacccccugagcgagaccaagugcacccucaaguccuucaccguggagaaggggaucuaccagacgagcaacuuccgggugcagcccaccgaguccaucguccgcuucccgaacaucaccaaccugugccccuucggcgagguguucaacgccacccgguucgccagcgucuacgccuggaaccgcaagcggaucuccaacugcguggcggacuacagcgugcuguacaacuccgccagcuucuccacguucaagugcuacggcgucagccccaccaagcucaacgaccugugcuucaccaacguguacgccgacuccuucgugauccgcggggacgagguccggcagaucgcccccggccagaccgggaagaucgccgacuacaacuacaagcugccggacgacuucacgggcugcgugaucgcguggaacagcaacaaccucgacuccaaggucgggggcaacuacaacuaccuguaccgccuguuccgcaagagcaaccucaagcccuucgagcgggacaucuccaccgagaucuaccaggccggcagcacccccugcaacgggguggagggcuucaacugcuacuucccccugcaguccuacggguuccagccgaccaacggcgugggguaccagcccuaccggguggucgugcugagcuucgagcuccugcacgcccccgccacggugugcggccccaagaaguccaccaaccuggucaagaacaagugcgugaacuucaacuucaacggccucaccgggaccggcgugcugaccgagagcaacaagaaguuccugccguuccagcaguucgggcgcgacaucgccgacacgaccgacgcgguccgcgacccccagacccuggagauccucgacaucacccccugcagcuucggcgggguguccgugaucacgccgggcaccaacaccagcaaccaggucgccgugcuguaccaggacgugaacugcaccgagguccccguggccauccacgccgaccagcugacgcccaccuggcggguguacuccaccggcagcaacgucuuccagacccgcgccgggugccucaucggcgcggagcacgugaacaacuccuacgagugcgacauccccaucggggccggcaucugcgccagcuaccagacgcagaccaacuccccgcggcgcgcccggagcguggcgucccagagcaucaucgccuacaccaugucccugggcgccgagaacagcgucgccuacuccaacaacagcaucgccauccccaccaacuucacgaucuccgugaccaccgagauccugcccgugagcaugaccaagacgagcgucgacugcaccauguacaucugcggggacuccaccgagugcagcaaccuccugcugcaguacggcuccuucugcacccagcucaaccgcgcgcugacggggaucgccguggagcaggacaagaacacccaggagguguucgcccaggucaagcagaucuacaagacgcccccgaucaaggacuucggcggguucaacuucagccagauccugcccgaccccuccaagcccagcaagcgguccuucaucgaggaccuccuguucaacaaggugacccuggccgacgccggcuucaucaagcaguacggcgacugccucggggacaucgcggcccgcgaccugaucugcgcccagaaguucaacggccugaccgugcucccgccccugcugaccgacgagaugaucgcccaguacaccagcgcccuccuggcggggaccaucacguccggcuggaccuucugcgccggcgccgcccugcagauccccuucgcgaugcagauggccuaccgguucaacggcaucggggucacccagaacgugcucuacgagaaccagaagcugaucgccaaccaguucaacagcgccaucggcaagauccaggacucccugagcuccaccgccagcgcgcucgggaagcugcaggacguggucaaccagaacgcccaggcccugaacacgcucgugaagcagcuguccagcaacuucggcgccaucuccagcgugcugaacgacauccucucccgccuggacaaggucgaggccgaggugcagaucgaccggcugaucaccgggcgccuccagagccugcagaccuacgugacccagcagcugauccgggcggccgagauccgcgccagcgccaaccucgccgcgaccaagauguccgagugcgucugcggccagagcaagcggguggacuucugcggcaagggguaccaccugauguccuucccccagagcgccccgcacggcguggucuuccuccacgugacguacguccccgcccaggagaagaacuucaccaccgcccccgcgaucugccacgacgggaaggcccacuucccccgcgagggcguguucguguccaacgggacccacugguucgucacgcagcggaacuucuacgagccgcagaucaucaccaccgacaacaccuucgugagcggcaacugcgacguggucaucggcaucgugaacaacacgguguacgacccccugcagcccgagcuggacuccuucaaggaggagcucgacaaguacuucaagaaccacaccagccccgacgucgaccugggggacaucuccggcaucaacgccagcguggugaacauccagaaggagaucgaccgccugaacgaggucgccaagaaccucaacgagucccugaucgaccugcaggagcucgggaaguacgagcaguacaucaagggcggcgggagcgggggcgggcagaucuacgagggcaagcugaccgccgaggggcuccgcuucggcaucguggccagccgguucaaccacgcgcuggucgaccgccugguggagggggccaucgacgccaucgugcggcacggcgggcgcgaggaggacaucacccucguccgggugcccggcuccugggagaucccgguggccgccggcgagcuggcccgcaaggaggacaucgacgcggucaucgccaucggggugcugauccggggcgccacgccccacuucgacuacaucgccagcgagguguccaaggggcucgcggaccugagccuggagcuccgcaagcccaucaccuucggcgucaucaccgccgacacccuggagcaggccaucgagcgggccgggacgaagcacggcaacaagggcugggaggccgcgcuguccgccaucgagauggccaaccucuucaagagccugcgcugaggacuagucccuguucccagagcccacuuuuuuuucuuuuuuugaaauaaaauagccugucuuucagaucucaaaggcucuuuucagagccaccaaaaaaaaaaaaaaaaaaaaaaaaaaaaaaaaaaaaaaaaaaaaaaaaaaaaaaaaaaaaaaaaaaaaaaaaaaaaaaaaaaaaaaaaaaaaaaaaaaaaa

SEQ ID NO: 12362 - RNA, 4388 nt, Artificial Sequence
  SARS-CoV-2/Wuhan/WIV05/2019__EPI_ISL_402128 spike protein mRNA gc (1-1211)(I909C_Y1047C) LumSynth construct
aggagagucccgcagucggcguccagcggcucugcuuguucgugugugugucguugcaggccuuauucaagcuuaccauguucguguuccugguccuccugccccuggugagcucccagugcgugaaccucaccacccgcacgcagcugccgcccgccuacaccaacagcuucacccggggcgucuacuaccccgacaagguguuccgcuccagcgugcugcacuccacccaggaccucuuccugcccuucuucagcaacgucacgugguuccacgccauccacguguccgggaccaacggcaccaagcgguucgacaacccggugcugcccuucaacgacggggucuacuucgcgagcaccgagaaguccaacaucauccgcggcuggaucuucgggacgacccucgacagcaagacccagucccugcugaucgugaacaacgccaccaacguggucaucaaggugugcgaguuccaguucugcaacgaccccuuccucggcguguacuaccacaagaacaacaagagcuggauggaguccgaguuccgggucuacagcuccgccaacaacugcacguucgaguacgugagccagcccuuccugauggaccuggagggcaagcaggggaacuucaagaaccuccgcgaguucguguucaagaacaucgacggcuacuucaagaucuacuccaagcacaccccgaucaaccugguccgggaccugccccagggguucagcgcccucgagccccugguggaccugcccaucggcaucaacaucacccgcuuccagacccuccuggcccugcaccgguccuaccucacgccgggggacagcagcuccggcuggaccgcgggcgccgccgccuacuacgugggguaccugcagccccgcaccuuccugcucaaguacaacgagaacggcaccaucacggacgcggucgacugcgcccuggacccccugagcgagaccaagugcacccucaaguccuucaccguggagaaggggaucuaccagacgagcaacuuccgggugcagcccaccgaguccaucguccgcuucccgaacaucaccaaccugugccccuucggcgagguguucaacgccacccgguucgccagcgucuacgccuggaaccgcaagcggaucuccaacugcguggcggacuacagcgugcuguacaacuccgccagcuucuccacguucaagugcuacggcgucagccccaccaagcucaacgaccugugcuucaccaacguguacgccgacuccuucgugauccgcggggacgagguccggcagaucgcccccggccagaccgggaagaucgccgacuacaacuacaagcugccggacgacuucacgggcugcgugaucgcguggaacagcaacaaccucgacuccaaggucgggggcaacuacaacuaccuguaccgccuguuccgcaagagcaaccucaagcccuucgagcgggacaucuccaccgagaucuaccaggccggcagcacccccugcaacgggguggagggcuucaacugcuacuucccccugcaguccuacggguuccagccgaccaacggcgugggguaccagcccuaccggguggucgugcugagcuucgagcuccugcacgcccccgccacggugugcggccccaagaaguccaccaaccuggucaagaacaagugcgugaacuucaacuucaacggccucaccgggaccggcgugcugaccgagagcaacaagaaguuccugccguuccagcaguucgggcgcgacaucgccgacacgaccgacgcgguccgcgacccccagacccuggagauccucgacaucacccccugcagcuucggcgggguguccgugaucacgccgggcaccaacaccagcaaccaggucgccgugcuguaccaggacgugaacugcaccgagguccccguggccauccacgccgaccagcugacgcccaccuggcggguguacuccaccggcagcaacgucuuccagacccgcgccgggugccucaucggcgcggagcacgugaacaacuccuacgagugcgacauccccaucggggccggcaucugcgccagcuaccagacgcagaccaacuccccgcggcgcgcccggagcguggcgucccagagcaucaucgccuacaccaugucccugggcgccgagaacagcgucgccuacuccaacaacagcaucgccauccccaccaacuucacgaucuccgugaccaccgagauccugcccgugagcaugaccaagacgagcgucgacugcaccauguacaucugcggggacuccaccgagugcagcaaccuccugcugcaguacggcuccuucugcacccagcucaaccgcgcgcugacggggaucgccguggagcaggacaagaacacccaggagguguucgcccaggucaagcagaucuacaagacgcccccgaucaaggacuucggcggguucaacuucagccagauccugcccgaccccuccaagcccagcaagcgguccuucaucgaggaccuccuguucaacaaggugacccuggccgacgccggcuucaucaagcaguacggcgacugccucggggacaucgcggcccgcgaccugaucugcgcccagaaguucaacggccugaccgugcucccgccccugcugaccgacgagaugaucgcccaguacaccagcgcccuccuggcggggaccaucacguccggcuggaccuucggggccggcgccgcccugcagauccccuucgcgaugcagauggccuaccgguucaacggcugcggggucacccagaacgugcucuacgagaaccagaagcugaucgccaaccaguucaacagcgccaucggcaagauccaggacucccugagcuccaccgccagcgcgcucgggaagcugcaggacguggucaaccagaacgcccaggcccugaacacgcucgugaagcagcuguccagcaacuucggcgccaucuccagcgugcugaacgacauccucucccgccuggacaaggucgaggccgaggugcagaucgaccggcugaucaccgggcgccuccagagccugcagaccuacgugacccagcagcugauccgggcggccgagauccgcgccagcgccaaccucgccgcgaccaagauguccgagugcguccugggccagagcaagcggguggacuucugcggcaaggggugccaccugauguccuucccccagagcgccccgcacggcguggucuuccuccacgugacguacguccccgcccaggagaagaacuucaccaccgcccccgcgaucugccacgacgggaaggcccacuucccccgcgagggcguguucguguccaacgggacccacugguucgucacgcagcggaacuucuacgagccgcagaucaucaccaccgacaacaccuucgugagcggcaacugcgacguggucaucggcaucgugaacaacacgguguacgacccccugcagcccgagcuggacuccuucaaggaggagcucgacaaguacuucaagaaccacaccagccccgacgucgaccugggggacaucuccggcaucaacgccagcguggugaacauccagaaggagaucgaccgccugaacgaggucgccaagaaccucaacgagucccugaucgaccugcaggagcucgggaaguacgagcaguacaucaagggcggcgggagcgggggcgggcagaucuacgagggcaagcugaccgccgaggggcuccgcuucggcaucguggccagccgguucaaccacgcgcuggucgaccgccugguggagggggccaucgacgccaucgugcggcacggcgggcgcgaggaggacaucacccucguccgggugcccggcuccugggagaucccgguggccgccggcgagcuggcccgcaaggaggacaucgacgcggucaucgccaucggggugcugauccggggcgccacgccccacuucgacuacaucgccagcgagguguccaaggggcucgcggaccugagccuggagcuccgcaagcccaucaccuucggcgucaucaccgccgacacccuggagcaggccaucgagcgggccgggacgaagcacggcaacaagggcugggaggccgcgcuguccgccaucgagauggccaaccucuucaagagccugcgcugaggacuagucccuguucccagagcccacuuuuuuuucuuuuuuugaaauaaaauagccugucuuucagaucucaaaggcucuuuucagagccaccaaaaaaaaaaaaaaaaaaaaaaaaaaaaaaaaaaaaaaaaaaaaaaaaaaaaaaaaaaaaaaaaaaaaaaaaaaaaaaaaaaaaaaaaaaaaaaaaaaaaa

SEQ ID NO: 12363 - RNA, 4388 nt, Artificial Sequence
  SARS-CoV-2/Wuhan/WIV05/2019__EPI_ISL_402128 spike protein mRNA gc (1-1211)(Q965C_S1003C) LumSynth construct
aggagagucccgcagucggcguccagcggcucugcuuguucgugugugugucguugcaggccuuauucaagcuuaccauguucguguuccugguccuccugccccuggugagcucccagugcgugaaccucaccacccgcacgcagcugccgcccgccuacaccaacagcuucacccggggcgucuacuaccccgacaagguguuccgcuccagcgugcugcacuccacccaggaccucuuccugcccuucuucagcaacgucacgugguuccacgccauccacguguccgggaccaacggcaccaagcgguucgacaacccggugcugcccuucaacgacggggucuacuucgcgagcaccgagaaguccaacaucauccgcggcuggaucuucgggacgacccucgacagcaagacccagucccugcugaucgugaacaacgccaccaacguggucaucaaggugugcgaguuccaguucugcaacgaccccuuccucggcguguacuaccacaagaacaacaagagcuggauggaguccgaguuccgggucuacagcuccgccaacaacugcacguucgaguacgugagccagcccuuccugauggaccuggagggcaagcaggggaacuucaagaaccuccgcgaguucguguucaagaacaucgacggcuacuucaagaucuacuccaagcacaccccgaucaaccugguccgggaccugccccagggguucagcgcccucgagccccugguggaccugcccaucggcaucaacaucacccgcuuccagacccuccuggcccugcaccgguccuaccucacgccgggggacagcagcuccggcuggaccgcgggcgccgccgccuacuacgugggguaccugcagccccgcaccuuccugcucaaguacaacgagaacggcaccaucacggacgcggucgacugcgcccuggacccccugagcgagaccaagugcacccucaaguccuucaccguggagaaggggaucuaccagacgagcaacuuccgggugcagcccaccgaguccaucguccgcuucccgaacaucaccaaccugugccccuucggcgagguguucaacgccacccgguucgccagcgucuacgccuggaaccgcaagcggaucuccaacugcguggcggacuacagcgugcuguacaacuccgccagcuucuccacguucaagugcuacggcgucagccccaccaagcucaacgaccugugcuucaccaacguguacgccgacuccuucgugauccgcggggacgagguccggcagaucgcccccggccagaccgggaagaucgccgacuacaacuacaagcugccggacgacuucacgggcugcgugaucgcguggaacagcaacaaccucgacuccaaggucgggggcaacuacaacuaccuguaccgccuguuccgcaagagcaaccucaagcccuucgagcgggacaucuccaccgagaucuaccaggccggcagcacccccugcaacgggguggagggcuucaacugcuacuucccccugcaguccuacggguuccagccgaccaacggcgugggguaccagcccuaccggguggucgugcugagcuucgagcuccugcacgcccccgccacggugugcggccccaagaaguccaccaaccuggucaagaacaagugcgugaacuucaacuucaacggccucaccgggaccggcgugcugaccgagagcaacaagaaguuccugccguuccagcaguucgggcgcgacaucgccgacacgaccgacgcgguccgcgacccccagacccuggagauccucgacaucacccccugcagcuucggcgggguguccgugaucacgccgggcaccaacaccagcaaccaggucgccgugcuguaccaggacgugaacugcaccgagguccccguggccauccacgccgaccagcugacgcccaccuggcggguguacuccaccggcagcaacgucuuccagacccgcgccgggugccucaucggcgcggagcacgugaacaacuccuacgagugcgacauccccaucggggccggcaucugcgccagcuaccagacgcagaccaacuccccgcggcgcgcccggagcguggcgucccagagcaucaucgccuacaccaugucccugggcgccgagaacagcgucgccuacuccaacaacagcaucgccauccccaccaacuucacgaucuccgugaccaccgagauccugcccgugagcaugaccaagacgagcgucgacugcaccauguacaucugcggggacuccaccgagugcagcaaccuccugcugcaguacggcuccuucugcacccagcucaaccgcgcgcugacggggaucgccguggagcaggacaagaacacccaggagguguucgcccaggucaagcagaucuacaagacgcccccgaucaaggacuucggcggguucaacuucagccagauccugcccgaccccuccaagcccagcaagcgguccuucaucgaggaccuccuguucaacaaggugacccuggccgacgccggcuucaucaagcaguacggcgacugccucggggacaucgcggcccgcgaccugaucugcgcccagaaguucaacggccugaccgugcucccgccccugcugaccgacgagaugaucgcccaguacaccagcgcccuccuggcggggaccaucacguccggcuggaccuucggggccggcgccgcccugcagauccccuucgcgaugcagauggccuaccgguucaacggcaucggggucacccagaacgugcucuacgagaaccagaagcugaucgccaaccaguucaacagcgccaucggcaagauccaggacucccugagcuccaccgccagcgcgcucgggaagcugcaggacguggucaaccagaacgcccaggcccugaacacgcucgugaagugccuguccagcaacuucggcgccaucuccagcgugcugaacgacauccucucccgccuggacaaggucgaggccgaggugcagaucgaccggcugaucaccgggcgccuccagugccugcagaccuacgugacccagcagcugauccgggcggccgagauccgcgccagcgccaaccucgccgcgaccaagauguccgagugcguccugggccagagcaagcggguggacuucugcggcaagggguaccaccugauguccuucccccagagcgccccgcacggcguggucuuccuccacgugacguacguccccgcccaggagaagaacuucaccaccgcccccgcgaucugccacgacgggaaggcccacuucccccgcgagggcguguucguguccaacgggacccacugguucgucacgcagcggaacuucuacgagccgcagaucaucaccaccgacaacaccuucgugagcggcaacugcgacguggucaucggcaucgugaacaacacgguguacgacccccugcagcccgagcuggacuccuucaaggaggagcucgacaaguacuucaagaaccacaccagccccgacgucgaccugggggacaucuccggcaucaacgccagcguggugaacauccagaaggagaucgaccgccugaacgaggucgccaagaaccucaacgagucccugaucgaccugcaggagcucgggaaguacgagcaguacaucaagggcggcgggagcgggggcgggcagaucuacgagggcaagcugaccgccgaggggcuccgcuucggcaucguggccagccgguucaaccacgcgcuggucgaccgccugguggagggggccaucgacgccaucgugcggcacggcgggcgcgaggaggacaucacccucguccgggugcccggcuccugggagaucccgguggccgccggcgagcuggcccgcaaggaggacaucgacgcggucaucgccaucggggugcugauccggggcgccacgccccacuucgacuacaucgccagcgagguguccaaggggcucgcggaccugagccuggagcuccgcaagcccaucaccuucggcgucaucaccgccgacacccuggagcaggccaucgagcgggccgggacgaagcacggcaacaagggcugggaggccgcgcuguccgccaucgagauggccaaccucuucaagagccugcgcugaggacuagucccuguucccagagcccacuuuuuuuucuuuuuuugaaauaaaauagccugucuuucagaucucaaaggcucuuuucagagccaccaaaaaaaaaaaaaaaaaaaaaaaaaaaaaaaaaaaaaaaaaaaaaaaaaaaaaaaaaaaaaaaaaaaaaaaaaaaaaaaaaaaaaaaaaaaaaaaaaaaaa

SEQ ID NO: 12364 - RNA, 4388 nt, Artificial Sequence
  SARS-CoV-2/Wuhan/WIV05/2019__EPI_ISL_402128 spike protein mRNA gc (1-1211)(F970C_G999C) LumSynth construct
aggagagucccgcagucggcguccagcggcucugcuuguucgugugugugucguugcaggccuuauucaagcuuaccauguucguguuccugguccuccugccccuggugagcucccagugcgugaaccucaccacccgcacgcagcugccgcccgccuacaccaacagcuucacccggggcgucuacuaccccgacaagguguuccgcuccagcgugcugcacuccacccaggaccucuuccugcccuucuucagcaacgucacgugguuccacgccauccacguguccgggaccaacggcaccaagcgguucgacaacccggugcugcccuucaacgacggggucuacuucgcgagcaccgagaaguccaacaucauccgcggcuggaucuucgggacgacccucgacagcaagacccagucccugcugaucgugaacaacgccaccaacguggucaucaaggugugcgaguuccaguucugcaacgaccccuuccucggcguguacuaccacaagaacaacaagagcuggauggaguccgaguuccgggucuacagcuccgccaacaacugcacguucgaguacgugagccagcccuuccugauggaccuggagggcaagcaggggaacuucaagaaccuccgcgaguucguguucaagaacaucgacggcuacuucaagaucuacuccaagcacaccccgaucaaccugguccgggaccugccccagggguucagcgcccucgagccccugguggaccugcccaucggcaucaacaucacccgcuuccagacccuccuggcccugcaccgguccuaccucacgccgggggacagcagcuccggcuggaccgcgggcgccgccgccuacuacgugggguaccugcagccccgcaccuuccugcucaaguacaacgagaacggcaccaucacggacgcggucgacugcgcccuggacccccugagcgagaccaagugcacccucaaguccuucaccguggagaaggggaucuaccagacgagcaacuuccgggugcagcccaccgaguccaucguccgcuucccgaacaucaccaaccugugccccuucggcgagguguucaacgccacccgguucgccagcgucuacgccuggaaccgcaagcggaucuccaacugcguggcggacuacagcgugcuguacaacuccgccagcuucuccacguucaagugcuacggcgucagccccaccaagcucaacgaccugugcuucaccaacguguacgccgacuccuucgugauccgcggggacgagguccggcagaucgcccccggccagaccgggaagaucgccgacuacaacuacaagcugccggacgacuucacgggcugcgugaucgcguggaacagcaacaaccucgacuccaaggucgggggcaacuacaacuaccuguaccgccuguuccgcaagagcaaccucaagcccuucgagcgggacaucuccaccgagaucuaccaggccggcagcacccccugcaacgggguggagggcuucaacugcuacuucccccugcaguccuacggguuccagccgaccaacggcgugggguaccagcccuaccggguggucgugcugagcuucgagcuccugcacgcccccgccacggugugcggccccaagaaguccaccaaccuggucaagaacaagugcgugaacuucaacuucaacggccucaccgggaccggcgugcugaccgagagcaacaagaaguuccugccguuccagcaguucgggcgcgacaucgccgacacgaccgacgcgguccgcgacccccagacccuggagauccucgacaucacccccugcagcuucggcgggguguccgugaucacgccgggcaccaacaccagcaaccaggucgccgugcuguaccaggacgugaacugcaccgagguccccguggccauccacgccgaccagcugacgcccaccuggcggguguacuccaccggcagcaacgucuuccagacccgcgccgggugccucaucggcgcggagcacgugaacaacuccuacgagugcgacauccccaucggggccggcaucugcgccagcuaccagacgcagaccaacuccccgcggcgcgcccggagcguggcgucccagagcaucaucgccuacaccaugucccugggcgccgagaacagcgucgccuacuccaacaacagcaucgccauccccaccaacuucacgaucuccgugaccaccgagauccugcccgugagcaugaccaagacgagcgucgacugcaccauguacaucugcggggacuccaccgagugcagcaaccuccugcugcaguacggcuccuucugcacccagcucaaccgcgcgcugacggggaucgccguggagcaggacaagaacacccaggagguguucgcccaggucaagcagaucuacaagacgcccccgaucaaggacuucggcggguucaacuucagccagauccugcccgaccccuccaagcccagcaagcgguccuucaucgaggaccuccuguucaacaaggugacccuggccgacgccggcuucaucaagcaguacggcgacugccucggggacaucgcggcccgcgaccugaucugcgcccagaaguucaacggccugaccgugcucccgccccugcugaccgacgagaugaucgcccaguacaccagcgcccuccuggcggggaccaucacguccggcuggaccuucggggccggcgccgcccugcagauccccuucgcgaugcagauggccuaccgguucaacggcaucggggucacccagaacgugcucuacgagaaccagaagcugaucgccaaccaguucaacagcgccaucggcaagauccaggacucccugagcuccaccgccagcgcgcucgggaagcugcaggacguggucaaccagaacgcccaggcccugaacacgcucgugaagcagcuguccagcaacugcggcgccaucuccagcgugcugaacgacauccucucccgccuggacaaggucgaggccgaggugcagaucgaccggcugaucaccugucgccuccagagccugcagaccuacgugacccagcagcugauccgggcggccgagauccgcgccagcgccaaccucgccgcgaccaagauguccgagugcguccugggccagagcaagcggguggacuucugcggcaagggguaccaccugauguccuucccccagagcgccccgcacggcguggucuuccuccacgugacguacguccccgcccaggagaagaacuucaccaccgcccccgcgaucugccacgacgggaaggcccacuucccccgcgagggcguguucguguccaacgggacccacugguucgucacgcagcggaacuucuacgagccgcagaucaucaccaccgacaacaccuucgugagcggcaacugcgacguggucaucggcaucgugaacaacacgguguacgacccccugcagcccgagcuggacuccuucaaggaggagcucgacaaguacuucaagaaccacaccagccccgacgucgaccugggggacaucuccggcaucaacgccagcguggugaacauccagaaggagaucgaccgccugaacgaggucgccaagaaccucaacgagucccugaucgaccugcaggagcucgggaaguacgagcaguacaucaagggcggcgggagcgggggcgggcagaucuacgagggcaagcugaccgccgaggggcuccgcuucggcaucguggccagccgguucaaccacgcgcuggucgaccgccugguggagggggccaucgacgccaucgugcggcacggcgggcgcgaggaggacaucacccucguccgggugcccggcuccugggagaucccgguggccgccggcgagcuggcccgcaaggaggacaucgacgcggucaucgccaucggggugcugauccggggcgccacgccccacuucgacuacaucgccagcgagguguccaaggggcucgcggaccugagccuggagcuccgcaagcccaucaccuucggcgucaucaccgccgacacccuggagcaggccaucgagcgggccgggacgaagcacggcaacaagggcugggaggccgcgcuguccgccaucgagauggccaaccucuucaagagccugcgcugaggacuagucccuguucccagagcccacuuuuuuuucuuuuuuugaaauaaaauagccugucuuucagaucucaaaggcucuuuucagagccaccaaaaaaaaaaaaaaaaaaaaaaaaaaaaaaaaaaaaaaaaaaaaaaaaaaaaaaaaaaaaaaaaaaaaaaaaaaaaaaaaaaaaaaaaaaaaaaaaaaaaa

SEQ ID NO: 12365 - RNA, 4388 nt, Artificial Sequence
  SARS-CoV-2/Wuhan/WIV05/2019__EPI_ISL_402128 spike protein mRNA gc (1-1211)(A972C_R995C) LumSynth construct
aggagagucccgcagucggcguccagcggcucugcuuguucgugugugugucguugcaggccuuauucaagcuuaccauguucguguuccugguccuccugccccuggugagcucccagugcgugaaccucaccacccgcacgcagcugccgcccgccuacaccaacagcuucacccggggcgucuacuaccccgacaagguguuccgcuccagcgugcugcacuccacccaggaccucuuccugcccuucuucagcaacgucacgugguuccacgccauccacguguccgggaccaacggcaccaagcgguucgacaacccggugcugcccuucaacgacggggucuacuucgcgagcaccgagaaguccaacaucauccgcggcuggaucuucgggacgacccucgacagcaagacccagucccugcugaucgugaacaacgccaccaacguggucaucaaggugugcgaguuccaguucugcaacgaccccuuccucggcguguacuaccacaagaacaacaagagcuggauggaguccgaguuccgggucuacagcuccgccaacaacugcacguucgaguacgugagccagcccuuccugauggaccuggagggcaagcaggggaacuucaagaaccuccgcgaguucguguucaagaacaucgacggcuacuucaagaucuacuccaagcacaccccgaucaaccugguccgggaccugccccagggguucagcgcccucgagccccugguggaccugcccaucggcaucaacaucacccgcuuccagacccuccuggcccugcaccgguccuaccucacgccgggggacagcagcuccggcuggaccgcgggcgccgccgccuacuacgugggguaccugcagccccgcaccuuccugcucaaguacaacgagaacggcaccaucacggacgcggucgacugcgcccuggacccccugagcgagaccaagugcacccucaaguccuucaccguggagaaggggaucuaccagacgagcaacuuccgggugcagcccaccgaguccaucguccgcuucccgaacaucaccaaccugugccccuucggcgagguguucaacgccacccgguucgccagcgucuacgccuggaaccgcaagcggaucuccaacugcguggcggacuacagcgugcuguacaacuccgccagcuucuccacguucaagugcuacggcgucagccccaccaagcucaacgaccugugcuucaccaacguguacgccgacuccuucgugauccgcggggacgagguccggcagaucgcccccggccagaccgggaagaucgccgacuacaacuacaagcugccggacgacuucacgggcugcgugaucgcguggaacagcaacaaccucgacuccaaggucgggggcaacuacaacuaccuguaccgccuguuccgcaagagcaaccucaagcccuucgagcgggacaucuccaccgagaucuaccaggccggcagcacccccugcaacgggguggagggcuucaacugcuacuucccccugcaguccuacggguuccagccgaccaacggcgugggguaccagcccuaccggguggucgugcugagcuucgagcuccugcacgcccccgccacggugugcggccccaagaaguccaccaaccuggucaagaacaagugcgugaacuucaacuucaacggccucaccgggaccggcgugcugaccgagagcaacaagaaguuccugccguuccagcaguucgggcgcgacaucgccgacacgaccgacgcgguccgcgacccccagacccuggagauccucgacaucacccccugcagcuucggcgggguguccgugaucacgccgggcaccaacaccagcaaccaggucgccgugcuguaccaggacgugaacugcaccgagguccccguggccauccacgccgaccagcugacgcccaccuggcggguguacuccaccggcagcaacgucuuccagacccgcgccgggugccucaucggcgcggagcacgugaacaacuccuacgagugcgacauccccaucggggccggcaucugcgccagcuaccagacgcagaccaacuccccgcggcgcgcccggagcguggcgucccagagcaucaucgccuacaccaugucccugggcgccgagaacagcgucgccuacuccaacaacagcaucgccauccccaccaacuucacgaucuccgugaccaccgagauccugcccgugagcaugaccaagacgagcgucgacugcaccauguacaucugcggggacuccaccgagugcagcaaccuccugcugcaguacggcuccuucugcacccagcucaaccgcgcgcugacggggaucgccguggagcaggacaagaacacccaggagguguucgcccaggucaagcagaucuacaagacgcccccgaucaaggacuucggcggguucaacuucagccagauccugcccgaccccuccaagcccagcaagcgguccuucaucgaggaccuccuguucaacaaggugacccuggccgacgccggcuucaucaagcaguacggcgacugccucggggacaucgcggcccgcgaccugaucugcgcccagaaguucaacggccugaccgugcucccgccccugcugaccgacgagaugaucgcccaguacaccagcgcccuccuggcggggaccaucacguccggcuggaccuucggggccggcgccgcccugcagauccccuucgcgaugcagauggccuaccgguucaacggcaucggggucacccagaacgugcucuacgagaaccagaagcugaucgccaaccaguucaacagcgccaucggcaagauccaggacucccugagcuccaccgccagcgcgcucgggaagcugcaggacguggucaaccagaacgcccaggcccugaacacgcucgugaagcagcuguccagcaacuucggcugcaucuccagcgugcugaacgacauccucucccgccuggacaaggucgaggccgaggugcagaucgacugccugaucaccgggcgccuccagagccugcagaccuacgugacccagcagcugauccgggcggccgagauccgcgccagcgccaaccucgccgcgaccaagauguccgagugcguccugggccagagcaagcggguggacuucugcggcaagggguaccaccugauguccuucccccagagcgccccgcacggcguggucuuccuccacgugacguacguccccgcccaggagaagaacuucaccaccgcccccgcgaucugccacgacgggaaggcccacuucccccgcgagggcguguucguguccaacgggacccacugguucgucacgcagcggaacuucuacgagccgcagaucaucaccaccgacaacaccuucgugagcggcaacugcgacguggucaucggcaucgugaacaacacgguguacgacccccugcagcccgagcuggacuccuucaaggaggagcucgacaaguacuucaagaaccacaccagccccgacgucgaccugggggacaucuccggcaucaacgccagcguggugaacauccagaaggagaucgaccgccugaacgaggucgccaagaaccucaacgagucccugaucgaccugcaggagcucgggaaguacgagcaguacaucaagggcggcgggagcgggggcgggcagaucuacgagggcaagcugaccgccgaggggcuccgcuucggcaucguggccagccgguucaaccacgcgcuggucgaccgccugguggagggggccaucgacgccaucgugcggcacggcgggcgcgaggaggacaucacccucguccgggugcccggcuccugggagaucccgguggccgccggcgagcuggcccgcaaggaggacaucgacgcggucaucgccaucggggugcugauccggggcgccacgccccacuucgacuacaucgccagcgagguguccaaggggcucgcggaccugagccuggagcuccgcaagcccaucaccuucggcgucaucaccgccgacacccuggagcaggccaucgagcgggccgggacgaagcacggcaacaagggcugggaggccgcgcuguccgccaucgagauggccaaccucuucaagagccugcgcugaggacuagucccuguucccagagcccacuuuuuuuucuuuuuuugaaauaaaauagccugucuuucagaucucaaaggcucuuuucagagccaccaaaaaaaaaaaaaaaaaaaaaaaaaaaaaaaaaaaaaaaaaaaaaaaaaaaaaaaaaaaaaaaaaaaaaaaaaaaaaaaaaaaaaaaaaaaaaaaaaaaaa

SEQ ID NO: 12366 - RNA, 4388 nt, Artificial Sequence
  SARS-CoV-2/Wuhan/WIV05/2019__EPI_ISL_402128 spike protein mRNA gc (1-1211)(A890C_V1040C) LumSynth construct
aggagagucccgcagucggcguccagcggcucugcuuguucgugugugugucguugcaggccuuauucaagcuuaccauguucguguuccugguccuccugccccuggugagcucccagugcgugaaccucaccacccgcacgcagcugccgcccgccuacaccaacagcuucacccggggcgucuacuaccccgacaagguguuccgcuccagcgugcugcacuccacccaggaccucuuccugcccuucuucagcaacgucacgugguuccacgccauccacguguccgggaccaacggcaccaagcgguucgacaacccggugcugcccuucaacgacggggucuacuucgcgagcaccgagaaguccaacaucauccgcggcuggaucuucgggacgacccucgacagcaagacccagucccugcugaucgugaacaacgccaccaacguggucaucaaggugugcgaguuccaguucugcaacgaccccuuccucggcguguacuaccacaagaacaacaagagcuggauggaguccgaguuccgggucuacagcuccgccaacaacugcacguucgaguacgugagccagcccuuccugauggaccuggagggcaagcaggggaacuucaagaaccuccgcgaguucguguucaagaacaucgacggcuacuucaagaucuacuccaagcacaccccgaucaaccugguccgggaccugccccagggguucagcgcccucgagccccugguggaccugcccaucggcaucaacaucacccgcuuccagacccuccuggcccugcaccgguccuaccucacgccgggggacagcagcuccggcuggaccgcgggcgccgccgccuacuacgugggguaccugcagccccgcaccuuccugcucaaguacaacgagaacggcaccaucacggacgcggucgacugcgcccuggacccccugagcgagaccaagugcacccucaaguccuucaccguggagaaggggaucuaccagacgagcaacuuccgggugcagcccaccgaguccaucguccgcuucccgaacaucaccaaccugugccccuucggcgagguguucaacgccacccgguucgccagcgucuacgccuggaaccgcaagcggaucuccaacugcguggcggacuacagcgugcuguacaacuccgccagcuucuccacguucaagugcuacggcgucagccccaccaagcucaacgaccugugcuucaccaacguguacgccgacuccuucgugauccgcggggacgagguccggcagaucgcccccggccagaccgggaagaucgccgacuacaacuacaagcugccggacgacuucacgggcugcgugaucgcguggaacagcaacaaccucgacuccaaggucgggggcaacuacaacuaccuguaccgccuguuccgcaagagcaaccucaagcccuucgagcgggacaucuccaccgagaucuaccaggccggcagcacccccugcaacgggguggagggcuucaacugcuacuucccccugcaguccuacggguuccagccgaccaacggcgugggguaccagcccuaccggguggucgugcugagcuucgagcuccugcacgcccccgccacggugugcggccccaagaaguccaccaaccuggucaagaacaagugcgugaacuucaacuucaacggccucaccgggaccggcgugcugaccgagagcaacaagaaguuccugccguuccagcaguucgggcgcgacaucgccgacacgaccgacgcgguccgcgacccccagacccuggagauccucgacaucacccccugcagcuucggcgggguguccgugaucacgccgggcaccaacaccagcaaccaggucgccgugcuguaccaggacgugaacugcaccgagguccccguggccauccacgccgaccagcugacgcccaccuggcggguguacuccaccggcagcaacgucuuccagacccgcgccgggugccucaucggcgcggagcacgugaacaacuccuacgagugcgacauccccaucggggccggcaucugcgccagcuaccagacgcagaccaacuccccgcggcgcgcccggagcguggcgucccagagcaucaucgccuacaccaugucccugggcgccgagaacagcgucgccuacuccaacaacagcaucgccauccccaccaacuucacgaucuccgugaccaccgagauccugcccgugagcaugaccaagacgagcgucgacugcaccauguacaucugcggggacuccaccgagugcagcaaccuccugcugcaguacggcuccuucugcacccagcucaaccgcgcgcugacggggaucgccguggagcaggacaagaacacccaggagguguucgcccaggucaagcagaucuacaagacgcccccgaucaaggacuucggcggguucaacuucagccagauccugcccgaccccuccaagcccagcaagcgguccuucaucgaggaccuccuguucaacaaggugacccuggccgacgccggcuucaucaagcaguacggcgacugccucggggacaucgcggcccgcgaccugaucugcgcccagaaguucaacggccugaccgugcucccgccccugcugaccgacgagaugaucgcccaguacaccagcgcccuccuggcggggaccaucacguccggcuggaccuucgggugcggcgccgcccugcagauccccuucgcgaugcagauggccuaccgguucaacggcaucggggucacccagaacgugcucuacgagaaccagaagcugaucgccaaccaguucaacagcgccaucggcaagauccaggacucccugagcuccaccgccagcgcgcucgggaagcugcaggacguggucaaccagaacgcccaggcccugaacacgcucgugaagcagcuguccagcaacuucggcgccaucuccagcgugcugaacgacauccucucccgccuggacaaggucgaggccgaggugcagaucgaccggcugaucaccgggcgccuccagagccugcagaccuacgugacccagcagcugauccgggcggccgagauccgcgccagcgccaaccucgccgcgaccaagauguccgagugcguccugggccagagcaagcggugcgacuucugcggcaagggguaccaccugauguccuucccccagagcgccccgcacggcguggucuuccuccacgugacguacguccccgcccaggagaagaacuucaccaccgcccccgcgaucugccacgacgggaaggcccacuucccccgcgagggcguguucguguccaacgggacccacugguucgucacgcagcggaacuucuacgagccgcagaucaucaccaccgacaacaccuucgugagcggcaacugcgacguggucaucggcaucgugaacaacacgguguacgacccccugcagcccgagcuggacuccuucaaggaggagcucgacaaguacuucaagaaccacaccagccccgacgucgaccugggggacaucuccggcaucaacgccagcguggugaacauccagaaggagaucgaccgccugaacgaggucgccaagaaccucaacgagucccugaucgaccugcaggagcucgggaaguacgagcaguacaucaagggcggcgggagcgggggcgggcagaucuacgagggcaagcugaccgccgaggggcuccgcuucggcaucguggccagccgguucaaccacgcgcuggucgaccgccugguggagggggccaucgacgccaucgugcggcacggcgggcgcgaggaggacaucacccucguccgggugcccggcuccugggagaucccgguggccgccggcgagcuggcccgcaaggaggacaucgacgcggucaucgccaucggggugcugauccggggcgccacgccccacuucgacuacaucgccagcgagguguccaaggggcucgcggaccugagccuggagcuccgcaagcccaucaccuucggcgucaucaccgccgacacccuggagcaggccaucgagcgggccgggacgaagcacggcaacaagggcugggaggccgcgcuguccgccaucgagauggccaaccucuucaagagccugcgcugaggacuagucccuguucccagagcccacuuuuuuuucuuuuuuugaaauaaaauagccugucuuucagaucucaaaggcucuuuucagagccaccaaaaaaaaaaaaaaaaaaaaaaaaaaaaaaaaaaaaaaaaaaaaaaaaaaaaaaaaaaaaaaaaaaaaaaaaaaaaaaaaaaaaaaaaaaaaaaaaaaaaa

SEQ ID NO: 12367 - RNA, 4388 nt, Artificial Sequence
  SARS-CoV-2/Wuhan/WIV05/2019__EPI_ISL_402128 spike protein mRNA gc (1-1211)(T874C_S1055C) LumSynth construct
aggagagucccgcagucggcguccagcggcucugcuuguucgugugugugucguugcaggccuuauucaagcuuaccauguucguguuccugguccuccugccccuggugagcucccagugcgugaaccucaccacccgcacgcagcugccgcccgccuacaccaacagcuucacccggggcgucuacuaccccgacaagguguuccgcuccagcgugcugcacuccacccaggaccucuuccugcccuucuucagcaacgucacgugguuccacgccauccacguguccgggaccaacggcaccaagcgguucgacaacccggugcugcccuucaacgacggggucuacuucgcgagcaccgagaaguccaacaucauccgcggcuggaucuucgggacgacccucgacagcaagacccagucccugcugaucgugaacaacgccaccaacguggucaucaaggugugcgaguuccaguucugcaacgaccccuuccucggcguguacuaccacaagaacaacaagagcuggauggaguccgaguuccgggucuacagcuccgccaacaacugcacguucgaguacgugagccagcccuuccugauggaccuggagggcaagcaggggaacuucaagaaccuccgcgaguucguguucaagaacaucgacggcuacuucaagaucuacuccaagcacaccccgaucaaccugguccgggaccugccccagggguucagcgcccucgagccccugguggaccugcccaucggcaucaacaucacccgcuuccagacccuccuggcccugcaccgguccuaccucacgccgggggacagcagcuccggcuggaccgcgggcgccgccgccuacuacgugggguaccugcagccccgcaccuuccugcucaaguacaacgagaacggcaccaucacggacgcggucgacugcgcccuggacccccugagcgagaccaagugcacccucaaguccuucaccguggagaaggggaucuaccagacgagcaacuuccgggugcagcccaccgaguccaucguccgcuucccgaacaucaccaaccugugccccuucggcgagguguucaacgccacccgguucgccagcgucuacgccuggaaccgcaagcggaucuccaacugcguggcggacuacagcgugcuguacaacuccgccagcuucuccacguucaagugcuacggcgucagccccaccaagcucaacgaccugugcuucaccaacguguacgccgacuccuucgugauccgcggggacgagguccggcagaucgcccccggccagaccgggaagaucgccgacuacaacuacaagcugccggacgacuucacgggcugcgugaucgcguggaacagcaacaaccucgacuccaaggucgggggcaacuacaacuaccuguaccgccuguuccgcaagagcaaccucaagcccuucgagcgggacaucuccaccgagaucuaccaggccggcagcacccccugcaacgggguggagggcuucaacugcuacuucccccugcaguccuacggguuccagccgaccaacggcgugggguaccagcccuaccggguggucgugcugagcuucgagcuccugcacgcccccgccacggugugcggccccaagaaguccaccaaccuggucaagaacaagugcgugaacuucaacuucaacggccucaccgggaccggcgugcugaccgagagcaacaagaaguuccugccguuccagcaguucgggcgcgacaucgccgacacgaccgacgcgguccgcgacccccagacccuggagauccucgacaucacccccugcagcuucggcgggguguccgugaucacgccgggcaccaacaccagcaaccaggucgccgugcuguaccaggacgugaacugcaccgagguccccguggccauccacgccgaccagcugacgcccaccuggcggguguacuccaccggcagcaacgucuuccagacccgcgccgggugccucaucggcgcggagcacgugaacaacuccuacgagugcgacauccccaucggggccggcaucugcgccagcuaccagacgcagaccaacuccccgcggcgcgcccggagcguggcgucccagagcaucaucgccuacaccaugucccugggcgccgagaacagcgucgccuacuccaacaacagcaucgccauccccaccaacuucacgaucuccgugaccaccgagauccugcccgugagcaugaccaagacgagcgucgacugcaccauguacaucugcggggacuccaccgagugcagcaaccuccugcugcaguacggcuccuucugcacccagcucaaccgcgcgcugacggggaucgccguggagcaggacaagaacacccaggagguguucgcccaggucaagcagaucuacaagacgcccccgaucaaggacuucggcggguucaacuucagccagauccugcccgaccccuccaagcccagcaagcgguccuucaucgaggaccuccuguucaacaaggugacccuggccgacgccggcuucaucaagcaguacggcgacugccucggggacaucgcggcccgcgaccugaucugcgcccagaaguucaacggccugaccgugcucccgccccugcugaccgacgagaugaucgcccaguacugcagcgcccuccuggcggggaccaucacguccggcuggaccuucggggccggcgccgcccugcagauccccuucgcgaugcagauggccuaccgguucaacggcaucggggucacccagaacgugcucuacgagaaccagaagcugaucgccaaccaguucaacagcgccaucggcaagauccaggacucccugagcuccaccgccagcgcgcucgggaagcugcaggacguggucaaccagaacgcccaggcccugaacacgcucgugaagcagcuguccagcaacuucggcgccaucuccagcgugcugaacgacauccucucccgccuggacaaggucgaggccgaggugcagaucgaccggcugaucaccgggcgccuccagagccugcagaccuacgugacccagcagcugauccgggcggccgagauccgcgccagcgccaaccucgccgcgaccaagauguccgagugcguccugggccagagcaagcggguggacuucugcggcaagggguaccaccugauguccuucccccagugcgccccgcacggcguggucuuccuccacgugacguacguccccgcccaggagaagaacuucaccaccgcccccgcgaucugccacgacgggaaggcccacuucccccgcgagggcguguucguguccaacgggacccacugguucgucacgcagcggaacuucuacgagccgcagaucaucaccaccgacaacaccuucgugagcggcaacugcgacguggucaucggcaucgugaacaacacgguguacgacccccugcagcccgagcuggacuccuucaaggaggagcucgacaaguacuucaagaaccacaccagccccgacgucgaccugggggacaucuccggcaucaacgccagcguggugaacauccagaaggagaucgaccgccugaacgaggucgccaagaaccucaacgagucccugaucgaccugcaggagcucgggaaguacgagcaguacaucaagggcggcgggagcgggggcgggcagaucuacgagggcaagcugaccgccgaggggcuccgcuucggcaucguggccagccgguucaaccacgcgcuggucgaccgccugguggagggggccaucgacgccaucgugcggcacggcgggcgcgaggaggacaucacccucguccgggugcccggcuccugggagaucccgguggccgccggcgagcuggcccgcaaggaggacaucgacgcggucaucgccaucggggugcugauccggggcgccacgccccacuucgacuacaucgccagcgagguguccaaggggcucgcggaccugagccuggagcuccgcaagcccaucaccuucggcgucaucaccgccgacacccuggagcaggccaucgagcgggccgggacgaagcacggcaacaagggcugggaggccgcgcuguccgccaucgagauggccaaccucuucaagagccugcgcugaggacuagucccuguucccagagcccacuuuuuuuucuuuuuuugaaauaaaauagccugucuuucagaucucaaaggcucuuuucagagccaccaaaaaaaaaaaaaaaaaaaaaaaaaaaaaaaaaaaaaaaaaaaaaaaaaaaaaaaaaaaaaaaaaaaaaaaaaaaaaaaaaaaaaaaaaaaaaaaaaaaaa

SEQ ID NO: 12368 - RNA, 4412 nt, Artificial Sequence
  SARS-CoV-2/Wuhan/WIV05/2019__EPI_ISL_402128 spike protein mRNA gc (1-1211) Ferritin construct
aggagagucccgcagucggcguccagcggcucugcuuguucgugugugugucguugcaggccuuauucaagcuuaccauguucguguuccugguccuccugccccuggugagcucccagugcgugaaccucaccacccgcacgcagcugccgcccgccuacaccaacagcuucacccggggcgucuacuaccccgacaagguguuccgcuccagcgugcugcacuccacccaggaccucuuccugcccuucuucagcaacgucacgugguuccacgccauccacguguccgggaccaacggcaccaagcgguucgacaacccggugcugcccuucaacgacggggucuacuucgcgagcaccgagaaguccaacaucauccgcggcuggaucuucgggacgacccucgacagcaagacccagucccugcugaucgugaacaacgccaccaacguggucaucaaggugugcgaguuccaguucugcaacgaccccuuccucggcguguacuaccacaagaacaacaagagcuggauggaguccgaguuccgggucuacagcuccgccaacaacugcacguucgaguacgugagccagcccuuccugauggaccuggagggcaagcaggggaacuucaagaaccuccgcgaguucguguucaagaacaucgacggcuacuucaagaucuacuccaagcacaccccgaucaaccugguccgggaccugccccagggguucagcgcccucgagccccugguggaccugcccaucggcaucaacaucacccgcuuccagacccuccuggcccugcaccgguccuaccucacgccgggggacagcagcuccggcuggaccgcgggcgccgccgccuacuacgugggguaccugcagccccgcaccuuccugcucaaguacaacgagaacggcaccaucacggacgcggucgacugcgcccuggacccccugagcgagaccaagugcacccucaaguccuucaccguggagaaggggaucuaccagacgagcaacuuccgggugcagcccaccgaguccaucguccgcuucccgaacaucaccaaccugugccccuucggcgagguguucaacgccacccgguucgccagcgucuacgccuggaaccgcaagcggaucuccaacugcguggcggacuacagcgugcuguacaacuccgccagcuucuccacguucaagugcuacggcgucagccccaccaagcucaacgaccugugcuucaccaacguguacgccgacuccuucgugauccgcggggacgagguccggcagaucgcccccggccagaccgggaagaucgccgacuacaacuacaagcugccggacgacuucacgggcugcgugaucgcguggaacagcaacaaccucgacuccaaggucgggggcaacuacaacuaccuguaccgccuguuccgcaagagcaaccucaagcccuucgagcgggacaucuccaccgagaucuaccaggccggcagcacccccugcaacgggguggagggcuucaacugcuacuucccccugcaguccuacggguuccagccgaccaacggcgugggguaccagcccuaccggguggucgugcugagcuucgagcuccugcacgcccccgccacggugugcggccccaagaaguccaccaaccuggucaagaacaagugcgugaacuucaacuucaacggccucaccgggaccggcgugcugaccgagagcaacaagaaguuccugccguuccagcaguucgggcgcgacaucgccgacacgaccgacgcgguccgcgacccccagacccuggagauccucgacaucacccccugcagcuucggcgggguguccgugaucacgccgggcaccaacaccagcaaccaggucgccgugcuguaccaggacgugaacugcaccgagguccccguggccauccacgccgaccagcugacgcccaccuggcggguguacuccaccggcagcaacgucuuccagacccgcgccgggugccucaucggcgcggagcacgugaacaacuccuacgagugcgacauccccaucggggccggcaucugcgccagcuaccagacgcagaccaacuccccgcggcgcgcccggagcguggcgucccagagcaucaucgccuacaccaugucccugggcgccgagaacagcgucgccuacuccaacaacagcaucgccauccccaccaacuucacgaucuccgugaccaccgagauccugcccgugagcaugaccaagacgagcgucgacugcaccauguacaucugcggggacuccaccgagugcagcaaccuccugcugcaguacggcuccuucugcacccagcucaaccgcgcgcugacggggaucgccguggagcaggacaagaacacccaggagguguucgcccaggucaagcagaucuacaagacgcccccgaucaaggacuucggcggguucaacuucagccagauccugcccgaccccuccaagcccagcaagcgguccuucaucgaggaccuccuguucaacaaggugacccuggccgacgccggcuucaucaagcaguacggcgacugccucggggacaucgcggcccgcgaccugaucugcgcccagaaguucaacggccugaccgugcucccgccccugcugaccgacgagaugaucgcccaguacaccagcgcccuccuggcggggaccaucacguccggcuggaccuucggggccggcgccgcccugcagauccccuucgcgaugcagauggccuaccgguucaacggcaucggggucacccagaacgugcucuacgagaaccagaagcugaucgccaaccaguucaacagcgccaucggcaagauccaggacucccugagcuccaccgccagcgcgcucgggaagcugcaggacguggucaaccagaacgcccaggcccugaacacgcucgugaagcagcuguccagcaacuucggcgccaucuccagcgugcugaacgacauccucucccgccuggacaaggucgaggccgaggugcagaucgaccggcugaucaccgggcgccuccagagccugcagaccuacgugacccagcagcugauccgggcggccgagauccgcgccagcgccaaccucgccgcgaccaagauguccgagugcguccugggccagagcaagcggguggacuucugcggcaagggguaccaccugauguccuucccccagagcgccccgcacggcguggucuuccuccacgugacguacguccccgcccaggagaagaacuucaccaccgcccccgcgaucugccacgacgggaaggcccacuucccccgcgagggcguguucguguccaacgggacccacugguucgucacgcagcggaacuucuacgagccgcagaucaucaccaccgacaacaccuucgugagcggcaacugcgacguggucaucggcaucgugaacaacacgguguacgacccccugcagcccgagcuggacuccuucaaggaggagcucgacaaguacuucaagaaccacaccagccccgacgucgaccugggggacaucuccggcaucaacgccagcguggugaacauccagaaggagaucgaccgccugaacgaggucgccaagaaccucaacgagucccugaucgaccugcaggagcucgggaaguacgagcaguacaucaagggcgggggcgggagcgacaucaucaagcuccugaacgagcaggucaacaaggagaugcaguccagcaaccuguacauguccaugagcuccuggugcuacacccacagccucgacggcgccgggcuguuccuguucgaccacgccgcggaggaguacgagcacgccaagaagcucaucaucuuccugaacgagaacaacgugcccgugcagcugaccuccaucagcgccccggagcacaaguucgagggccucacgcagaucuuccagaaggccuacgagcacgagcagcacaucuccgagagcaucaacaacaucguggaccacgccaucaaguccaaggaccacgcgaccuucaacuuccugcagugguacgucgccgagcagcacgaggaggaggugcuguucaaggacauccucgacaagaucgagcugaucgggaacgagaaccacggccuguaccucgccgaccaguacgugaaggggaucgccaagagccgcaaguccugaggacuagucccuguucccagagcccacuuuuuuuucuuuuuuugaaauaaaauagccugucuuucagaucucaaaggcucuuuucagagccaccaaaaaaaaaaaaaaaaaaaaaaaaaaaaaaaaaaaaaaaaaaaaaaaaaaaaaaaaaaaaaaaaaaaaaaaaaaaaaaaaaaaaaaaaaaaaaaaaaaaaa

SEQ ID NO: 12369 - RNA, 4412 nt, Artificial Sequence
  SARS-CoV-2/Wuhan/WIV05/2019__EPI_ISL_402128 spike protein mRNA gc (1-1211)(K986P_V987P) Ferritin construct
aggagagucccgcagucggcguccagcggcucugcuuguucgugugugugucguugcaggccuuauucaagcuuaccauguucguguuccugguccuccugccccuggugagcucccagugcgugaaccucaccacccgcacgcagcugccgcccgccuacaccaacagcuucacccggggcgucuacuaccccgacaagguguuccgcuccagcgugcugcacuccacccaggaccucuuccugcccuucuucagcaacgucacgugguuccacgccauccacguguccgggaccaacggcaccaagcgguucgacaacccggugcugcccuucaacgacggggucuacuucgcgagcaccgagaaguccaacaucauccgcggcuggaucuucgggacgacccucgacagcaagacccagucccugcugaucgugaacaacgccaccaacguggucaucaaggugugcgaguuccaguucugcaacgaccccuuccucggcguguacuaccacaagaacaacaagagcuggauggaguccgaguuccgggucuacagcuccgccaacaacugcacguucgaguacgugagccagcccuuccugauggaccuggagggcaagcaggggaacuucaagaaccuccgcgaguucguguucaagaacaucgacggcuacuucaagaucuacuccaagcacaccccgaucaaccugguccgggaccugccccagggguucagcgcccucgagccccugguggaccugcccaucggcaucaacaucacccgcuuccagacccuccuggcccugcaccgguccuaccucacgccgggggacagcagcuccggcuggaccgcgggcgccgccgccuacuacgugggguaccugcagccccgcaccuuccugcucaaguacaacgagaacggcaccaucacggacgcggucgacugcgcccuggacccccugagcgagaccaagugcacccucaaguccuucaccguggagaaggggaucuaccagacgagcaacuuccgggugcagcccaccgaguccaucguccgcuucccgaacaucaccaaccugugccccuucggcgagguguucaacgccacccgguucgccagcgucuacgccuggaaccgcaagcggaucuccaacugcguggcggacuacagcgugcuguacaacuccgccagcuucuccacguucaagugcuacggcgucagccccaccaagcucaacgaccugugcuucaccaacguguacgccgacuccuucgugauccgcggggacgagguccggcagaucgcccccggccagaccgggaagaucgccgacuacaacuacaagcugccggacgacuucacgggcugcgugaucgcguggaacagcaacaaccucgacuccaaggucgggggcaacuacaacuaccuguaccgccuguuccgcaagagcaaccucaagcccuucgagcgggacaucuccaccgagaucuaccaggccggcagcacccccugcaacgggguggagggcuucaacugcuacuucccccugcaguccuacggguuccagccgaccaacggcgugggguaccagcccuaccggguggucgugcugagcuucgagcuccugcacgcccccgccacggugugcggccccaagaaguccaccaaccuggucaagaacaagugcgugaacuucaacuucaacggccucaccgggaccggcgugcugaccgagagcaacaagaaguuccugccguuccagcaguucgggcgcgacaucgccgacacgaccgacgcgguccgcgacccccagacccuggagauccucgacaucacccccugcagcuucggcgggguguccgugaucacgccgggcaccaacaccagcaaccaggucgccgugcuguaccaggacgugaacugcaccgagguccccguggccauccacgccgaccagcugacgcccaccuggcggguguacuccaccggcagcaacgucuuccagacccgcgccgggugccucaucggcgcggagcacgugaacaacuccuacgagugcgacauccccaucggggccggcaucugcgccagcuaccagacgcagaccaacuccccgcggcgcgcccggagcguggcgucccagagcaucaucgccuacaccaugucccugggcgccgagaacagcgucgccuacuccaacaacagcaucgccauccccaccaacuucacgaucuccgugaccaccgagauccugcccgugagcaugaccaagacgagcgucgacugcaccauguacaucugcggggacuccaccgagugcagcaaccuccugcugcaguacggcuccuucugcacccagcucaaccgcgcgcugacggggaucgccguggagcaggacaagaacacccaggagguguucgcccaggucaagcagaucuacaagacgcccccgaucaaggacuucggcggguucaacuucagccagauccugcccgaccccuccaagcccagcaagcgguccuucaucgaggaccuccuguucaacaaggugacccuggccgacgccggcuucaucaagcaguacggcgacugccucggggacaucgcggcccgcgaccugaucugcgcccagaaguucaacggccugaccgugcucccgccccugcugaccgacgagaugaucgcccaguacaccagcgcccuccuggcggggaccaucacguccggcuggaccuucggggccggcgccgcccugcagauccccuucgcgaugcagauggccuaccgguucaacggcaucggggucacccagaacgugcucuacgagaaccagaagcugaucgccaaccaguucaacagcgccaucggcaagauccaggacucccugagcuccaccgccagcgcgcucgggaagcugcaggacguggucaaccagaacgcccaggcccugaacacgcucgugaagcagcuguccagcaacuucggcgccaucuccagcgugcugaacgacauccucucccgccuggacccgcccgaggccgaggugcagaucgaccggcugaucaccgggcgccuccagagccugcagaccuacgugacccagcagcugauccgggcggccgagauccgcgccagcgccaaccucgccgcgaccaagauguccgagugcguccugggccagagcaagcggguggacuucugcggcaagggguaccaccugauguccuucccccagagcgccccgcacggcguggucuuccuccacgugacguacguccccgcccaggagaagaacuucaccaccgcccccgcgaucugccacgacgggaaggcccacuucccccgcgagggcguguucguguccaacgggacccacugguucgucacgcagcggaacuucuacgagccgcagaucaucaccaccgacaacaccuucgugagcggcaacugcgacguggucaucggcaucgugaacaacacgguguacgacccccugcagcccgagcuggacuccuucaaggaggagcucgacaaguacuucaagaaccacaccagccccgacgucgaccugggggacaucuccggcaucaacgccagcguggugaacauccagaaggagaucgaccgccugaacgaggucgccaagaaccucaacgagucccugaucgaccugcaggagcucgggaaguacgagcaguacaucaagggcgggggcgggagcgacaucaucaagcuccugaacgagcaggucaacaaggagaugcaguccagcaaccuguacauguccaugagcuccuggugcuacacccacagccucgacggcgccgggcuguuccuguucgaccacgccgcggaggaguacgagcacgccaagaagcucaucaucuuccugaacgagaacaacgugcccgugcagcugaccuccaucagcgccccggagcacaaguucgagggccucacgcagaucuuccagaaggccuacgagcacgagcagcacaucuccgagagcaucaacaacaucguggaccacgccaucaaguccaaggaccacgcgaccuucaacuuccugcagugguacgucgccgagcagcacgaggaggaggugcuguucaaggacauccucgacaagaucgagcugaucgggaacgagaaccacggccuguaccucgccgaccaguacgugaaggggaucgccaagagccgcaaguccugaggacuagucccuguucccagagcccacuuuuuuuucuuuuuuugaaauaaaauagccugucuuucagaucucaaaggcucuuuucagagccaccaaaaaaaaaaaaaaaaaaaaaaaaaaaaaaaaaaaaaaaaaaaaaaaaaaaaaaaaaaaaaaaaaaaaaaaaaaaaaaaaaaaaaaaaaaaaaaaaaaaaa

SEQ ID NO: 12370 - RNA, 4412 nt, Artificial Sequence
  SARS-CoV-2/Wuhan/WIV05/2019__EPI_ISL_402128 spike protein mRNA gc (1-1211)(K986P_V987P_T887WN_A1020W) Ferritin construct
aggagagucccgcagucggcguccagcggcucugcuuguucgugugugugucguugcaggccuuauucaagcuuaccauguucguguuccugguccuccugccccuggugagcucccagugcgugaaccucaccacccgcacgcagcugccgcccgccuacaccaacagcuucacccggggcgucuacuaccccgacaagguguuccgcuccagcgugcugcacuccacccaggaccucuuccugcccuucuucagcaacgucacgugguuccacgccauccacguguccgggaccaacggcaccaagcgguucgacaacccggugcugcccuucaacgacggggucuacuucgcgagcaccgagaaguccaacaucauccgcggcuggaucuucgggacgacccucgacagcaagacccagucccugcugaucgugaacaacgccaccaacguggucaucaaggugugcgaguuccaguucugcaacgaccccuuccucggcguguacuaccacaagaacaacaagagcuggauggaguccgaguuccgggucuacagcuccgccaacaacugcacguucgaguacgugagccagcccuuccugauggaccuggagggcaagcaggggaacuucaagaaccuccgcgaguucguguucaagaacaucgacggcuacuucaagaucuacuccaagcacaccccgaucaaccugguccgggaccugccccagggguucagcgcccucgagccccugguggaccugcccaucggcaucaacaucacccgcuuccagacccuccuggcccugcaccgguccuaccucacgccgggggacagcagcuccggcuggaccgcgggcgccgccgccuacuacgugggguaccugcagccccgcaccuuccugcucaaguacaacgagaacggcaccaucacggacgcggucgacugcgcccuggacccccugagcgagaccaagugcacccucaaguccuucaccguggagaaggggaucuaccagacgagcaacuuccgggugcagcccaccgaguccaucguccgcuucccgaacaucaccaaccugugccccuucggcgagguguucaacgccacccgguucgccagcgucuacgccuggaaccgcaagcggaucuccaacugcguggcggacuacagcgugcuguacaacuccgccagcuucuccacguucaagugcuacggcgucagccccaccaagcucaacgaccugugcuucaccaacguguacgccgacuccuucgugauccgcggggacgagguccggcagaucgcccccggccagaccgggaagaucgccgacuacaacuacaagcugccggacgacuucacgggcugcgugaucgcguggaacagcaacaaccucgacuccaaggucgggggcaacuacaacuaccuguaccgccuguuccgcaagagcaaccucaagcccuucgagcgggacaucuccaccgagaucuaccaggccggcagcacccccugcaacgggguggagggcuucaacugcuacuucccccugcaguccuacggguuccagccgaccaacggcgugggguaccagcccuaccggguggucgugcugagcuucgagcuccugcacgcccccgccacggugugcggccccaagaaguccaccaaccuggucaagaacaagugcgugaacuucaacuucaacggccucaccgggaccggcgugcugaccgagagcaacaagaaguuccugccguuccagcaguucgggcgcgacaucgccgacacgaccgacgcgguccgcgacccccagacccuggagauccucgacaucacccccugcagcuucggcgggguguccgugaucacgccgggcaccaacaccagcaaccaggucgccgugcuguaccaggacgugaacugcaccgagguccccguggccauccacgccgaccagcugacgcccaccuggcggguguacuccaccggcagcaacgucuuccagacccgcgccgggugccucaucggcgcggagcacgugaacaacuccuacgagugcgacauccccaucggggccggcaucugcgccagcuaccagacgcagaccaacuccccgcggcgcgcccggagcguggcgucccagagcaucaucgccuacaccaugucccugggcgccgagaacagcgucgccuacuccaacaacagcaucgccauccccaccaacuucacgaucuccgugaccaccgagauccugcccgugagcaugaccaagacgagcgucgacugcaccauguacaucugcggggacuccaccgagugcagcaaccuccugcugcaguacggcuccuucugcacccagcucaaccgcgcgcugacggggaucgccguggagcaggacaagaacacccaggagguguucgcccaggucaagcagaucuacaagacgcccccgaucaaggacuucggcggguucaacuucagccagauccugcccgaccccuccaagcccagcaagcgguccuucaucgaggaccuccuguucaacaaggugacccuggccgacgccggcuucaucaagcaguacggcgacugccucggggacaucgcggcccgcgaccugaucugcgcccagaaguucaacggccugaccgugcucccgccccugcugaccgacgagaugaucgcccaguacaccagcgcccuccuggcggggaccaucacguccggcuggugguucggggccggcgccgcccugcagauccccuucgcgaugcagauggccuaccgguucaacggcaucggggucacccagaacgugcucuacgagaaccagaagcugaucgccaaccaguucaacagcgccaucggcaagauccaggacucccugagcuccaccgccagcgcgcucgggaagcugcaggacguggucaaccagaacgcccaggcccugaacacgcucgugaagcagcuguccagcaacuucggcgccaucuccagcgugcugaacgacauccucucccgccuggacccgcccgaggccgaggugcagaucgaccggcugaucaccgggcgccuccagagccugcagaccuacgugacccagcagcugauccgggcggccgagauccgcuggagcgccaaccucgccgcgaccaagauguccgagugcguccugggccagagcaagcggguggacuucugcggcaagggguaccaccugauguccuucccccagagcgccccgcacggcguggucuuccuccacgugacguacguccccgcccaggagaagaacuucaccaccgcccccgcgaucugccacgacgggaaggcccacuucccccgcgagggcguguucguguccaacgggacccacugguucgucacgcagcggaacuucuacgagccgcagaucaucaccaccgacaacaccuucgugagcggcaacugcgacguggucaucggcaucgugaacaacacgguguacgacccccugcagcccgagcuggacuccuucaaggaggagcucgacaaguacuucaagaaccacaccagccccgacgucgaccugggggacaucuccggcaucaacgccagcguggugaacauccagaaggagaucgaccgccugaacgaggucgccaagaaccucaacgagucccugaucgaccugcaggagcucgggaaguacgagcaguacaucaagggcgggggcgggagcgacaucaucaagcuccugaacgagcaggucaacaaggagaugcaguccagcaaccuguacauguccaugagcuccuggugcuacacccacagccucgacggcgccgggcuguuccuguucgaccacgccgcggaggaguacgagcacgccaagaagcucaucaucuuccugaacgagaacaacgugcccgugcagcugaccuccaucagcgccccggagcacaaguucgagggccucacgcagaucuuccagaaggccuacgagcacgagcagcacaucuccgagagcaucaacaacaucguggaccacgccaucaaguccaaggaccacgcgaccuucaacuuccugcagugguacgucgccgagcagcacgaggaggaggugcuguucaaggacauccucgacaagaucgagcugaucgggaacgagaaccacggccuguaccucgccgaccaguacgugaaggggaucgccaagagccgcaaguccugaggacuagucccuguucccagagcccacuuuuuuuucuuuuuuugaaauaaaauagccugucuuucagaucucaaaggcucuuuucagagccaccaaaaaaaaaaaaaaaaaaaaaaaaaaaaaaaaaaaaaaaaaaaaaaaaaaaaaaaaaaaaaaaaaaaaaaaaaaaaaaaaaaaaaaaaaaaaaaaaaaaaa

SEQ ID NO: 12371 - RNA, 4412 nt, Artificial Sequence
  SARS-CoV-2/Wuhan/WIV05/2019__EPI_ISL_402128 spike protein mRNA gc (1-1211)(K986P_V987P_P1069F) Ferritin construct
aggagagucccgcagucggcguccagcggcucugcuuguucgugugugugucguugcaggccuuauucaagcuuaccauguucguguuccugguccuccugccccuggugagcucccagugcgugaaccucaccacccgcacgcagcugccgcccgccuacaccaacagcuucacccggggcgucuacuaccccgacaagguguuccgcuccagcgugcugcacuccacccaggaccucuuccugcccuucuucagcaacgucacgugguuccacgccauccacguguccgggaccaacggcaccaagcgguucgacaacccggugcugcccuucaacgacggggucuacuucgcgagcaccgagaaguccaacaucauccgcggcuggaucuucgggacgacccucgacagcaagacccagucccugcugaucgugaacaacgccaccaacguggucaucaaggugugcgaguuccaguucugcaacgaccccuuccucggcguguacuaccacaagaacaacaagagcuggauggaguccgaguuccgggucuacagcuccgccaacaacugcacguucgaguacgugagccagcccuuccugauggaccuggagggcaagcaggggaacuucaagaaccuccgcgaguucguguucaagaacaucgacggcuacuucaagaucuacuccaagcacaccccgaucaaccugguccgggaccugccccagggguucagcgcccucgagccccugguggaccugcccaucggcaucaacaucacccgcuuccagacccuccuggcccugcaccgguccuaccucacgccgggggacagcagcuccggcuggaccgcgggcgccgccgccuacuacgugggguaccugcagccccgcaccuuccugcucaaguacaacgagaacggcaccaucacggacgcggucgacugcgcccuggacccccugagcgagaccaagugcacccucaaguccuucaccguggagaaggggaucuaccagacgagcaacuuccgggugcagcccaccgaguccaucguccgcuucccgaacaucaccaaccugugccccuucggcgagguguucaacgccacccgguucgccagcgucuacgccuggaaccgcaagcggaucuccaacugcguggcggacuacagcgugcuguacaacuccgccagcuucuccacguucaagugcuacggcgucagccccaccaagcucaacgaccugugcuucaccaacguguacgccgacuccuucgugauccgcggggacgagguccggcagaucgcccccggccagaccgggaagaucgccgacuacaacuacaagcugccggacgacuucacgggcugcgugaucgcguggaacagcaacaaccucgacuccaaggucgggggcaacuacaacuaccuguaccgccuguuccgcaagagcaaccucaagcccuucgagcgggacaucuccaccgagaucuaccaggccggcagcacccccugcaacgggguggagggcuucaacugcuacuucccccugcaguccuacggguuccagccgaccaacggcgugggguaccagcccuaccggguggucgugcugagcuucgagcuccugcacgcccccgccacggugugcggccccaagaaguccaccaaccuggucaagaacaagugcgugaacuucaacuucaacggccucaccgggaccggcgugcugaccgagagcaacaagaaguuccugccguuccagcaguucgggcgcgacaucgccgacacgaccgacgcgguccgcgacccccagacccuggagauccucgacaucacccccugcagcuucggcgggguguccgugaucacgccgggcaccaacaccagcaaccaggucgccgugcuguaccaggacgugaacugcaccgagguccccguggccauccacgccgaccagcugacgcccaccuggcggguguacuccaccggcagcaacgucuuccagacccgcgccgggugccucaucggcgcggagcacgugaacaacuccuacgagugcgacauccccaucggggccggcaucugcgccagcuaccagacgcagaccaacuccccgcggcgcgcccggagcguggcgucccagagcaucaucgccuacaccaugucccugggcgccgagaacagcgucgccuacuccaacaacagcaucgccauccccaccaacuucacgaucuccgugaccaccgagauccugcccgugagcaugaccaagacgagcgucgacugcaccauguacaucugcggggacuccaccgagugcagcaaccuccugcugcaguacggcuccuucugcacccagcucaaccgcgcgcugacggggaucgccguggagcaggacaagaacacccaggagguguucgcccaggucaagcagaucuacaagacgcccccgaucaaggacuucggcggguucaacuucagccagauccugcccgaccccuccaagcccagcaagcgguccuucaucgaggaccuccuguucaacaaggugacccuggccgacgccggcuucaucaagcaguacggcgacugccucggggacaucgcggcccgcgaccugaucugcgcccagaaguucaacggccugaccgugcucccgccccugcugaccgacgagaugaucgcccaguacaccagcgcccuccuggcggggaccaucacguccggcuggaccuucggggccggcgccgcccugcagauccccuucgcgaugcagauggccuaccgguucaacggcaucggggucacccagaacgugcucuacgagaaccagaagcugaucgccaaccaguucaacagcgccaucggcaagauccaggacucccugagcuccaccgccagcgcgcucgggaagcugcaggacguggucaaccagaacgcccaggcccugaacacgcucgugaagcagcuguccagcaacuucggcgccaucuccagcgugcugaacgacauccucucccgccuggacccgcccgaggccgaggugcagaucgaccggcugaucaccgggcgccuccagagccugcagaccuacgugacccagcagcugauccgggcggccgagauccgcgccagcgccaaccucgccgcgaccaagauguccgagugcguccugggccagagcaagcggguggacuucugcggcaagggguaccaccugauguccuucccccagagcgccccgcacggcguggucuuccuccacgugacguacgucuucgcccaggagaagaacuucaccaccgcccccgcgaucugccacgacgggaaggcccacuucccccgcgagggcguguucguguccaacgggacccacugguucgucacgcagcggaacuucuacgagccgcagaucaucaccaccgacaacaccuucgugagcggcaacugcgacguggucaucggcaucgugaacaacacgguguacgacccccugcagcccgagcuggacuccuucaaggaggagcucgacaaguacuucaagaaccacaccagccccgacgucgaccugggggacaucuccggcaucaacgccagcguggugaacauccagaaggagaucgaccgccugaacgaggucgccaagaaccucaacgagucccugaucgaccugcaggagcucgggaaguacgagcaguacaucaagggcgggggcgggagcgacaucaucaagcuccugaacgagcaggucaacaaggagaugcaguccagcaaccuguacauguccaugagcuccuggugcuacacccacagccucgacggcgccgggcuguuccuguucgaccacgccgcggaggaguacgagcacgccaagaagcucaucaucuuccugaacgagaacaacgugcccgugcagcugaccuccaucagcgccccggagcacaaguucgagggccucacgcagaucuuccagaaggccuacgagcacgagcagcacaucuccgagagcaucaacaacaucguggaccacgccaucaaguccaaggaccacgcgaccuucaacuuccugcagugguacgucgccgagcagcacgaggaggaggugcuguucaaggacauccucgacaagaucgagcugaucgggaacgagaaccacggccuguaccucgccgaccaguacgugaaggggaucgccaagagccgcaaguccugaggacuagucccuguucccagagcccacuuuuuuuucuuuuuuugaaauaaaauagccugucuuucagaucucaaaggcucuuuucagagccaccaaaaaaaaaaaaaaaaaaaaaaaaaaaaaaaaaaaaaaaaaaaaaaaaaaaaaaaaaaaaaaaaaaaaaaaaaaaaaaaaaaaaaaaaaaaaaaaaaaaaa

SEQ ID NO: 12372 - RNA, 4412 nt, Artificial Sequence
  SARS-CoV-2/Wuhan/WIV05/2019__EPI_ISL_402128 spike protein mRNA gc (1-1211)(K986P_V987P_ H1048Q_H1064N_ H1083N_H1101N) Ferritin construct
aggagagucccgcagucggcguccagcggcucugcuuguucgugugugugucguugcaggccuuauucaagcuuaccauguucguguuccugguccuccugccccuggugagcucccagugcgugaaccucaccacccgcacgcagcugccgcccgccuacaccaacagcuucacccggggcgucuacuaccccgacaagguguuccgcuccagcgugcugcacuccacccaggaccucuuccugcccuucuucagcaacgucacgugguuccacgccauccacguguccgggaccaacggcaccaagcgguucgacaacccggugcugcccuucaacgacggggucuacuucgcgagcaccgagaaguccaacaucauccgcggcuggaucuucgggacgacccucgacagcaagacccagucccugcugaucgugaacaacgccaccaacguggucaucaaggugugcgaguuccaguucugcaacgaccccuuccucggcguguacuaccacaagaacaacaagagcuggauggaguccgaguuccgggucuacagcuccgccaacaacugcacguucgaguacgugagccagcccuuccugauggaccuggagggcaagcaggggaacuucaagaaccuccgcgaguucguguucaagaacaucgacggcuacuucaagaucuacuccaagcacaccccgaucaaccugguccgggaccugccccagggguucagcgcccucgagccccugguggaccugcccaucggcaucaacaucacccgcuuccagacccuccuggcccugcaccgguccuaccucacgccgggggacagcagcuccggcuggaccgcgggcgccgccgccuacuacgugggguaccugcagccccgcaccuuccugcucaaguacaacgagaacggcaccaucacggacgcggucgacugcgcccuggacccccugagcgagaccaagugcacccucaaguccuucaccguggagaaggggaucuaccagacgagcaacuuccgggugcagcccaccgaguccaucguccgcuucccgaacaucaccaaccugugccccuucggcgagguguucaacgccacccgguucgccagcgucuacgccuggaaccgcaagcggaucuccaacugcguggcggacuacagcgugcuguacaacuccgccagcuucuccacguucaagugcuacggcgucagccccaccaagcucaacgaccugugcuucaccaacguguacgccgacuccuucgugauccgcggggacgagguccggcagaucgcccccggccagaccgggaagaucgccgacuacaacuacaagcugccggacgacuucacgggcugcgugaucgcguggaacagcaacaaccucgacuccaaggucgggggcaacuacaacuaccuguaccgccuguuccgcaagagcaaccucaagcccuucgagcgggacaucuccaccgagaucuaccaggccggcagcacccccugcaacgggguggagggcuucaacugcuacuucccccugcaguccuacggguuccagccgaccaacggcgugggguaccagcccuaccggguggucgugcugagcuucgagcuccugcacgcccccgccacggugugcggccccaagaaguccaccaaccuggucaagaacaagugcgugaacuucaacuucaacggccucaccgggaccggcgugcugaccgagagcaacaagaaguuccugccguuccagcaguucgggcgcgacaucgccgacacgaccgacgcgguccgcgacccccagacccuggagauccucgacaucacccccugcagcuucggcgggguguccgugaucacgccgggcaccaacaccagcaaccaggucgccgugcuguaccaggacgugaacugcaccgagguccccguggccauccacgccgaccagcugacgcccaccuggcggguguacuccaccggcagcaacgucuuccagacccgcgccgggugccucaucggcgcggagcacgugaacaacuccuacgagugcgacauccccaucggggccggcaucugcgccagcuaccagacgcagaccaacuccccgcggcgcgcccggagcguggcgucccagagcaucaucgccuacaccaugucccugggcgccgagaacagcgucgccuacuccaacaacagcaucgccauccccaccaacuucacgaucuccgugaccaccgagauccugcccgugagcaugaccaagacgagcgucgacugcaccauguacaucugcggggacuccaccgagugcagcaaccuccugcugcaguacggcuccuucugcacccagcucaaccgcgcgcugacggggaucgccguggagcaggacaagaacacccaggagguguucgcccaggucaagcagaucuacaagacgcccccgaucaaggacuucggcggguucaacuucagccagauccugcccgaccccuccaagcccagcaagcgguccuucaucgaggaccuccuguucaacaaggugacccuggccgacgccggcuucaucaagcaguacggcgacugccucggggacaucgcggcccgcgaccugaucugcgcccagaaguucaacggccugaccgugcucccgccccugcugaccgacgagaugaucgcccaguacaccagcgcccuccuggcggggaccaucacguccggcuggaccuucggggccggcgccgcccugcagauccccuucgcgaugcagauggccuaccgguucaacggcaucggggucacccagaacgugcucuacgagaaccagaagcugaucgccaaccaguucaacagcgccaucggcaagauccaggacucccugagcuccaccgccagcgcgcucgggaagcugcaggacguggucaaccagaacgcccaggcccugaacacgcucgugaagcagcuguccagcaacuucggcgccaucuccagcgugcugaacgacauccucucccgccuggacccgcccgaggccgaggugcagaucgaccggcugaucaccgggcgccuccagagccugcagaccuacgugacccagcagcugauccgggcggccgagauccgcgccagcgccaaccucgccgcgaccaagauguccgagugcguccugggccagagcaagcggguggacuucugcggcaagggguaccagcugauguccuucccccagagcgccccgcacggcguggucuuccucaacgugacguacguccccgcccaggagaagaacuucaccaccgcccccgcgaucugcaacgacgggaaggcccacuucccccgcgagggcguguucguguccaacgggaccaacugguucgucacgcagcggaacuucuacgagccgcagaucaucaccaccgacaacaccuucgugagcggcaacugcgacguggucaucggcaucgugaacaacacgguguacgacccccugcagcccgagcuggacuccuucaaggaggagcucgacaaguacuucaagaaccacaccagccccgacgucgaccugggggacaucuccggcaucaacgccagcguggugaacauccagaaggagaucgaccgccugaacgaggucgccaagaaccucaacgagucccugaucgaccugcaggagcucgggaaguacgagcaguacaucaagggcgggggcgggagcgacaucaucaagcuccugaacgagcaggucaacaaggagaugcaguccagcaaccuguacauguccaugagcuccuggugcuacacccacagccucgacggcgccgggcuguuccuguucgaccacgccgcggaggaguacgagcacgccaagaagcucaucaucuuccugaacgagaacaacgugcccgugcagcugaccuccaucagcgccccggagcacaaguucgagggccucacgcagaucuuccagaaggccuacgagcacgagcagcacaucuccgagagcaucaacaacaucguggaccacgccaucaaguccaaggaccacgcgaccuucaacuuccugcagugguacgucgccgagcagcacgaggaggaggugcuguucaaggacauccucgacaagaucgagcugaucgggaacgagaaccacggccuguaccucgccgaccaguacgugaaggggaucgccaagagccgcaaguccugaggacuagucccuguucccagagcccacuuuuuuuucuuuuuuugaaauaaaauagccugucuuucagaucucaaaggcucuuuucagagccaccaaaaaaaaaaaaaaaaaaaaaaaaaaaaaaaaaaaaaaaaaaaaaaaaaaaaaaaaaaaaaaaaaaaaaaaaaaaaaaaaaaaaaaaaaaaaaaaaaaaaa

SEQ ID NO: 12373 - RNA, 4412 nt, Artificial Sequence
  SARS-CoV-2/Wuhan/WIV05/2019__EPI_ISL_402128 spike protein mRNA gc (1-1211)(I712C_T1077C) Ferritin construct
aggagagucccgcagucggcguccagcggcucugcuuguucgugugugugucguugcaggccuuauucaagcuuaccauguucguguuccugguccuccugccccuggugagcucccagugcgugaaccucaccacccgcacgcagcugccgcccgccuacaccaacagcuucacccggggcgucuacuaccccgacaagguguuccgcuccagcgugcugcacuccacccaggaccucuuccugcccuucuucagcaacgucacgugguuccacgccauccacguguccgggaccaacggcaccaagcgguucgacaacccggugcugcccuucaacgacggggucuacuucgcgagcaccgagaaguccaacaucauccgcggcuggaucuucgggacgacccucgacagcaagacccagucccugcugaucgugaacaacgccaccaacguggucaucaaggugugcgaguuccaguucugcaacgaccccuuccucggcguguacuaccacaagaacaacaagagcuggauggaguccgaguuccgggucuacagcuccgccaacaacugcacguucgaguacgugagccagcccuuccugauggaccuggagggcaagcaggggaacuucaagaaccuccgcgaguucguguucaagaacaucgacggcuacuucaagaucuacuccaagcacaccccgaucaaccugguccgggaccugccccagggguucagcgcccucgagccccugguggaccugcccaucggcaucaacaucacccgcuuccagacccuccuggcccugcaccgguccuaccucacgccgggggacagcagcuccggcuggaccgcgggcgccgccgccuacuacgugggguaccugcagccccgcaccuuccugcucaaguacaacgagaacggcaccaucacggacgcggucgacugcgcccuggacccccugagcgagaccaagugcacccucaaguccuucaccguggagaaggggaucuaccagacgagcaacuuccgggugcagcccaccgaguccaucguccgcuucccgaacaucaccaaccugugccccuucggcgagguguucaacgccacccgguucgccagcgucuacgccuggaaccgcaagcggaucuccaacugcguggcggacuacagcgugcuguacaacuccgccagcuucuccacguucaagugcuacggcgucagccccaccaagcucaacgaccugugcuucaccaacguguacgccgacuccuucgugauccgcggggacgagguccggcagaucgcccccggccagaccgggaagaucgccgacuacaacuacaagcugccggacgacuucacgggcugcgugaucgcguggaacagcaacaaccucgacuccaaggucgggggcaacuacaacuaccuguaccgccuguuccgcaagagcaaccucaagcccuucgagcgggacaucuccaccgagaucuaccaggccggcagcacccccugcaacgggguggagggcuucaacugcuacuucccccugcaguccuacggguuccagccgaccaacggcgugggguaccagcccuaccggguggucgugcugagcuucgagcuccugcacgcccccgccacggugugcggccccaagaaguccaccaaccuggucaagaacaagugcgugaacuucaacuucaacggccucaccgggaccggcgugcugaccgagagcaacaagaaguuccugccguuccagcaguucgggcgcgacaucgccgacacgaccgacgcgguccgcgacccccagacccuggagauccucgacaucacccccugcagcuucggcgggguguccgugaucacgccgggcaccaacaccagcaaccaggucgccgugcuguaccaggacgugaacugcaccgagguccccguggccauccacgccgaccagcugacgcccaccuggcggguguacuccaccggcagcaacgucuuccagacccgcgccgggugccucaucggcgcggagcacgugaacaacuccuacgagugcgacauccccaucggggccggcaucugcgccagcuaccagacgcagaccaacuccccgcggcgcgcccggagcguggcgucccagagcaucaucgccuacaccaugucccugggcgccgagaacagcgucgccuacuccaacaacagcugcgccauccccaccaacuucacgaucuccgugaccaccgagauccugcccgugagcaugaccaagacgagcgucgacugcaccauguacaucugcggggacuccaccgagugcagcaaccuccugcugcaguacggcuccuucugcacccagcucaaccgcgcgcugacggggaucgccguggagcaggacaagaacacccaggagguguucgcccaggucaagcagaucuacaagacgcccccgaucaaggacuucggcggguucaacuucagccagauccugcccgaccccuccaagcccagcaagcgguccuucaucgaggaccuccuguucaacaaggugacccuggccgacgccggcuucaucaagcaguacggcgacugccucggggacaucgcggcccgcgaccugaucugcgcccagaaguucaacggccugaccgugcucccgccccugcugaccgacgagaugaucgcccaguacaccagcgcccuccuggcggggaccaucacguccggcuggaccuucggggccggcgccgcccugcagauccccuucgcgaugcagauggccuaccgguucaacggcaucggggucacccagaacgugcucuacgagaaccagaagcugaucgccaaccaguucaacagcgccaucggcaagauccaggacucccugagcuccaccgccagcgcgcucgggaagcugcaggacguggucaaccagaacgcccaggcccugaacacgcucgugaagcagcuguccagcaacuucggcgccaucuccagcgugcugaacgacauccucucccgccuggacaaggucgaggccgaggugcagaucgaccggcugaucaccgggcgccuccagagccugcagaccuacgugacccagcagcugauccgggcggccgagauccgcgccagcgccaaccucgccgcgaccaagauguccgagugcguccugggccagagcaagcggguggacuucugcggcaagggguaccaccugauguccuucccccagagcgccccgcacggcguggucuuccuccacgugacguacguccccgcccaggagaagaacuucaccugcgcccccgcgaucugccacgacgggaaggcccacuucccccgcgagggcguguucguguccaacgggacccacugguucgucacgcagcggaacuucuacgagccgcagaucaucaccaccgacaacaccuucgugagcggcaacugcgacguggucaucggcaucgugaacaacacgguguacgacccccugcagcccgagcuggacuccuucaaggaggagcucgacaaguacuucaagaaccacaccagccccgacgucgaccugggggacaucuccggcaucaacgccagcguggugaacauccagaaggagaucgaccgccugaacgaggucgccaagaaccucaacgagucccugaucgaccugcaggagcucgggaaguacgagcaguacaucaagggcgggggcgggagcgacaucaucaagcuccugaacgagcaggucaacaaggagaugcaguccagcaaccuguacauguccaugagcuccuggugcuacacccacagccucgacggcgccgggcuguuccuguucgaccacgccgcggaggaguacgagcacgccaagaagcucaucaucuuccugaacgagaacaacgugcccgugcagcugaccuccaucagcgccccggagcacaaguucgagggccucacgcagaucuuccagaaggccuacgagcacgagcagcacaucuccgagagcaucaacaacaucguggaccacgccaucaaguccaaggaccacgcgaccuucaacuuccugcagugguacgucgccgagcagcacgaggaggaggugcuguucaaggacauccucgacaagaucgagcugaucgggaacgagaaccacggccuguaccucgccgaccaguacgugaaggggaucgccaagagccgcaaguccugaggacuagucccuguucccagagcccacuuuuuuuucuuuuuuugaaauaaaauagccugucuuucagaucucaaaggcucuuuucagagccaccaaaaaaaaaaaaaaaaaaaaaaaaaaaaaaaaaaaaaaaaaaaaaaaaaaaaaaaaaaaaaaaaaaaaaaaaaaaaaaaaaaaaaaaaaaaaaaaaaaaaa

SEQ ID NO: 12374 - RNA, 4412 nt, Artificial Sequence
  SARS-CoV-2/Wuhan/WIV05/2019__EPI_ISL_402128 spike protein mRNA gc (1-1211)(I714C_Y1110C) Ferritin construct
aggagagucccgcagucggcguccagcggcucugcuuguucgugugugugucguugcaggccuuauucaagcuuaccauguucguguuccugguccuccugccccuggugagcucccagugcgugaaccucaccacccgcacgcagcugccgcccgccuacaccaacagcuucacccggggcgucuacuaccccgacaagguguuccgcuccagcgugcugcacuccacccaggaccucuuccugcccuucuucagcaacgucacgugguuccacgccauccacguguccgggaccaacggcaccaagcgguucgacaacccggugcugcccuucaacgacggggucuacuucgcgagcaccgagaaguccaacaucauccgcggcuggaucuucgggacgacccucgacagcaagacccagucccugcugaucgugaacaacgccaccaacguggucaucaaggugugcgaguuccaguucugcaacgaccccuuccucggcguguacuaccacaagaacaacaagagcuggauggaguccgaguuccgggucuacagcuccgccaacaacugcacguucgaguacgugagccagcccuuccugauggaccuggagggcaagcaggggaacuucaagaaccuccgcgaguucguguucaagaacaucgacggcuacuucaagaucuacuccaagcacaccccgaucaaccugguccgggaccugccccagggguucagcgcccucgagccccugguggaccugcccaucggcaucaacaucacccgcuuccagacccuccuggcccugcaccgguccuaccucacgccgggggacagcagcuccggcuggaccgcgggcgccgccgccuacuacgugggguaccugcagccccgcaccuuccugcucaaguacaacgagaacggcaccaucacggacgcggucgacugcgcccuggacccccugagcgagaccaagugcacccucaaguccuucaccguggagaaggggaucuaccagacgagcaacuuccgggugcagcccaccgaguccaucguccgcuucccgaacaucaccaaccugugccccuucggcgagguguucaacgccacccgguucgccagcgucuacgccuggaaccgcaagcggaucuccaacugcguggcggacuacagcgugcuguacaacuccgccagcuucuccacguucaagugcuacggcgucagccccaccaagcucaacgaccugugcuucaccaacguguacgccgacuccuucgugauccgcggggacgagguccggcagaucgcccccggccagaccgggaagaucgccgacuacaacuacaagcugccggacgacuucacgggcugcgugaucgcguggaacagcaacaaccucgacuccaaggucgggggcaacuacaacuaccuguaccgccuguuccgcaagagcaaccucaagcccuucgagcgggacaucuccaccgagaucuaccaggccggcagcacccccugcaacgggguggagggcuucaacugcuacuucccccugcaguccuacggguuccagccgaccaacggcgugggguaccagcccuaccggguggucgugcugagcuucgagcuccugcacgcccccgccacggugugcggccccaagaaguccaccaaccuggucaagaacaagugcgugaacuucaacuucaacggccucaccgggaccggcgugcugaccgagagcaacaagaaguuccugccguuccagcaguucgggcgcgacaucgccgacacgaccgacgcgguccgcgacccccagacccuggagauccucgacaucacccccugcagcuucggcgggguguccgugaucacgccgggcaccaacaccagcaaccaggucgccgugcuguaccaggacgugaacugcaccgagguccccguggccauccacgccgaccagcugacgcccaccuggcggguguacuccaccggcagcaacgucuuccagacccgcgccgggugccucaucggcgcggagcacgugaacaacuccuacgagugcgacauccccaucggggccggcaucugcgccagcuaccagacgcagaccaacuccccgcggcgcgcccggagcguggcgucccagagcaucaucgccuacaccaugucccugggcgccgagaacagcgucgccuacuccaacaacagcaucgccugccccaccaacuucacgaucuccgugaccaccgagauccugcccgugagcaugaccaagacgagcgucgacugcaccauguacaucugcggggacuccaccgagugcagcaaccuccugcugcaguacggcuccuucugcacccagcucaaccgcgcgcugacggggaucgccguggagcaggacaagaacacccaggagguguucgcccaggucaagcagaucuacaagacgcccccgaucaaggacuucggcggguucaacuucagccagauccugcccgaccccuccaagcccagcaagcgguccuucaucgaggaccuccuguucaacaaggugacccuggccgacgccggcuucaucaagcaguacggcgacugccucggggacaucgcggcccgcgaccugaucugcgcccagaaguucaacggccugaccgugcucccgccccugcugaccgacgagaugaucgcccaguacaccagcgcccuccuggcggggaccaucacguccggcuggaccuucggggccggcgccgcccugcagauccccuucgcgaugcagauggccuaccgguucaacggcaucggggucacccagaacgugcucuacgagaaccagaagcugaucgccaaccaguucaacagcgccaucggcaagauccaggacucccugagcuccaccgccagcgcgcucgggaagcugcaggacguggucaaccagaacgcccaggcccugaacacgcucgugaagcagcuguccagcaacuucggcgccaucuccagcgugcugaacgacauccucucccgccuggacaaggucgaggccgaggugcagaucgaccggcugaucaccgggcgccuccagagccugcagaccuacgugacccagcagcugauccgggcggccgagauccgcgccagcgccaaccucgccgcgaccaagauguccgagugcguccugggccagagcaagcggguggacuucugcggcaagggguaccaccugauguccuucccccagagcgccccgcacggcguggucuuccuccacgugacguacguccccgcccaggagaagaacuucaccaccgcccccgcgaucugccacgacgggaaggcccacuucccccgcgagggcguguucguguccaacgggacccacugguucgucacgcagcggaacuucugcgagccgcagaucaucaccaccgacaacaccuucgugagcggcaacugcgacguggucaucggcaucgugaacaacacgguguacgacccccugcagcccgagcuggacuccuucaaggaggagcucgacaaguacuucaagaaccacaccagccccgacgucgaccugggggacaucuccggcaucaacgccagcguggugaacauccagaaggagaucgaccgccugaacgaggucgccaagaaccucaacgagucccugaucgaccugcaggagcucgggaaguacgagcaguacaucaagggcgggggcgggagcgacaucaucaagcuccugaacgagcaggucaacaaggagaugcaguccagcaaccuguacauguccaugagcuccuggugcuacacccacagccucgacggcgccgggcuguuccuguucgaccacgccgcggaggaguacgagcacgccaagaagcucaucaucuuccugaacgagaacaacgugcccgugcagcugaccuccaucagcgccccggagcacaaguucgagggccucacgcagaucuuccagaaggccuacgagcacgagcagcacaucuccgagagcaucaacaacaucguggaccacgccaucaaguccaaggaccacgcgaccuucaacuuccugcagugguacgucgccgagcagcacgaggaggaggugcuguucaaggacauccucgacaagaucgagcugaucgggaacgagaaccacggccuguaccucgccgaccaguacgugaaggggaucgccaagagccgcaaguccugaggacuagucccuguucccagagcccacuuuuuuuucuuuuuuugaaauaaaauagccugucuuucagaucucaaaggcucuuuucagagccaccaaaaaaaaaaaaaaaaaaaaaaaaaaaaaaaaaaaaaaaaaaaaaaaaaaaaaaaaaaaaaaaaaaaaaaaaaaaaaaaaaaaaaaaaaaaaaaaaaaaaa

SEQ ID NO: 12375 - RNA, 4412 nt, Artificial Sequence
  SARS-CoV-2/Wuhan/WIV05/2019__EPI_ISL_402128 spike protein mRNA gc (1-1211)(P715C_P1069C) Ferritin construct
aggagagucccgcagucggcguccagcggcucugcuuguucgugugugugucguugcaggccuuauucaagcuuaccauguucguguuccugguccuccugccccuggugagcucccagugcgugaaccucaccacccgcacgcagcugccgcccgccuacaccaacagcuucacccggggcgucuacuaccccgacaagguguuccgcuccagcgugcugcacuccacccaggaccucuuccugcccuucuucagcaacgucacgugguuccacgccauccacguguccgggaccaacggcaccaagcgguucgacaacccggugcugcccuucaacgacggggucuacuucgcgagcaccgagaaguccaacaucauccgcggcuggaucuucgggacgacccucgacagcaagacccagucccugcugaucgugaacaacgccaccaacguggucaucaaggugugcgaguuccaguucugcaacgaccccuuccucggcguguacuaccacaagaacaacaagagcuggauggaguccgaguuccgggucuacagcuccgccaacaacugcacguucgaguacgugagccagcccuuccugauggaccuggagggcaagcaggggaacuucaagaaccuccgcgaguucguguucaagaacaucgacggcuacuucaagaucuacuccaagcacaccccgaucaaccugguccgggaccugccccagggguucagcgcccucgagccccugguggaccugcccaucggcaucaacaucacccgcuuccagacccuccuggcccugcaccgguccuaccucacgccgggggacagcagcuccggcuggaccgcgggcgccgccgccuacuacgugggguaccugcagccccgcaccuuccugcucaaguacaacgagaacggcaccaucacggacgcggucgacugcgcccuggacccccugagcgagaccaagugcacccucaaguccuucaccguggagaaggggaucuaccagacgagcaacuuccgggugcagcccaccgaguccaucguccgcuucccgaacaucaccaaccugugccccuucggcgagguguucaacgccacccgguucgccagcgucuacgccuggaaccgcaagcggaucuccaacugcguggcggacuacagcgugcuguacaacuccgccagcuucuccacguucaagugcuacggcgucagccccaccaagcucaacgaccugugcuucaccaacguguacgccgacuccuucgugauccgcggggacgagguccggcagaucgcccccggccagaccgggaagaucgccgacuacaacuacaagcugccggacgacuucacgggcugcgugaucgcguggaacagcaacaaccucgacuccaaggucgggggcaacuacaacuaccuguaccgccuguuccgcaagagcaaccucaagcccuucgagcgggacaucuccaccgagaucuaccaggccggcagcacccccugcaacgggguggagggcuucaacugcuacuucccccugcaguccuacggguuccagccgaccaacggcgugggguaccagcccuaccggguggucgugcugagcuucgagcuccugcacgcccccgccacggugugcggccccaagaaguccaccaaccuggucaagaacaagugcgugaacuucaacuucaacggccucaccgggaccggcgugcugaccgagagcaacaagaaguuccugccguuccagcaguucgggcgcgacaucgccgacacgaccgacgcgguccgcgacccccagacccuggagauccucgacaucacccccugcagcuucggcgggguguccgugaucacgccgggcaccaacaccagcaaccaggucgccgugcuguaccaggacgugaacugcaccgagguccccguggccauccacgccgaccagcugacgcccaccuggcggguguacuccaccggcagcaacgucuuccagacccgcgccgggugccucaucggcgcggagcacgugaacaacuccuacgagugcgacauccccaucggggccggcaucugcgccagcuaccagacgcagaccaacuccccgcggcgcgcccggagcguggcgucccagagcaucaucgccuacaccaugucccugggcgccgagaacagcgucgccuacuccaacaacagcaucgccaucugcaccaacuucacgaucuccgugaccaccgagauccugcccgugagcaugaccaagacgagcgucgacugcaccauguacaucugcggggacuccaccgagugcagcaaccuccugcugcaguacggcuccuucugcacccagcucaaccgcgcgcugacggggaucgccguggagcaggacaagaacacccaggagguguucgcccaggucaagcagaucuacaagacgcccccgaucaaggacuucggcggguucaacuucagccagauccugcccgaccccuccaagcccagcaagcgguccuucaucgaggaccuccuguucaacaaggugacccuggccgacgccggcuucaucaagcaguacggcgacugccucggggacaucgcggcccgcgaccugaucugcgcccagaaguucaacggccugaccgugcucccgccccugcugaccgacgagaugaucgcccaguacaccagcgcccuccuggcggggaccaucacguccggcuggaccuucggggccggcgccgcccugcagauccccuucgcgaugcagauggccuaccgguucaacggcaucggggucacccagaacgugcucuacgagaaccagaagcugaucgccaaccaguucaacagcgccaucggcaagauccaggacucccugagcuccaccgccagcgcgcucgggaagcugcaggacguggucaaccagaacgcccaggcccugaacacgcucgugaagcagcuguccagcaacuucggcgccaucuccagcgugcugaacgacauccucucccgccuggacaaggucgaggccgaggugcagaucgaccggcugaucaccgggcgccuccagagccugcagaccuacgugacccagcagcugauccgggcggccgagauccgcgccagcgccaaccucgccgcgaccaagauguccgagugcguccugggccagagcaagcggguggacuucugcggcaagggguaccaccugauguccuucccccagagcgccccgcacggcguggucuuccuccacgugacguacgucugcgcccaggagaagaacuucaccaccgcccccgcgaucugccacgacgggaaggcccacuucccccgcgagggcguguucguguccaacgggacccacugguucgucacgcagcggaacuucuacgagccgcagaucaucaccaccgacaacaccuucgugagcggcaacugcgacguggucaucggcaucgugaacaacacgguguacgacccccugcagcccgagcuggacuccuucaaggaggagcucgacaaguacuucaagaaccacaccagccccgacgucgaccugggggacaucuccggcaucaacgccagcguggugaacauccagaaggagaucgaccgccugaacgaggucgccaagaaccucaacgagucccugaucgaccugcaggagcucgggaaguacgagcaguacaucaagggcgggggcgggagcgacaucaucaagcuccugaacgagcaggucaacaaggagaugcaguccagcaaccuguacauguccaugagcuccuggugcuacacccacagccucgacggcgccgggcuguuccuguucgaccacgccgcggaggaguacgagcacgccaagaagcucaucaucuuccugaacgagaacaacgugcccgugcagcugaccuccaucagcgccccggagcacaaguucgagggccucacgcagaucuuccagaaggccuacgagcacgagcagcacaucuccgagagcaucaacaacaucguggaccacgccaucaaguccaaggaccacgcgaccuucaacuuccugcagugguacgucgccgagcagcacgaggaggaggugcuguucaaggacauccucgacaagaucgagcugaucgggaacgagaaccacggccuguaccucgccgaccaguacgugaaggggaucgccaagagccgcaaguccugaggacuagucccuguucccagagcccacuuuuuuuucuuuuuuugaaauaaaauagccugucuuucagaucucaaaggcucuuuucagagccaccaaaaaaaaaaaaaaaaaaaaaaaaaaaaaaaaaaaaaaaaaaaaaaaaaaaaaaaaaaaaaaaaaaaaaaaaaaaaaaaaaaaaaaaaaaaaaaaaaaaaa

SEQ ID NO: 12376 - RNA, 4412 nt, Artificial Sequence
  SARS-CoV-2/Wuhan/WIV05/2019__EPI_ISL_402128 spike protein mRNA gc (1-1211)(G889C_L1034C) Ferritin construct
aggagagucccgcagucggcguccagcggcucugcuuguucgugugugugucguugcaggccuuauucaagcuuaccauguucguguuccugguccuccugccccuggugagcucccagugcgugaaccucaccacccgcacgcagcugccgcccgccuacaccaacagcuucacccggggcgucuacuaccccgacaagguguuccgcuccagcgugcugcacuccacccaggaccucuuccugcccuucuucagcaacgucacgugguuccacgccauccacguguccgggaccaacggcaccaagcgguucgacaacccggugcugcccuucaacgacggggucuacuucgcgagcaccgagaaguccaacaucauccgcggcuggaucuucgggacgacccucgacagcaagacccagucccugcugaucgugaacaacgccaccaacguggucaucaaggugugcgaguuccaguucugcaacgaccccuuccucggcguguacuaccacaagaacaacaagagcuggauggaguccgaguuccgggucuacagcuccgccaacaacugcacguucgaguacgugagccagcccuuccugauggaccuggagggcaagcaggggaacuucaagaaccuccgcgaguucguguucaagaacaucgacggcuacuucaagaucuacuccaagcacaccccgaucaaccugguccgggaccugccccagggguucagcgcccucgagccccugguggaccugcccaucggcaucaacaucacccgcuuccagacccuccuggcccugcaccgguccuaccucacgccgggggacagcagcuccggcuggaccgcgggcgccgccgccuacuacgugggguaccugcagccccgcaccuuccugcucaaguacaacgagaacggcaccaucacggacgcggucgacugcgcccuggacccccugagcgagaccaagugcacccucaaguccuucaccguggagaaggggaucuaccagacgagcaacuuccgggugcagcccaccgaguccaucguccgcuucccgaacaucaccaaccugugccccuucggcgagguguucaacgccacccgguucgccagcgucuacgccuggaaccgcaagcggaucuccaacugcguggcggacuacagcgugcuguacaacuccgccagcuucuccacguucaagugcuacggcgucagccccaccaagcucaacgaccugugcuucaccaacguguacgccgacuccuucgugauccgcggggacgagguccggcagaucgcccccggccagaccgggaagaucgccgacuacaacuacaagcugccggacgacuucacgggcugcgugaucgcguggaacagcaacaaccucgacuccaaggucgggggcaacuacaacuaccuguaccgccuguuccgcaagagcaaccucaagcccuucgagcgggacaucuccaccgagaucuaccaggccggcagcacccccugcaacgggguggagggcuucaacugcuacuucccccugcaguccuacggguuccagccgaccaacggcgugggguaccagcccuaccggguggucgugcugagcuucgagcuccugcacgcccccgccacggugugcggccccaagaaguccaccaaccuggucaagaacaagugcgugaacuucaacuucaacggccucaccgggaccggcgugcugaccgagagcaacaagaaguuccugccguuccagcaguucgggcgcgacaucgccgacacgaccgacgcgguccgcgacccccagacccuggagauccucgacaucacccccugcagcuucggcgggguguccgugaucacgccgggcaccaacaccagcaaccaggucgccgugcuguaccaggacgugaacugcaccgagguccccguggccauccacgccgaccagcugacgcccaccuggcggguguacuccaccggcagcaacgucuuccagacccgcgccgggugccucaucggcgcggagcacgugaacaacuccuacgagugcgacauccccaucggggccggcaucugcgccagcuaccagacgcagaccaacuccccgcggcgcgcccggagcguggcgucccagagcaucaucgccuacaccaugucccugggcgccgagaacagcgucgccuacuccaacaacagcaucgccauccccaccaacuucacgaucuccgugaccaccgagauccugcccgugagcaugaccaagacgagcgucgacugcaccauguacaucugcggggacuccaccgagugcagcaaccuccugcugcaguacggcuccuucugcacccagcucaaccgcgcgcugacggggaucgccguggagcaggacaagaacacccaggagguguucgcccaggucaagcagaucuacaagacgcccccgaucaaggacuucggcggguucaacuucagccagauccugcccgaccccuccaagcccagcaagcgguccuucaucgaggaccuccuguucaacaaggugacccuggccgacgccggcuucaucaagcaguacggcgacugccucggggacaucgcggcccgcgaccugaucugcgcccagaaguucaacggccugaccgugcucccgccccugcugaccgacgagaugaucgcccaguacaccagcgcccuccuggcggggaccaucacguccggcuggaccuucugcgccggcgccgcccugcagauccccuucgcgaugcagauggccuaccgguucaacggcaucggggucacccagaacgugcucuacgagaaccagaagcugaucgccaaccaguucaacagcgccaucggcaagauccaggacucccugagcuccaccgccagcgcgcucgggaagcugcaggacguggucaaccagaacgcccaggcccugaacacgcucgugaagcagcuguccagcaacuucggcgccaucuccagcgugcugaacgacauccucucccgccuggacaaggucgaggccgaggugcagaucgaccggcugaucaccgggcgccuccagagccugcagaccuacgugacccagcagcugauccgggcggccgagauccgcgccagcgccaaccucgccgcgaccaagauguccgagugcgucugcggccagagcaagcggguggacuucugcggcaagggguaccaccugauguccuucccccagagcgccccgcacggcguggucuuccuccacgugacguacguccccgcccaggagaagaacuucaccaccgcccccgcgaucugccacgacgggaaggcccacuucccccgcgagggcguguucguguccaacgggacccacugguucgucacgcagcggaacuucuacgagccgcagaucaucaccaccgacaacaccuucgugagcggcaacugcgacguggucaucggcaucgugaacaacacgguguacgacccccugcagcccgagcuggacuccuucaaggaggagcucgacaaguacuucaagaaccacaccagccccgacgucgaccugggggacaucuccggcaucaacgccagcguggugaacauccagaaggagaucgaccgccugaacgaggucgccaagaaccucaacgagucccugaucgaccugcaggagcucgggaaguacgagcaguacaucaagggcgggggcgggagcgacaucaucaagcuccugaacgagcaggucaacaaggagaugcaguccagcaaccuguacauguccaugagcuccuggugcuacacccacagccucgacggcgccgggcuguuccuguucgaccacgccgcggaggaguacgagcacgccaagaagcucaucaucuuccugaacgagaacaacgugcccgugcagcugaccuccaucagcgccccggagcacaaguucgagggccucacgcagaucuuccagaaggccuacgagcacgagcagcacaucuccgagagcaucaacaacaucguggaccacgccaucaaguccaaggaccacgcgaccuucaacuuccugcagugguacgucgccgagcagcacgaggaggaggugcuguucaaggacauccucgacaagaucgagcugaucgggaacgagaaccacggccuguaccucgccgaccaguacgugaaggggaucgccaagagccgcaaguccugaggacuagucccuguucccagagcccacuuuuuuuucuuuuuuugaaauaaaauagccugucuuucagaucucaaaggcucuuuucagagccaccaaaaaaaaaaaaaaaaaaaaaaaaaaaaaaaaaaaaaaaaaaaaaaaaaaaaaaaaaaaaaaaaaaaaaaaaaaaaaaaaaaaaaaaaaaaaaaaaaaaaa

SEQ ID NO: 12377 - RNA, 4412 nt, Artificial Sequence
  SARS-CoV-2/Wuhan/WIV05/2019__EPI_ISL_402128 spike protein mRNA gc (1-1211)(I909C_Y1047C) Ferritin construct
aggagagucccgcagucggcguccagcggcucugcuuguucgugugugugucguugcaggccuuauucaagcuuaccauguucguguuccugguccuccugccccuggugagcucccagugcgugaaccucaccacccgcacgcagcugccgcccgccuacaccaacagcuucacccggggcgucuacuaccccgacaagguguuccgcuccagcgugcugcacuccacccaggaccucuuccugcccuucuucagcaacgucacgugguuccacgccauccacguguccgggaccaacggcaccaagcgguucgacaacccggugcugcccuucaacgacggggucuacuucgcgagcaccgagaaguccaacaucauccgcggcuggaucuucgggacgacccucgacagcaagacccagucccugcugaucgugaacaacgccaccaacguggucaucaaggugugcgaguuccaguucugcaacgaccccuuccucggcguguacuaccacaagaacaacaagagcuggauggaguccgaguuccgggucuacagcuccgccaacaacugcacguucgaguacgugagccagcccuuccugauggaccuggagggcaagcaggggaacuucaagaaccuccgcgaguucguguucaagaacaucgacggcuacuucaagaucuacuccaagcacaccccgaucaaccugguccgggaccugccccagggguucagcgcccucgagccccugguggaccugcccaucggcaucaacaucacccgcuuccagacccuccuggcccugcaccgguccuaccucacgccgggggacagcagcuccggcuggaccgcgggcgccgccgccuacuacgugggguaccugcagccccgcaccuuccugcucaaguacaacgagaacggcaccaucacggacgcggucgacugcgcccuggacccccugagcgagaccaagugcacccucaaguccuucaccguggagaaggggaucuaccagacgagcaacuuccgggugcagcccaccgaguccaucguccgcuucccgaacaucaccaaccugugccccuucggcgagguguucaacgccacccgguucgccagcgucuacgccuggaaccgcaagcggaucuccaacugcguggcggacuacagcgugcuguacaacuccgccagcuucuccacguucaagugcuacggcgucagccccaccaagcucaacgaccugugcuucaccaacguguacgccgacuccuucgugauccgcggggacgagguccggcagaucgcccccggccagaccgggaagaucgccgacuacaacuacaagcugccggacgacuucacgggcugcgugaucgcguggaacagcaacaaccucgacuccaaggucgggggcaacuacaacuaccuguaccgccuguuccgcaagagcaaccucaagcccuucgagcgggacaucuccaccgagaucuaccaggccggcagcacccccugcaacgggguggagggcuucaacugcuacuucccccugcaguccuacggguuccagccgaccaacggcgugggguaccagcccuaccggguggucgugcugagcuucgagcuccugcacgcccccgccacggugugcggccccaagaaguccaccaaccuggucaagaacaagugcgugaacuucaacuucaacggccucaccgggaccggcgugcugaccgagagcaacaagaaguuccugccguuccagcaguucgggcgcgacaucgccgacacgaccgacgcgguccgcgacccccagacccuggagauccucgacaucacccccugcagcuucggcgggguguccgugaucacgccgggcaccaacaccagcaaccaggucgccgugcuguaccaggacgugaacugcaccgagguccccguggccauccacgccgaccagcugacgcccaccuggcggguguacuccaccggcagcaacgucuuccagacccgcgccgggugccucaucggcgcggagcacgugaacaacuccuacgagugcgacauccccaucggggccggcaucugcgccagcuaccagacgcagaccaacuccccgcggcgcgcccggagcguggcgucccagagcaucaucgccuacaccaugucccugggcgccgagaacagcgucgccuacuccaacaacagcaucgccauccccaccaacuucacgaucuccgugaccaccgagauccugcccgugagcaugaccaagacgagcgucgacugcaccauguacaucugcggggacuccaccgagugcagcaaccuccugcugcaguacggcuccuucugcacccagcucaaccgcgcgcugacggggaucgccguggagcaggacaagaacacccaggagguguucgcccaggucaagcagaucuacaagacgcccccgaucaaggacuucggcggguucaacuucagccagauccugcccgaccccuccaagcccagcaagcgguccuucaucgaggaccuccuguucaacaaggugacccuggccgacgccggcuucaucaagcaguacggcgacugccucggggacaucgcggcccgcgaccugaucugcgcccagaaguucaacggccugaccgugcucccgccccugcugaccgacgagaugaucgcccaguacaccagcgcccuccuggcggggaccaucacguccggcuggaccuucggggccggcgccgcccugcagauccccuucgcgaugcagauggccuaccgguucaacggcugcggggucacccagaacgugcucuacgagaaccagaagcugaucgccaaccaguucaacagcgccaucggcaagauccaggacucccugagcuccaccgccagcgcgcucgggaagcugcaggacguggucaaccagaacgcccaggcccugaacacgcucgugaagcagcuguccagcaacuucggcgccaucuccagcgugcugaacgacauccucucccgccuggacaaggucgaggccgaggugcagaucgaccggcugaucaccgggcgccuccagagccugcagaccuacgugacccagcagcugauccgggcggccgagauccgcgccagcgccaaccucgccgcgaccaagauguccgagugcguccugggccagagcaagcggguggacuucugcggcaaggggugccaccugauguccuucccccagagcgccccgcacggcguggucuuccuccacgugacguacguccccgcccaggagaagaacuucaccaccgcccccgcgaucugccacgacgggaaggcccacuucccccgcgagggcguguucguguccaacgggacccacugguucgucacgcagcggaacuucuacgagccgcagaucaucaccaccgacaacaccuucgugagcggcaacugcgacguggucaucggcaucgugaacaacacgguguacgacccccugcagcccgagcuggacuccuucaaggaggagcucgacaaguacuucaagaaccacaccagccccgacgucgaccugggggacaucuccggcaucaacgccagcguggugaacauccagaaggagaucgaccgccugaacgaggucgccaagaaccucaacgagucccugaucgaccugcaggagcucgggaaguacgagcaguacaucaagggcgggggcgggagcgacaucaucaagcuccugaacgagcaggucaacaaggagaugcaguccagcaaccuguacauguccaugagcuccuggugcuacacccacagccucgacggcgccgggcuguuccuguucgaccacgccgcggaggaguacgagcacgccaagaagcucaucaucuuccugaacgagaacaacgugcccgugcagcugaccuccaucagcgccccggagcacaaguucgagggccucacgcagaucuuccagaaggccuacgagcacgagcagcacaucuccgagagcaucaacaacaucguggaccacgccaucaaguccaaggaccacgcgaccuucaacuuccugcagugguacgucgccgagcagcacgaggaggaggugcuguucaaggacauccucgacaagaucgagcugaucgggaacgagaaccacggccuguaccucgccgaccaguacgugaaggggaucgccaagagccgcaaguccugaggacuagucccuguucccagagcccacuuuuuuuucuuuuuuugaaauaaaauagccugucuuucagaucucaaaggcucuuuucagagccaccaaaaaaaaaaaaaaaaaaaaaaaaaaaaaaaaaaaaaaaaaaaaaaaaaaaaaaaaaaaaaaaaaaaaaaaaaaaaaaaaaaaaaaaaaaaaaaaaaaaaa

SEQ ID NO: 12378 - RNA, 4412 nt, Artificial Sequence
  SARS-CoV-2/Wuhan/WIV05/2019__EPI_ISL_402128 spike protein mRNA gc (1-1211)(Q965C_S1003C) Ferritin construct
aggagagucccgcagucggcguccagcggcucugcuuguucgugugugugucguugcaggccuuauucaagcuuaccauguucguguuccugguccuccugccccuggugagcucccagugcgugaaccucaccacccgcacgcagcugccgcccgccuacaccaacagcuucacccggggcgucuacuaccccgacaagguguuccgcuccagcgugcugcacuccacccaggaccucuuccugcccuucuucagcaacgucacgugguuccacgccauccacguguccgggaccaacggcaccaagcgguucgacaacccggugcugcccuucaacgacggggucuacuucgcgagcaccgagaaguccaacaucauccgcggcuggaucuucgggacgacccucgacagcaagacccagucccugcugaucgugaacaacgccaccaacguggucaucaaggugugcgaguuccaguucugcaacgaccccuuccucggcguguacuaccacaagaacaacaagagcuggauggaguccgaguuccgggucuacagcuccgccaacaacugcacguucgaguacgugagccagcccuuccugauggaccuggagggcaagcaggggaacuucaagaaccuccgcgaguucguguucaagaacaucgacggcuacuucaagaucuacuccaagcacaccccgaucaaccugguccgggaccugccccagggguucagcgcccucgagccccugguggaccugcccaucggcaucaacaucacccgcuuccagacccuccuggcccugcaccgguccuaccucacgccgggggacagcagcuccggcuggaccgcgggcgccgccgccuacuacgugggguaccugcagccccgcaccuuccugcucaaguacaacgagaacggcaccaucacggacgcggucgacugcgcccuggacccccugagcgagaccaagugcacccucaaguccuucaccguggagaaggggaucuaccagacgagcaacuuccgggugcagcccaccgaguccaucguccgcuucccgaacaucaccaaccugugccccuucggcgagguguucaacgccacccgguucgccagcgucuacgccuggaaccgcaagcggaucuccaacugcguggcggacuacagcgugcuguacaacuccgccagcuucuccacguucaagugcuacggcgucagccccaccaagcucaacgaccugugcuucaccaacguguacgccgacuccuucgugauccgcggggacgagguccggcagaucgcccccggccagaccgggaagaucgccgacuacaacuacaagcugccggacgacuucacgggcugcgugaucgcguggaacagcaacaaccucgacuccaaggucgggggcaacuacaacuaccuguaccgccuguuccgcaagagcaaccucaagcccuucgagcgggacaucuccaccgagaucuaccaggccggcagcacccccugcaacgggguggagggcuucaacugcuacuucccccugcaguccuacggguuccagccgaccaacggcgugggguaccagcccuaccggguggucgugcugagcuucgagcuccugcacgcccccgccacggugugcggccccaagaaguccaccaaccuggucaagaacaagugcgugaacuucaacuucaacggccucaccgggaccggcgugcugaccgagagcaacaagaaguuccugccguuccagcaguucgggcgcgacaucgccgacacgaccgacgcgguccgcgacccccagacccuggagauccucgacaucacccccugcagcuucggcgggguguccgugaucacgccgggcaccaacaccagcaaccaggucgccgugcuguaccaggacgugaacugcaccgagguccccguggccauccacgccgaccagcugacgcccaccuggcggguguacuccaccggcagcaacgucuuccagacccgcgccgggugccucaucggcgcggagcacgugaacaacuccuacgagugcgacauccccaucggggccggcaucugcgccagcuaccagacgcagaccaacuccccgcggcgcgcccggagcguggcgucccagagcaucaucgccuacaccaugucccugggcgccgagaacagcgucgccuacuccaacaacagcaucgccauccccaccaacuucacgaucuccgugaccaccgagauccugcccgugagcaugaccaagacgagcgucgacugcaccauguacaucugcggggacuccaccgagugcagcaaccuccugcugcaguacggcuccuucugcacccagcucaaccgcgcgcugacggggaucgccguggagcaggacaagaacacccaggagguguucgcccaggucaagcagaucuacaagacgcccccgaucaaggacuucggcggguucaacuucagccagauccugcccgaccccuccaagcccagcaagcgguccuucaucgaggaccuccuguucaacaaggugacccuggccgacgccggcuucaucaagcaguacggcgacugccucggggacaucgcggcccgcgaccugaucugcgcccagaaguucaacggccugaccgugcucccgccccugcugaccgacgagaugaucgcccaguacaccagcgcccuccuggcggggaccaucacguccggcuggaccuucggggccggcgccgcccugcagauccccuucgcgaugcagauggccuaccgguucaacggcaucggggucacccagaacgugcucuacgagaaccagaagcugaucgccaaccaguucaacagcgccaucggcaagauccaggacucccugagcuccaccgccagcgcgcucgggaagcugcaggacguggucaaccagaacgcccaggcccugaacacgcucgugaagugccuguccagcaacuucggcgccaucuccagcgugcugaacgacauccucucccgccuggacaaggucgaggccgaggugcagaucgaccggcugaucaccgggcgccuccagugccugcagaccuacgugacccagcagcugauccgggcggccgagauccgcgccagcgccaaccucgccgcgaccaagauguccgagugcguccugggccagagcaagcggguggacuucugcggcaagggguaccaccugauguccuucccccagagcgccccgcacggcguggucuuccuccacgugacguacguccccgcccaggagaagaacuucaccaccgcccccgcgaucugccacgacgggaaggcccacuucccccgcgagggcguguucguguccaacgggacccacugguucgucacgcagcggaacuucuacgagccgcagaucaucaccaccgacaacaccuucgugagcggcaacugcgacguggucaucggcaucgugaacaacacgguguacgacccccugcagcccgagcuggacuccuucaaggaggagcucgacaaguacuucaagaaccacaccagccccgacgucgaccugggggacaucuccggcaucaacgccagcguggugaacauccagaaggagaucgaccgccugaacgaggucgccaagaaccucaacgagucccugaucgaccugcaggagcucgggaaguacgagcaguacaucaagggcgggggcgggagcgacaucaucaagcuccugaacgagcaggucaacaaggagaugcaguccagcaaccuguacauguccaugagcuccuggugcuacacccacagccucgacggcgccgggcuguuccuguucgaccacgccgcggaggaguacgagcacgccaagaagcucaucaucuuccugaacgagaacaacgugcccgugcagcugaccuccaucagcgccccggagcacaaguucgagggccucacgcagaucuuccagaaggccuacgagcacgagcagcacaucuccgagagcaucaacaacaucguggaccacgccaucaaguccaaggaccacgcgaccuucaacuuccugcagugguacgucgccgagcagcacgaggaggaggugcuguucaaggacauccucgacaagaucgagcugaucgggaacgagaaccacggccuguaccucgccgaccaguacgugaaggggaucgccaagagccgcaaguccugaggacuagucccuguucccagagcccacuuuuuuuucuuuuuuugaaauaaaauagccugucuuucagaucucaaaggcucuuuucagagccaccaaaaaaaaaaaaaaaaaaaaaaaaaaaaaaaaaaaaaaaaaaaaaaaaaaaaaaaaaaaaaaaaaaaaaaaaaaaaaaaaaaaaaaaaaaaaaaaaaaaaa

SEQ ID NO: 12379 - RNA, 4412 nt, Artificial Sequence
  SARS-CoV-2/Wuhan/WIV05/2019__EPI_ISL_402128 spike protein mRNA gc (1-1211)(F970C_G999C) Ferritin construct
aggagagucccgcagucggcguccagcggcucugcuuguucgugugugugucguugcaggccuuauucaagcuuaccauguucguguuccugguccuccugccccuggugagcucccagugcgugaaccucaccacccgcacgcagcugccgcccgccuacaccaacagcuucacccggggcgucuacuaccccgacaagguguuccgcuccagcgugcugcacuccacccaggaccucuuccugcccuucuucagcaacgucacgugguuccacgccauccacguguccgggaccaacggcaccaagcgguucgacaacccggugcugcccuucaacgacggggucuacuucgcgagcaccgagaaguccaacaucauccgcggcuggaucuucgggacgacccucgacagcaagacccagucccugcugaucgugaacaacgccaccaacguggucaucaaggugugcgaguuccaguucugcaacgaccccuuccucggcguguacuaccacaagaacaacaagagcuggauggaguccgaguuccgggucuacagcuccgccaacaacugcacguucgaguacgugagccagcccuuccugauggaccuggagggcaagcaggggaacuucaagaaccuccgcgaguucguguucaagaacaucgacggcuacuucaagaucuacuccaagcacaccccgaucaaccugguccgggaccugccccagggguucagcgcccucgagccccugguggaccugcccaucggcaucaacaucacccgcuuccagacccuccuggcccugcaccgguccuaccucacgccgggggacagcagcuccggcuggaccgcgggcgccgccgccuacuacgugggguaccugcagccccgcaccuuccugcucaaguacaacgagaacggcaccaucacggacgcggucgacugcgcccuggacccccugagcgagaccaagugcacccucaaguccuucaccguggagaaggggaucuaccagacgagcaacuuccgggugcagcccaccgaguccaucguccgcuucccgaacaucaccaaccugugccccuucggcgagguguucaacgccacccgguucgccagcgucuacgccuggaaccgcaagcggaucuccaacugcguggcggacuacagcgugcuguacaacuccgccagcuucuccacguucaagugcuacggcgucagccccaccaagcucaacgaccugugcuucaccaacguguacgccgacuccuucgugauccgcggggacgagguccggcagaucgcccccggccagaccgggaagaucgccgacuacaacuacaagcugccggacgacuucacgggcugcgugaucgcguggaacagcaacaaccucgacuccaaggucgggggcaacuacaacuaccuguaccgccuguuccgcaagagcaaccucaagcccuucgagcgggacaucuccaccgagaucuaccaggccggcagcacccccugcaacgggguggagggcuucaacugcuacuucccccugcaguccuacggguuccagccgaccaacggcgugggguaccagcccuaccggguggucgugcugagcuucgagcuccugcacgcccccgccacggugugcggccccaagaaguccaccaaccuggucaagaacaagugcgugaacuucaacuucaacggccucaccgggaccggcgugcugaccgagagcaacaagaaguuccugccguuccagcaguucgggcgcgacaucgccgacacgaccgacgcgguccgcgacccccagacccuggagauccucgacaucacccccugcagcuucggcgggguguccgugaucacgccgggcaccaacaccagcaaccaggucgccgugcuguaccaggacgugaacugcaccgagguccccguggccauccacgccgaccagcugacgcccaccuggcggguguacuccaccggcagcaacgucuuccagacccgcgccgggugccucaucggcgcggagcacgugaacaacuccuacgagugcgacauccccaucggggccggcaucugcgccagcuaccagacgcagaccaacuccccgcggcgcgcccggagcguggcgucccagagcaucaucgccuacaccaugucccugggcgccgagaacagcgucgccuacuccaacaacagcaucgccauccccaccaacuucacgaucuccgugaccaccgagauccugcccgugagcaugaccaagacgagcgucgacugcaccauguacaucugcggggacuccaccgagugcagcaaccuccugcugcaguacggcuccuucugcacccagcucaaccgcgcgcugacggggaucgccguggagcaggacaagaacacccaggagguguucgcccaggucaagcagaucuacaagacgcccccgaucaaggacuucggcggguucaacuucagccagauccugcccgaccccuccaagcccagcaagcgguccuucaucgaggaccuccuguucaacaaggugacccuggccgacgccggcuucaucaagcaguacggcgacugccucggggacaucgcggcccgcgaccugaucugcgcccagaaguucaacggccugaccgugcucccgccccugcugaccgacgagaugaucgcccaguacaccagcgcccuccuggcggggaccaucacguccggcuggaccuucggggccggcgccgcccugcagauccccuucgcgaugcagauggccuaccgguucaacggcaucggggucacccagaacgugcucuacgagaaccagaagcugaucgccaaccaguucaacagcgccaucggcaagauccaggacucccugagcuccaccgccagcgcgcucgggaagcugcaggacguggucaaccagaacgcccaggcccugaacacgcucgugaagcagcuguccagcaacugcggcgccaucuccagcgugcugaacgacauccucucccgccuggacaaggucgaggccgaggugcagaucgaccggcugaucaccugucgccuccagagccugcagaccuacgugacccagcagcugauccgggcggccgagauccgcgccagcgccaaccucgccgcgaccaagauguccgagugcguccugggccagagcaagcggguggacuucugcggcaagggguaccaccugauguccuucccccagagcgccccgcacggcguggucuuccuccacgugacguacguccccgcccaggagaagaacuucaccaccgcccccgcgaucugccacgacgggaaggcccacuucccccgcgagggcguguucguguccaacgggacccacugguucgucacgcagcggaacuucuacgagccgcagaucaucaccaccgacaacaccuucgugagcggcaacugcgacguggucaucggcaucgugaacaacacgguguacgacccccugcagcccgagcuggacuccuucaaggaggagcucgacaaguacuucaagaaccacaccagccccgacgucgaccugggggacaucuccggcaucaacgccagcguggugaacauccagaaggagaucgaccgccugaacgaggucgccaagaaccucaacgagucccugaucgaccugcaggagcucgggaaguacgagcaguacaucaagggcgggggcgggagcgacaucaucaagcuccugaacgagcaggucaacaaggagaugcaguccagcaaccuguacauguccaugagcuccuggugcuacacccacagccucgacggcgccgggcuguuccuguucgaccacgccgcggaggaguacgagcacgccaagaagcucaucaucuuccugaacgagaacaacgugcccgugcagcugaccuccaucagcgccccggagcacaaguucgagggccucacgcagaucuuccagaaggccuacgagcacgagcagcacaucuccgagagcaucaacaacaucguggaccacgccaucaaguccaaggaccacgcgaccuucaacuuccugcagugguacgucgccgagcagcacgaggaggaggugcuguucaaggacauccucgacaagaucgagcugaucgggaacgagaaccacggccuguaccucgccgaccaguacgugaaggggaucgccaagagccgcaaguccugaggacuagucccuguucccagagcccacuuuuuuuucuuuuuuugaaauaaaauagccugucuuucagaucucaaaggcucuuuucagagccaccaaaaaaaaaaaaaaaaaaaaaaaaaaaaaaaaaaaaaaaaaaaaaaaaaaaaaaaaaaaaaaaaaaaaaaaaaaaaaaaaaaaaaaaaaaaaaaaaaaaaa

SEQ ID NO: 12380 - RNA, 4412 nt, Artificial Sequence
  SARS-CoV-2/Wuhan/WIV05/2019__EPI_ISL_402128 spike protein mRNA gc (1-1211)(A972C_R995C) Ferritin construct
aggagagucccgcagucggcguccagcggcucugcuuguucgugugugugucguugcaggccuuauucaagcuuaccauguucguguuccugguccuccugccccuggugagcucccagugcgugaaccucaccacccgcacgcagcugccgcccgccuacaccaacagcuucacccggggcgucuacuaccccgacaagguguuccgcuccagcgugcugcacuccacccaggaccucuuccugcccuucuucagcaacgucacgugguuccacgccauccacguguccgggaccaacggcaccaagcgguucgacaacccggugcugcccuucaacgacggggucuacuucgcgagcaccgagaaguccaacaucauccgcggcuggaucuucgggacgacccucgacagcaagacccagucccugcugaucgugaacaacgccaccaacguggucaucaaggugugcgaguuccaguucugcaacgaccccuuccucggcguguacuaccacaagaacaacaagagcuggauggaguccgaguuccgggucuacagcuccgccaacaacugcacguucgaguacgugagccagcccuuccugauggaccuggagggcaagcaggggaacuucaagaaccuccgcgaguucguguucaagaacaucgacggcuacuucaagaucuacuccaagcacaccccgaucaaccugguccgggaccugccccagggguucagcgcccucgagccccugguggaccugcccaucggcaucaacaucacccgcuuccagacccuccuggcccugcaccgguccuaccucacgccgggggacagcagcuccggcuggaccgcgggcgccgccgccuacuacgugggguaccugcagccccgcaccuuccugcucaaguacaacgagaacggcaccaucacggacgcggucgacugcgcccuggacccccugagcgagaccaagugcacccucaaguccuucaccguggagaaggggaucuaccagacgagcaacuuccgggugcagcccaccgaguccaucguccgcuucccgaacaucaccaaccugugccccuucggcgagguguucaacgccacccgguucgccagcgucuacgccuggaaccgcaagcggaucuccaacugcguggcggacuacagcgugcuguacaacuccgccagcuucuccacguucaagugcuacggcgucagccccaccaagcucaacgaccugugcuucaccaacguguacgccgacuccuucgugauccgcggggacgagguccggcagaucgcccccggccagaccgggaagaucgccgacuacaacuacaagcugccggacgacuucacgggcugcgugaucgcguggaacagcaacaaccucgacuccaaggucgggggcaacuacaacuaccuguaccgccuguuccgcaagagcaaccucaagcccuucgagcgggacaucuccaccgagaucuaccaggccggcagcacccccugcaacgggguggagggcuucaacugcuacuucccccugcaguccuacggguuccagccgaccaacggcgugggguaccagcccuaccggguggucgugcugagcuucgagcuccugcacgcccccgccacggugugcggccccaagaaguccaccaaccuggucaagaacaagugcgugaacuucaacuucaacggccucaccgggaccggcgugcugaccgagagcaacaagaaguuccugccguuccagcaguucgggcgcgacaucgccgacacgaccgacgcgguccgcgacccccagacccuggagauccucgacaucacccccugcagcuucggcgggguguccgugaucacgccgggcaccaacaccagcaaccaggucgccgugcuguaccaggacgugaacugcaccgagguccccguggccauccacgccgaccagcugacgcccaccuggcggguguacuccaccggcagcaacgucuuccagacccgcgccgggugccucaucggcgcggagcacgugaacaacuccuacgagugcgacauccccaucggggccggcaucugcgccagcuaccagacgcagaccaacuccccgcggcgcgcccggagcguggcgucccagagcaucaucgccuacaccaugucccugggcgccgagaacagcgucgccuacuccaacaacagcaucgccauccccaccaacuucacgaucuccgugaccaccgagauccugcccgugagcaugaccaagacgagcgucgacugcaccauguacaucugcggggacuccaccgagugcagcaaccuccugcugcaguacggcuccuucugcacccagcucaaccgcgcgcugacggggaucgccguggagcaggacaagaacacccaggagguguucgcccaggucaagcagaucuacaagacgcccccgaucaaggacuucggcggguucaacuucagccagauccugcccgaccccuccaagcccagcaagcgguccuucaucgaggaccuccuguucaacaaggugacccuggccgacgccggcuucaucaagcaguacggcgacugccucggggacaucgcggcccgcgaccugaucugcgcccagaaguucaacggccugaccgugcucccgccccugcugaccgacgagaugaucgcccaguacaccagcgcccuccuggcggggaccaucacguccggcuggaccuucggggccggcgccgcccugcagauccccuucgcgaugcagauggccuaccgguucaacggcaucggggucacccagaacgugcucuacgagaaccagaagcugaucgccaaccaguucaacagcgccaucggcaagauccaggacucccugagcuccaccgccagcgcgcucgggaagcugcaggacguggucaaccagaacgcccaggcccugaacacgcucgugaagcagcuguccagcaacuucggcugcaucuccagcgugcugaacgacauccucucccgccuggacaaggucgaggccgaggugcagaucgacugccugaucaccgggcgccuccagagccugcagaccuacgugacccagcagcugauccgggcggccgagauccgcgccagcgccaaccucgccgcgaccaagauguccgagugcguccugggccagagcaagcggguggacuucugcggcaagggguaccaccugauguccuucccccagagcgccccgcacggcguggucuuccuccacgugacguacguccccgcccaggagaagaacuucaccaccgcccccgcgaucugccacgacgggaaggcccacuucccccgcgagggcguguucguguccaacgggacccacugguucgucacgcagcggaacuucuacgagccgcagaucaucaccaccgacaacaccuucgugagcggcaacugcgacguggucaucggcaucgugaacaacacgguguacgacccccugcagcccgagcuggacuccuucaaggaggagcucgacaaguacuucaagaaccacaccagccccgacgucgaccugggggacaucuccggcaucaacgccagcguggugaacauccagaaggagaucgaccgccugaacgaggucgccaagaaccucaacgagucccugaucgaccugcaggagcucgggaaguacgagcaguacaucaagggcgggggcgggagcgacaucaucaagcuccugaacgagcaggucaacaaggagaugcaguccagcaaccuguacauguccaugagcuccuggugcuacacccacagccucgacggcgccgggcuguuccuguucgaccacgccgcggaggaguacgagcacgccaagaagcucaucaucuuccugaacgagaacaacgugcccgugcagcugaccuccaucagcgccccggagcacaaguucgagggccucacgcagaucuuccagaaggccuacgagcacgagcagcacaucuccgagagcaucaacaacaucguggaccacgccaucaaguccaaggaccacgcgaccuucaacuuccugcagugguacgucgccgagcagcacgaggaggaggugcuguucaaggacauccucgacaagaucgagcugaucgggaacgagaaccacggccuguaccucgccgaccaguacgugaaggggaucgccaagagccgcaaguccugaggacuagucccuguucccagagcccacuuuuuuuucuuuuuuugaaauaaaauagccugucuuucagaucucaaaggcucuuuucagagccaccaaaaaaaaaaaaaaaaaaaaaaaaaaaaaaaaaaaaaaaaaaaaaaaaaaaaaaaaaaaaaaaaaaaaaaaaaaaaaaaaaaaaaaaaaaaaaaaaaaaaa

SEQ ID NO: 12381 - RNA, 4412 nt, Artificial Sequence
  SARS-CoV-2/Wuhan/WIV05/2019__EPI_ISL_402128 spike protein mRNA gc (1-1211)(A890C_V1040C) Ferritin construct
aggagagucccgcagucggcguccagcggcucugcuuguucgugugugugucguugcaggccuuauucaagcuuaccauguucguguuccugguccuccugccccuggugagcucccagugcgugaaccucaccacccgcacgcagcugccgcccgccuacaccaacagcuucacccggggcgucuacuaccccgacaagguguuccgcuccagcgugcugcacuccacccaggaccucuuccugcccuucuucagcaacgucacgugguuccacgccauccacguguccgggaccaacggcaccaagcgguucgacaacccggugcugcccuucaacgacggggucuacuucgcgagcaccgagaaguccaacaucauccgcggcuggaucuucgggacgacccucgacagcaagacccagucccugcugaucgugaacaacgccaccaacguggucaucaaggugugcgaguuccaguucugcaacgaccccuuccucggcguguacuaccacaagaacaacaagagcuggauggaguccgaguuccgggucuacagcuccgccaacaacugcacguucgaguacgugagccagcccuuccugauggaccuggagggcaagcaggggaacuucaagaaccuccgcgaguucguguucaagaacaucgacggcuacuucaagaucuacuccaagcacaccccgaucaaccugguccgggaccugccccagggguucagcgcccucgagccccugguggaccugcccaucggcaucaacaucacccgcuuccagacccuccuggcccugcaccgguccuaccucacgccgggggacagcagcuccggcuggaccgcgggcgccgccgccuacuacgugggguaccugcagccccgcaccuuccugcucaaguacaacgagaacggcaccaucacggacgcggucgacugcgcccuggacccccugagcgagaccaagugcacccucaaguccuucaccguggagaaggggaucuaccagacgagcaacuuccgggugcagcccaccgaguccaucguccgcuucccgaacaucaccaaccugugccccuucggcgagguguucaacgccacccgguucgccagcgucuacgccuggaaccgcaagcggaucuccaacugcguggcggacuacagcgugcuguacaacuccgccagcuucuccacguucaagugcuacggcgucagccccaccaagcucaacgaccugugcuucaccaacguguacgccgacuccuucgugauccgcggggacgagguccggcagaucgcccccggccagaccgggaagaucgccgacuacaacuacaagcugccggacgacuucacgggcugcgugaucgcguggaacagcaacaaccucgacuccaaggucgggggcaacuacaacuaccuguaccgccuguuccgcaagagcaaccucaagcccuucgagcgggacaucuccaccgagaucuaccaggccggcagcacccccugcaacgggguggagggcuucaacugcuacuucccccugcaguccuacggguuccagccgaccaacggcgugggguaccagcccuaccggguggucgugcugagcuucgagcuccugcacgcccccgccacggugugcggccccaagaaguccaccaaccuggucaagaacaagugcgugaacuucaacuucaacggccucaccgggaccggcgugcugaccgagagcaacaagaaguuccugccguuccagcaguucgggcgcgacaucgccgacacgaccgacgcgguccgcgacccccagacccuggagauccucgacaucacccccugcagcuucggcgggguguccgugaucacgccgggcaccaacaccagcaaccaggucgccgugcuguaccaggacgugaacugcaccgagguccccguggccauccacgccgaccagcugacgcccaccuggcggguguacuccaccggcagcaacgucuuccagacccgcgccgggugccucaucggcgcggagcacgugaacaacuccuacgagugcgacauccccaucggggccggcaucugcgccagcuaccagacgcagaccaacuccccgcggcgcgcccggagcguggcgucccagagcaucaucgccuacaccaugucccugggcgccgagaacagcgucgccuacuccaacaacagcaucgccauccccaccaacuucacgaucuccgugaccaccgagauccugcccgugagcaugaccaagacgagcgucgacugcaccauguacaucugcggggacuccaccgagugcagcaaccuccugcugcaguacggcuccuucugcacccagcucaaccgcgcgcugacggggaucgccguggagcaggacaagaacacccaggagguguucgcccaggucaagcagaucuacaagacgcccccgaucaaggacuucggcggguucaacuucagccagauccugcccgaccccuccaagcccagcaagcgguccuucaucgaggaccuccuguucaacaaggugacccuggccgacgccggcuucaucaagcaguacggcgacugccucggggacaucgcggcccgcgaccugaucugcgcccagaaguucaacggccugaccgugcucccgccccugcugaccgacgagaugaucgcccaguacaccagcgcccuccuggcggggaccaucacguccggcuggaccuucgggugcggcgccgcccugcagauccccuucgcgaugcagauggccuaccgguucaacggcaucggggucacccagaacgugcucuacgagaaccagaagcugaucgccaaccaguucaacagcgccaucggcaagauccaggacucccugagcuccaccgccagcgcgcucgggaagcugcaggacguggucaaccagaacgcccaggcccugaacacgcucgugaagcagcuguccagcaacuucggcgccaucuccagcgugcugaacgacauccucucccgccuggacaaggucgaggccgaggugcagaucgaccggcugaucaccgggcgccuccagagccugcagaccuacgugacccagcagcugauccgggcggccgagauccgcgccagcgccaaccucgccgcgaccaagauguccgagugcguccugggccagagcaagcggugcgacuucugcggcaagggguaccaccugauguccuucccccagagcgccccgcacggcguggucuuccuccacgugacguacguccccgcccaggagaagaacuucaccaccgcccccgcgaucugccacgacgggaaggcccacuucccccgcgagggcguguucguguccaacgggacccacugguucgucacgcagcggaacuucuacgagccgcagaucaucaccaccgacaacaccuucgugagcggcaacugcgacguggucaucggcaucgugaacaacacgguguacgacccccugcagcccgagcuggacuccuucaaggaggagcucgacaaguacuucaagaaccacaccagccccgacgucgaccugggggacaucuccggcaucaacgccagcguggugaacauccagaaggagaucgaccgccugaacgaggucgccaagaaccucaacgagucccugaucgaccugcaggagcucgggaaguacgagcaguacaucaagggcgggggcgggagcgacaucaucaagcuccugaacgagcaggucaacaaggagaugcaguccagcaaccuguacauguccaugagcuccuggugcuacacccacagccucgacggcgccgggcuguuccuguucgaccacgccgcggaggaguacgagcacgccaagaagcucaucaucuuccugaacgagaacaacgugcccgugcagcugaccuccaucagcgccccggagcacaaguucgagggccucacgcagaucuuccagaaggccuacgagcacgagcagcacaucuccgagagcaucaacaacaucguggaccacgccaucaaguccaaggaccacgcgaccuucaacuuccugcagugguacgucgccgagcagcacgaggaggaggugcuguucaaggacauccucgacaagaucgagcugaucgggaacgagaaccacggccuguaccucgccgaccaguacgugaaggggaucgccaagagccgcaaguccugaggacuagucccuguucccagagcccacuuuuuuuucuuuuuuugaaauaaaauagccugucuuucagaucucaaaggcucuuuucagagccaccaaaaaaaaaaaaaaaaaaaaaaaaaaaaaaaaaaaaaaaaaaaaaaaaaaaaaaaaaaaaaaaaaaaaaaaaaaaaaaaaaaaaaaaaaaaaaaaaaaaaa

SEQ ID NO: 12382 - RNA, 4412 nt, Artificial Sequence
  SARS-CoV-2/Wuhan/WIV05/2019__EPI_ISL_402128 spike protein mRNA gc (1-1211)(T874C_S1055C) Ferritin construct
aggagagucccgcagucggcguccagcggcucugcuuguucgugugugugucguugcaggccuuauucaagcuuaccauguucguguuccugguccuccugccccuggugagcucccagugcgugaaccucaccacccgcacgcagcugccgcccgccuacaccaacagcuucacccggggcgucuacuaccccgacaagguguuccgcuccagcgugcugcacuccacccaggaccucuuccugcccuucuucagcaacgucacgugguuccacgccauccacguguccgggaccaacggcaccaagcgguucgacaacccggugcugcccuucaacgacggggucuacuucgcgagcaccgagaaguccaacaucauccgcggcuggaucuucgggacgacccucgacagcaagacccagucccugcugaucgugaacaacgccaccaacguggucaucaaggugugcgaguuccaguucugcaacgaccccuuccucggcguguacuaccacaagaacaacaagagcuggauggaguccgaguuccgggucuacagcuccgccaacaacugcacguucgaguacgugagccagcccuuccugauggaccuggagggcaagcaggggaacuucaagaaccuccgcgaguucguguucaagaacaucgacggcuacuucaagaucuacuccaagcacaccccgaucaaccugguccgggaccugccccagggguucagcgcccucgagccccugguggaccugcccaucggcaucaacaucacccgcuuccagacccuccuggcccugcaccgguccuaccucacgccgggggacagcagcuccggcuggaccgcgggcgccgccgccuacuacgugggguaccugcagccccgcaccuuccugcucaaguacaacgagaacggcaccaucacggacgcggucgacugcgcccuggacccccugagcgagaccaagugcacccucaaguccuucaccguggagaaggggaucuaccagacgagcaacuuccgggugcagcccaccgaguccaucguccgcuucccgaacaucaccaaccugugccccuucggcgagguguucaacgccacccgguucgccagcgucuacgccuggaaccgcaagcggaucuccaacugcguggcggacuacagcgugcuguacaacuccgccagcuucuccacguucaagugcuacggcgucagccccaccaagcucaacgaccugugcuucaccaacguguacgccgacuccuucgugauccgcggggacgagguccggcagaucgcccccggccagaccgggaagaucgccgacuacaacuacaagcugccggacgacuucacgggcugcgugaucgcguggaacagcaacaaccucgacuccaaggucgggggcaacuacaacuaccuguaccgccuguuccgcaagagcaaccucaagcccuucgagcgggacaucuccaccgagaucuaccaggccggcagcacccccugcaacgggguggagggcuucaacugcuacuucccccugcaguccuacggguuccagccgaccaacggcgugggguaccagcccuaccggguggucgugcugagcuucgagcuccugcacgcccccgccacggugugcggccccaagaaguccaccaaccuggucaagaacaagugcgugaacuucaacuucaacggccucaccgggaccggcgugcugaccgagagcaacaagaaguuccugccguuccagcaguucgggcgcgacaucgccgacacgaccgacgcgguccgcgacccccagacccuggagauccucgacaucacccccugcagcuucggcgggguguccgugaucacgccgggcaccaacaccagcaaccaggucgccgugcuguaccaggacgugaacugcaccgagguccccguggccauccacgccgaccagcugacgcccaccuggcggguguacuccaccggcagcaacgucuuccagacccgcgccgggugccucaucggcgcggagcacgugaacaacuccuacgagugcgacauccccaucggggccggcaucugcgccagcuaccagacgcagaccaacuccccgcggcgcgcccggagcguggcgucccagagcaucaucgccuacaccaugucccugggcgccgagaacagcgucgccuacuccaacaacagcaucgccauccccaccaacuucacgaucuccgugaccaccgagauccugcccgugagcaugaccaagacgagcgucgacugcaccauguacaucugcggggacuccaccgagugcagcaaccuccugcugcaguacggcuccuucugcacccagcucaaccgcgcgcugacggggaucgccguggagcaggacaagaacacccaggagguguucgcccaggucaagcagaucuacaagacgcccccgaucaaggacuucggcggguucaacuucagccagauccugcccgaccccuccaagcccagcaagcgguccuucaucgaggaccuccuguucaacaaggugacccuggccgacgccggcuucaucaagcaguacggcgacugccucggggacaucgcggcccgcgaccugaucugcgcccagaaguucaacggccugaccgugcucccgccccugcugaccgacgagaugaucgcccaguacugcagcgcccuccuggcggggaccaucacguccggcuggaccuucggggccggcgccgcccugcagauccccuucgcgaugcagauggccuaccgguucaacggcaucggggucacccagaacgugcucuacgagaaccagaagcugaucgccaaccaguucaacagcgccaucggcaagauccaggacucccugagcuccaccgccagcgcgcucgggaagcugcaggacguggucaaccagaacgcccaggcccugaacacgcucgugaagcagcuguccagcaacuucggcgccaucuccagcgugcugaacgacauccucucccgccuggacaaggucgaggccgaggugcagaucgaccggcugaucaccgggcgccuccagagccugcagaccuacgugacccagcagcugauccgggcggccgagauccgcgccagcgccaaccucgccgcgaccaagauguccgagugcguccugggccagagcaagcggguggacuucugcggcaagggguaccaccugauguccuucccccagugcgccccgcacggcguggucuuccuccacgugacguacguccccgcccaggagaagaacuucaccaccgcccccgcgaucugccacgacgggaaggcccacuucccccgcgagggcguguucguguccaacgggacccacugguucgucacgcagcggaacuucuacgagccgcagaucaucaccaccgacaacaccuucgugagcggcaacugcgacguggucaucggcaucgugaacaacacgguguacgacccccugcagcccgagcuggacuccuucaaggaggagcucgacaaguacuucaagaaccacaccagccccgacgucgaccugggggacaucuccggcaucaacgccagcguggugaacauccagaaggagaucgaccgccugaacgaggucgccaagaaccucaacgagucccugaucgaccugcaggagcucgggaaguacgagcaguacaucaagggcgggggcgggagcgacaucaucaagcuccugaacgagcaggucaacaaggagaugcaguccagcaaccuguacauguccaugagcuccuggugcuacacccacagccucgacggcgccgggcuguuccuguucgaccacgccgcggaggaguacgagcacgccaagaagcucaucaucuuccugaacgagaacaacgugcccgugcagcugaccuccaucagcgccccggagcacaaguucgagggccucacgcagaucuuccagaaggccuacgagcacgagcagcacaucuccgagagcaucaacaacaucguggaccacgccaucaaguccaaggaccacgcgaccuucaacuuccugcagugguacgucgccgagcagcacgaggaggaggugcuguucaaggacauccucgacaagaucgagcugaucgggaacgagaaccacggccuguaccucgccgaccaguacgugaaggggaucgccaagagccgcaaguccugaggacuagucccuguucccagagcccacuuuuuuuucuuuuuuugaaauaaaauagccugucuuucagaucucaaaggcucuuuucagagccaccaaaaaaaaaaaaaaaaaaaaaaaaaaaaaaaaaaaaaaaaaaaaaaaaaaaaaaaaaaaaaaaaaaaaaaaaaaaaaaaaaaaaaaaaaaaaaaaaaaaaa

SEQ ID NO: 12383 - RNA, 3998 nt, Artificial Sequence
  SARS-CoV-2/Wuhan/WIV05/2019__EPI_ISL_402128 spike protein mRNA gc (1-1211) Foldon construct
aggagagucccgcagucggcguccagcggcucugcuuguucgugugugugucguugcaggccuuauucaagcuuaccauguucguguuccugguccuccugccccuggugagcucccagugcgugaaccucaccacccgcacgcagcugccgcccgccuacaccaacagcuucacccggggcgucuacuaccccgacaagguguuccgcuccagcgugcugcacuccacccaggaccucuuccugcccuucuucagcaacgucacgugguuccacgccauccacguguccgggaccaacggcaccaagcgguucgacaacccggugcugcccuucaacgacggggucuacuucgcgagcaccgagaaguccaacaucauccgcggcuggaucuucgggacgacccucgacagcaagacccagucccugcugaucgugaacaacgccaccaacguggucaucaaggugugcgaguuccaguucugcaacgaccccuuccucggcguguacuaccacaagaacaacaagagcuggauggaguccgaguuccgggucuacagcuccgccaacaacugcacguucgaguacgugagccagcccuuccugauggaccuggagggcaagcaggggaacuucaagaaccuccgcgaguucguguucaagaacaucgacggcuacuucaagaucuacuccaagcacaccccgaucaaccugguccgggaccugccccagggguucagcgcccucgagccccugguggaccugcccaucggcaucaacaucacccgcuuccagacccuccuggcccugcaccgguccuaccucacgccgggggacagcagcuccggcuggaccgcgggcgccgccgccuacuacgugggguaccugcagccccgcaccuuccugcucaaguacaacgagaacggcaccaucacggacgcggucgacugcgcccuggacccccugagcgagaccaagugcacccucaaguccuucaccguggagaaggggaucuaccagacgagcaacuuccgggugcagcccaccgaguccaucguccgcuucccgaacaucaccaaccugugccccuucggcgagguguucaacgccacccgguucgccagcgucuacgccuggaaccgcaagcggaucuccaacugcguggcggacuacagcgugcuguacaacuccgccagcuucuccacguucaagugcuacggcgucagccccaccaagcucaacgaccugugcuucaccaacguguacgccgacuccuucgugauccgcggggacgagguccggcagaucgcccccggccagaccgggaagaucgccgacuacaacuacaagcugccggacgacuucacgggcugcgugaucgcguggaacagcaacaaccucgacuccaaggucgggggcaacuacaacuaccuguaccgccuguuccgcaagagcaaccucaagcccuucgagcgggacaucuccaccgagaucuaccaggccggcagcacccccugcaacgggguggagggcuucaacugcuacuucccccugcaguccuacggguuccagccgaccaacggcgugggguaccagcccuaccggguggucgugcugagcuucgagcuccugcacgcccccgccacggugugcggccccaagaaguccaccaaccuggucaagaacaagugcgugaacuucaacuucaacggccucaccgggaccggcgugcugaccgagagcaacaagaaguuccugccguuccagcaguucgggcgcgacaucgccgacacgaccgacgcgguccgcgacccccagacccuggagauccucgacaucacccccugcagcuucggcgggguguccgugaucacgccgggcaccaacaccagcaaccaggucgccgugcuguaccaggacgugaacugcaccgagguccccguggccauccacgccgaccagcugacgcccaccuggcggguguacuccaccggcagcaacgucuuccagacccgcgccgggugccucaucggcgcggagcacgugaacaacuccuacgagugcgacauccccaucggggccggcaucugcgccagcuaccagacgcagaccaacuccccgcggcgcgcccggagcguggcgucccagagcaucaucgccuacaccaugucccugggcgccgagaacagcgucgccuacuccaacaacagcaucgccauccccaccaacuucacgaucuccgugaccaccgagauccugcccgugagcaugaccaagacgagcgucgacugcaccauguacaucugcggggacuccaccgagugcagcaaccuccugcugcaguacggcuccuucugcacccagcucaaccgcgcgcugacggggaucgccguggagcaggacaagaacacccaggagguguucgcccaggucaagcagaucuacaagacgcccccgaucaaggacuucggcggguucaacuucagccagauccugcccgaccccuccaagcccagcaagcgguccuucaucgaggaccuccuguucaacaaggugacccuggccgacgccggcuucaucaagcaguacggcgacugccucggggacaucgcggcccgcgaccugaucugcgcccagaaguucaacggccugaccgugcucccgccccugcugaccgacgagaugaucgcccaguacaccagcgcccuccuggcggggaccaucacguccggcuggaccuucggggccggcgccgcccugcagauccccuucgcgaugcagauggccuaccgguucaacggcaucggggucacccagaacgugcucuacgagaaccagaagcugaucgccaaccaguucaacagcgccaucggcaagauccaggacucccugagcuccaccgccagcgcgcucgggaagcugcaggacguggucaaccagaacgcccaggcccugaacacgcucgugaagcagcuguccagcaacuucggcgccaucuccagcgugcugaacgacauccucucccgccuggacaaggucgaggccgaggugcagaucgaccggcugaucaccgggcgccuccagagccugcagaccuacgugacccagcagcugauccgggcggccgagauccgcgccagcgccaaccucgccgcgaccaagauguccgagugcguccugggccagagcaagcggguggacuucugcggcaagggguaccaccugauguccuucccccagagcgccccgcacggcguggucuuccuccacgugacguacguccccgcccaggagaagaacuucaccaccgcccccgcgaucugccacgacgggaaggcccacuucccccgcgagggcguguucguguccaacgggacccacugguucgucacgcagcggaacuucuacgagccgcagaucaucaccaccgacaacaccuucgugagcggcaacugcgacguggucaucggcaucgugaacaacacgguguacgacccccugcagcccgagcuggacuccuucaaggaggagcucgacaaguacuucaagaaccacaccagccccgacgucgaccugggggacaucuccggcaucaacgccagcguggugaacauccagaaggagaucgaccgccugaacgaggucgccaagaaccucaacgagucccugaucgaccugcaggagcucgggaaguacgagcaguacaucaagggcgggagcggcuacauccccgaggccccgcgcgacgggcaggccuacgugcggaaggacggcgaguggguccugcucagcaccuuccugugaggacuagucccuguucccagagcccacuuuuuuuucuuuuuuugaaauaaaauagccugucuuucagaucucaaaggcucuuuucagagccaccaaaaaaaaaaaaaaaaaaaaaaaaaaaaaaaaaaaaaaaaaaaaaaaaaaaaaaaaaaaaaaaaaaaaaaaaaaaaaaaaaaaaaaaaaaaaaaaaaaaaa

SEQ ID NO: 12384 - RNA, 3998 nt, Artificial Sequence
  SARS-CoV-2/Wuhan/WIV05/2019__EPI_ISL_402128 spike protein mRNA gc (1-1211)(K986P_V987P) Foldon construct
aggagagucccgcagucggcguccagcggcucugcuuguucgugugugugucguugcaggccuuauucaagcuuaccauguucguguuccugguccuccugccccuggugagcucccagugcgugaaccucaccacccgcacgcagcugccgcccgccuacaccaacagcuucacccggggcgucuacuaccccgacaagguguuccgcuccagcgugcugcacuccacccaggaccucuuccugcccuucuucagcaacgucacgugguuccacgccauccacguguccgggaccaacggcaccaagcgguucgacaacccggugcugcccuucaacgacggggucuacuucgcgagcaccgagaaguccaacaucauccgcggcuggaucuucgggacgacccucgacagcaagacccagucccugcugaucgugaacaacgccaccaacguggucaucaaggugugcgaguuccaguucugcaacgaccccuuccucggcguguacuaccacaagaacaacaagagcuggauggaguccgaguuccgggucuacagcuccgccaacaacugcacguucgaguacgugagccagcccuuccugauggaccuggagggcaagcaggggaacuucaagaaccuccgcgaguucguguucaagaacaucgacggcuacuucaagaucuacuccaagcacaccccgaucaaccugguccgggaccugccccagggguucagcgcccucgagccccugguggaccugcccaucggcaucaacaucacccgcuuccagacccuccuggcccugcaccgguccuaccucacgccgggggacagcagcuccggcuggaccgcgggcgccgccgccuacuacgugggguaccugcagccccgcaccuuccugcucaaguacaacgagaacggcaccaucacggacgcggucgacugcgcccuggacccccugagcgagaccaagugcacccucaaguccuucaccguggagaaggggaucuaccagacgagcaacuuccgggugcagcccaccgaguccaucguccgcuucccgaacaucaccaaccugugccccuucggcgagguguucaacgccacccgguucgccagcgucuacgccuggaaccgcaagcggaucuccaacugcguggcggacuacagcgugcuguacaacuccgccagcuucuccacguucaagugcuacggcgucagccccaccaagcucaacgaccugugcuucaccaacguguacgccgacuccuucgugauccgcggggacgagguccggcagaucgcccccggccagaccgggaagaucgccgacuacaacuacaagcugccggacgacuucacgggcugcgugaucgcguggaacagcaacaaccucgacuccaaggucgggggcaacuacaacuaccuguaccgccuguuccgcaagagcaaccucaagcccuucgagcgggacaucuccaccgagaucuaccaggccggcagcacccccugcaacgggguggagggcuucaacugcuacuucccccugcaguccuacggguuccagccgaccaacggcgugggguaccagcccuaccggguggucgugcugagcuucgagcuccugcacgcccccgccacggugugcggccccaagaaguccaccaaccuggucaagaacaagugcgugaacuucaacuucaacggccucaccgggaccggcgugcugaccgagagcaacaagaaguuccugccguuccagcaguucgggcgcgacaucgccgacacgaccgacgcgguccgcgacccccagacccuggagauccucgacaucacccccugcagcuucggcgggguguccgugaucacgccgggcaccaacaccagcaaccaggucgccgugcuguaccaggacgugaacugcaccgagguccccguggccauccacgccgaccagcugacgcccaccuggcggguguacuccaccggcagcaacgucuuccagacccgcgccgggugccucaucggcgcggagcacgugaacaacuccuacgagugcgacauccccaucggggccggcaucugcgccagcuaccagacgcagaccaacuccccgcggcgcgcccggagcguggcgucccagagcaucaucgccuacaccaugucccugggcgccgagaacagcgucgccuacuccaacaacagcaucgccauccccaccaacuucacgaucuccgugaccaccgagauccugcccgugagcaugaccaagacgagcgucgacugcaccauguacaucugcggggacuccaccgagugcagcaaccuccugcugcaguacggcuccuucugcacccagcucaaccgcgcgcugacggggaucgccguggagcaggacaagaacacccaggagguguucgcccaggucaagcagaucuacaagacgcccccgaucaaggacuucggcggguucaacuucagccagauccugcccgaccccuccaagcccagcaagcgguccuucaucgaggaccuccuguucaacaaggugacccuggccgacgccggcuucaucaagcaguacggcgacugccucggggacaucgcggcccgcgaccugaucugcgcccagaaguucaacggccugaccgugcucccgccccugcugaccgacgagaugaucgcccaguacaccagcgcccuccuggcggggaccaucacguccggcuggaccuucggggccggcgccgcccugcagauccccuucgcgaugcagauggccuaccgguucaacggcaucggggucacccagaacgugcucuacgagaaccagaagcugaucgccaaccaguucaacagcgccaucggcaagauccaggacucccugagcuccaccgccagcgcgcucgggaagcugcaggacguggucaaccagaacgcccaggcccugaacacgcucgugaagcagcuguccagcaacuucggcgccaucuccagcgugcugaacgacauccucucccgccuggacccgcccgaggccgaggugcagaucgaccggcugaucaccgggcgccuccagagccugcagaccuacgugacccagcagcugauccgggcggccgagauccgcgccagcgccaaccucgccgcgaccaagauguccgagugcguccugggccagagcaagcggguggacuucugcggcaagggguaccaccugauguccuucccccagagcgccccgcacggcguggucuuccuccacgugacguacguccccgcccaggagaagaacuucaccaccgcccccgcgaucugccacgacgggaaggcccacuucccccgcgagggcguguucguguccaacgggacccacugguucgucacgcagcggaacuucuacgagccgcagaucaucaccaccgacaacaccuucgugagcggcaacugcgacguggucaucggcaucgugaacaacacgguguacgacccccugcagcccgagcuggacuccuucaaggaggagcucgacaaguacuucaagaaccacaccagccccgacgucgaccugggggacaucuccggcaucaacgccagcguggugaacauccagaaggagaucgaccgccugaacgaggucgccaagaaccucaacgagucccugaucgaccugcaggagcucgggaaguacgagcaguacaucaagggcgggagcggcuacauccccgaggccccgcgcgacgggcaggccuacgugcggaaggacggcgaguggguccugcucagcaccuuccugugaggacuagucccuguucccagagcccacuuuuuuuucuuuuuuugaaauaaaauagccugucuuucagaucucaaaggcucuuuucagagccaccaaaaaaaaaaaaaaaaaaaaaaaaaaaaaaaaaaaaaaaaaaaaaaaaaaaaaaaaaaaaaaaaaaaaaaaaaaaaaaaaaaaaaaaaaaaaaaaaaaaaa

SEQ ID NO: 12385 - RNA, 3998 nt, Artificial Sequence
  SARS-CoV-2/Wuhan/WIV05/2019__EPI_ISL_402128 spike protein mRNA gc (1-1211)(K986P_V987P_T887WN_A1020W) Foldon construct
aggagagucccgcagucggcguccagcggcucugcuuguucgugugugugucguugcaggccuuauucaagcuuaccauguucguguuccugguccuccugccccuggugagcucccagugcgugaaccucaccacccgcacgcagcugccgcccgccuacaccaacagcuucacccggggcgucuacuaccccgacaagguguuccgcuccagcgugcugcacuccacccaggaccucuuccugcccuucuucagcaacgucacgugguuccacgccauccacguguccgggaccaacggcaccaagcgguucgacaacccggugcugcccuucaacgacggggucuacuucgcgagcaccgagaaguccaacaucauccgcggcuggaucuucgggacgacccucgacagcaagacccagucccugcugaucgugaacaacgccaccaacguggucaucaaggugugcgaguuccaguucugcaacgaccccuuccucggcguguacuaccacaagaacaacaagagcuggauggaguccgaguuccgggucuacagcuccgccaacaacugcacguucgaguacgugagccagcccuuccugauggaccuggagggcaagcaggggaacuucaagaaccuccgcgaguucguguucaagaacaucgacggcuacuucaagaucuacuccaagcacaccccgaucaaccugguccgggaccugccccagggguucagcgcccucgagccccugguggaccugcccaucggcaucaacaucacccgcuuccagacccuccuggcccugcaccgguccuaccucacgccgggggacagcagcuccggcuggaccgcgggcgccgccgccuacuacgugggguaccugcagccccgcaccuuccugcucaaguacaacgagaacggcaccaucacggacgcggucgacugcgcccuggacccccugagcgagaccaagugcacccucaaguccuucaccguggagaaggggaucuaccagacgagcaacuuccgggugcagcccaccgaguccaucguccgcuucccgaacaucaccaaccugugccccuucggcgagguguucaacgccacccgguucgccagcgucuacgccuggaaccgcaagcggaucuccaacugcguggcggacuacagcgugcuguacaacuccgccagcuucuccacguucaagugcuacggcgucagccccaccaagcucaacgaccugugcuucaccaacguguacgccgacuccuucgugauccgcggggacgagguccggcagaucgcccccggccagaccgggaagaucgccgacuacaacuacaagcugccggacgacuucacgggcugcgugaucgcguggaacagcaacaaccucgacuccaaggucgggggcaacuacaacuaccuguaccgccuguuccgcaagagcaaccucaagcccuucgagcgggacaucuccaccgagaucuaccaggccggcagcacccccugcaacgggguggagggcuucaacugcuacuucccccugcaguccuacggguuccagccgaccaacggcgugggguaccagcccuaccggguggucgugcugagcuucgagcuccugcacgcccccgccacggugugcggccccaagaaguccaccaaccuggucaagaacaagugcgugaacuucaacuucaacggccucaccgggaccggcgugcugaccgagagcaacaagaaguuccugccguuccagcaguucgggcgcgacaucgccgacacgaccgacgcgguccgcgacccccagacccuggagauccucgacaucacccccugcagcuucggcgggguguccgugaucacgccgggcaccaacaccagcaaccaggucgccgugcuguaccaggacgugaacugcaccgagguccccguggccauccacgccgaccagcugacgcccaccuggcggguguacuccaccggcagcaacgucuuccagacccgcgccgggugccucaucggcgcggagcacgugaacaacuccuacgagugcgacauccccaucggggccggcaucugcgccagcuaccagacgcagaccaacuccccgcggcgcgcccggagcguggcgucccagagcaucaucgccuacaccaugucccugggcgccgagaacagcgucgccuacuccaacaacagcaucgccauccccaccaacuucacgaucuccgugaccaccgagauccugcccgugagcaugaccaagacgagcgucgacugcaccauguacaucugcggggacuccaccgagugcagcaaccuccugcugcaguacggcuccuucugcacccagcucaaccgcgcgcugacggggaucgccguggagcaggacaagaacacccaggagguguucgcccaggucaagcagaucuacaagacgcccccgaucaaggacuucggcggguucaacuucagccagauccugcccgaccccuccaagcccagcaagcgguccuucaucgaggaccuccuguucaacaaggugacccuggccgacgccggcuucaucaagcaguacggcgacugccucggggacaucgcggcccgcgaccugaucugcgcccagaaguucaacggccugaccgugcucccgccccugcugaccgacgagaugaucgcccaguacaccagcgcccuccuggcggggaccaucacguccggcuggugguucggggccggcgccgcccugcagauccccuucgcgaugcagauggccuaccgguucaacggcaucggggucacccagaacgugcucuacgagaaccagaagcugaucgccaaccaguucaacagcgccaucggcaagauccaggacucccugagcuccaccgccagcgcgcucgggaagcugcaggacguggucaaccagaacgcccaggcccugaacacgcucgugaagcagcuguccagcaacuucggcgccaucuccagcgugcugaacgacauccucucccgccuggacccgcccgaggccgaggugcagaucgaccggcugaucaccgggcgccuccagagccugcagaccuacgugacccagcagcugauccgggcggccgagauccgcuggagcgccaaccucgccgcgaccaagauguccgagugcguccugggccagagcaagcggguggacuucugcggcaagggguaccaccugauguccuucccccagagcgccccgcacggcguggucuuccuccacgugacguacguccccgcccaggagaagaacuucaccaccgcccccgcgaucugccacgacgggaaggcccacuucccccgcgagggcguguucguguccaacgggacccacugguucgucacgcagcggaacuucuacgagccgcagaucaucaccaccgacaacaccuucgugagcggcaacugcgacguggucaucggcaucgugaacaacacgguguacgacccccugcagcccgagcuggacuccuucaaggaggagcucgacaaguacuucaagaaccacaccagccccgacgucgaccugggggacaucuccggcaucaacgccagcguggugaacauccagaaggagaucgaccgccugaacgaggucgccaagaaccucaacgagucccugaucgaccugcaggagcucgggaaguacgagcaguacaucaagggcgggagcggcuacauccccgaggccccgcgcgacgggcaggccuacgugcggaaggacggcgaguggguccugcucagcaccuuccugugaggacuagucccuguucccagagcccacuuuuuuuucuuuuuuugaaauaaaauagccugucuuucagaucucaaaggcucuuuucagagccaccaaaaaaaaaaaaaaaaaaaaaaaaaaaaaaaaaaaaaaaaaaaaaaaaaaaaaaaaaaaaaaaaaaaaaaaaaaaaaaaaaaaaaaaaaaaaaaaaaaaaa

SEQ ID NO: 12386 - RNA, 3998 nt, Artificial Sequence
  SARS-CoV-2/Wuhan/WIV05/2019__EPI_ISL_402128 spike protein mRNA gc (1-1211)(K986P_V987P_P1069F) Foldon construct
aggagagucccgcagucggcguccagcggcucugcuuguucgugugugugucguugcaggccuuauucaagcuuaccauguucguguuccugguccuccugccccuggugagcucccagugcgugaaccucaccacccgcacgcagcugccgcccgccuacaccaacagcuucacccggggcgucuacuaccccgacaagguguuccgcuccagcgugcugcacuccacccaggaccucuuccugcccuucuucagcaacgucacgugguuccacgccauccacguguccgggaccaacggcaccaagcgguucgacaacccggugcugcccuucaacgacggggucuacuucgcgagcaccgagaaguccaacaucauccgcggcuggaucuucgggacgacccucgacagcaagacccagucccugcugaucgugaacaacgccaccaacguggucaucaaggugugcgaguuccaguucugcaacgaccccuuccucggcguguacuaccacaagaacaacaagagcuggauggaguccgaguuccgggucuacagcuccgccaacaacugcacguucgaguacgugagccagcccuuccugauggaccuggagggcaagcaggggaacuucaagaaccuccgcgaguucguguucaagaacaucgacggcuacuucaagaucuacuccaagcacaccccgaucaaccugguccgggaccugccccagggguucagcgcccucgagccccugguggaccugcccaucggcaucaacaucacccgcuuccagacccuccuggcccugcaccgguccuaccucacgccgggggacagcagcuccggcuggaccgcgggcgccgccgccuacuacgugggguaccugcagccccgcaccuuccugcucaaguacaacgagaacggcaccaucacggacgcggucgacugcgcccuggacccccugagcgagaccaagugcacccucaaguccuucaccguggagaaggggaucuaccagacgagcaacuuccgggugcagcccaccgaguccaucguccgcuucccgaacaucaccaaccugugccccuucggcgagguguucaacgccacccgguucgccagcgucuacgccuggaaccgcaagcggaucuccaacugcguggcggacuacagcgugcuguacaacuccgccagcuucuccacguucaagugcuacggcgucagccccaccaagcucaacgaccugugcuucaccaacguguacgccgacuccuucgugauccgcggggacgagguccggcagaucgcccccggccagaccgggaagaucgccgacuacaacuacaagcugccggacgacuucacgggcugcgugaucgcguggaacagcaacaaccucgacuccaaggucgggggcaacuacaacuaccuguaccgccuguuccgcaagagcaaccucaagcccuucgagcgggacaucuccaccgagaucuaccaggccggcagcacccccugcaacgggguggagggcuucaacugcuacuucccccugcaguccuacggguuccagccgaccaacggcgugggguaccagcccuaccggguggucgugcugagcuucgagcuccugcacgcccccgccacggugugcggccccaagaaguccaccaaccuggucaagaacaagugcgugaacuucaacuucaacggccucaccgggaccggcgugcugaccgagagcaacaagaaguuccugccguuccagcaguucgggcgcgacaucgccgacacgaccgacgcgguccgcgacccccagacccuggagauccucgacaucacccccugcagcuucggcgggguguccgugaucacgccgggcaccaacaccagcaaccaggucgccgugcuguaccaggacgugaacugcaccgagguccccguggccauccacgccgaccagcugacgcccaccuggcggguguacuccaccggcagcaacgucuuccagacccgcgccgggugccucaucggcgcggagcacgugaacaacuccuacgagugcgacauccccaucggggccggcaucugcgccagcuaccagacgcagaccaacuccccgcggcgcgcccggagcguggcgucccagagcaucaucgccuacaccaugucccugggcgccgagaacagcgucgccuacuccaacaacagcaucgccauccccaccaacuucacgaucuccgugaccaccgagauccugcccgugagcaugaccaagacgagcgucgacugcaccauguacaucugcggggacuccaccgagugcagcaaccuccugcugcaguacggcuccuucugcacccagcucaaccgcgcgcugacggggaucgccguggagcaggacaagaacacccaggagguguucgcccaggucaagcagaucuacaagacgcccccgaucaaggacuucggcggguucaacuucagccagauccugcccgaccccuccaagcccagcaagcgguccuucaucgaggaccuccuguucaacaaggugacccuggccgacgccggcuucaucaagcaguacggcgacugccucggggacaucgcggcccgcgaccugaucugcgcccagaaguucaacggccugaccgugcucccgccccugcugaccgacgagaugaucgcccaguacaccagcgcccuccuggcggggaccaucacguccggcuggaccuucggggccggcgccgcccugcagauccccuucgcgaugcagauggccuaccgguucaacggcaucggggucacccagaacgugcucuacgagaaccagaagcugaucgccaaccaguucaacagcgccaucggcaagauccaggacucccugagcuccaccgccagcgcgcucgggaagcugcaggacguggucaaccagaacgcccaggcccugaacacgcucgugaagcagcuguccagcaacuucggcgccaucuccagcgugcugaacgacauccucucccgccuggacccgcccgaggccgaggugcagaucgaccggcugaucaccgggcgccuccagagccugcagaccuacgugacccagcagcugauccgggcggccgagauccgcgccagcgccaaccucgccgcgaccaagauguccgagugcguccugggccagagcaagcggguggacuucugcggcaagggguaccaccugauguccuucccccagagcgccccgcacggcguggucuuccuccacgugacguacgucuucgcccaggagaagaacuucaccaccgcccccgcgaucugccacgacgggaaggcccacuucccccgcgagggcguguucguguccaacgggacccacugguucgucacgcagcggaacuucuacgagccgcagaucaucaccaccgacaacaccuucgugagcggcaacugcgacguggucaucggcaucgugaacaacacgguguacgacccccugcagcccgagcuggacuccuucaaggaggagcucgacaaguacuucaagaaccacaccagccccgacgucgaccugggggacaucuccggcaucaacgccagcguggugaacauccagaaggagaucgaccgccugaacgaggucgccaagaaccucaacgagucccugaucgaccugcaggagcucgggaaguacgagcaguacaucaagggcgggagcggcuacauccccgaggccccgcgcgacgggcaggccuacgugcggaaggacggcgaguggguccugcucagcaccuuccugugaggacuagucccuguucccagagcccacuuuuuuuucuuuuuuugaaauaaaauagccugucuuucagaucucaaaggcucuuuucagagccaccaaaaaaaaaaaaaaaaaaaaaaaaaaaaaaaaaaaaaaaaaaaaaaaaaaaaaaaaaaaaaaaaaaaaaaaaaaaaaaaaaaaaaaaaaaaaaaaaaaaaa

SEQ ID NO: 12387 - RNA, 3998 nt, Artificial Sequence
  SARS-CoV-2/Wuhan/WIV05/2019__EPI_ISL_402128 spike protein mRNA gc (1-1211)(K986P_V987P_ H1048Q_H1064N_ H1083N_H1101N) Foldon construct
aggagagucccgcagucggcguccagcggcucugcuuguucgugugugugucguugcaggccuuauucaagcuuaccauguucguguuccugguccuccugccccuggugagcucccagugcgugaaccucaccacccgcacgcagcugccgcccgccuacaccaacagcuucacccggggcgucuacuaccccgacaagguguuccgcuccagcgugcugcacuccacccaggaccucuuccugcccuucuucagcaacgucacgugguuccacgccauccacguguccgggaccaacggcaccaagcgguucgacaacccggugcugcccuucaacgacggggucuacuucgcgagcaccgagaaguccaacaucauccgcggcuggaucuucgggacgacccucgacagcaagacccagucccugcugaucgugaacaacgccaccaacguggucaucaaggugugcgaguuccaguucugcaacgaccccuuccucggcguguacuaccacaagaacaacaagagcuggauggaguccgaguuccgggucuacagcuccgccaacaacugcacguucgaguacgugagccagcccuuccugauggaccuggagggcaagcaggggaacuucaagaaccuccgcgaguucguguucaagaacaucgacggcuacuucaagaucuacuccaagcacaccccgaucaaccugguccgggaccugccccagggguucagcgcccucgagccccugguggaccugcccaucggcaucaacaucacccgcuuccagacccuccuggcccugcaccgguccuaccucacgccgggggacagcagcuccggcuggaccgcgggcgccgccgccuacuacgugggguaccugcagccccgcaccuuccugcucaaguacaacgagaacggcaccaucacggacgcggucgacugcgcccuggacccccugagcgagaccaagugcacccucaaguccuucaccguggagaaggggaucuaccagacgagcaacuuccgggugcagcccaccgaguccaucguccgcuucccgaacaucaccaaccugugccccuucggcgagguguucaacgccacccgguucgccagcgucuacgccuggaaccgcaagcggaucuccaacugcguggcggacuacagcgugcuguacaacuccgccagcuucuccacguucaagugcuacggcgucagccccaccaagcucaacgaccugugcuucaccaacguguacgccgacuccuucgugauccgcggggacgagguccggcagaucgcccccggccagaccgggaagaucgccgacuacaacuacaagcugccggacgacuucacgggcugcgugaucgcguggaacagcaacaaccucgacuccaaggucgggggcaacuacaacuaccuguaccgccuguuccgcaagagcaaccucaagcccuucgagcgggacaucuccaccgagaucuaccaggccggcagcacccccugcaacgggguggagggcuucaacugcuacuucccccugcaguccuacggguuccagccgaccaacggcgugggguaccagcccuaccggguggucgugcugagcuucgagcuccugcacgcccccgccacggugugcggccccaagaaguccaccaaccuggucaagaacaagugcgugaacuucaacuucaacggccucaccgggaccggcgugcugaccgagagcaacaagaaguuccugccguuccagcaguucgggcgcgacaucgccgacacgaccgacgcgguccgcgacccccagacccuggagauccucgacaucacccccugcagcuucggcgggguguccgugaucacgccgggcaccaacaccagcaaccaggucgccgugcuguaccaggacgugaacugcaccgagguccccguggccauccacgccgaccagcugacgcccaccuggcggguguacuccaccggcagcaacgucuuccagacccgcgccgggugccucaucggcgcggagcacgugaacaacuccuacgagugcgacauccccaucggggccggcaucugcgccagcuaccagacgcagaccaacuccccgcggcgcgcccggagcguggcgucccagagcaucaucgccuacaccaugucccugggcgccgagaacagcgucgccuacuccaacaacagcaucgccauccccaccaacuucacgaucuccgugaccaccgagauccugcccgugagcaugaccaagacgagcgucgacugcaccauguacaucugcggggacuccaccgagugcagcaaccuccugcugcaguacggcuccuucugcacccagcucaaccgcgcgcugacggggaucgccguggagcaggacaagaacacccaggagguguucgcccaggucaagcagaucuacaagacgcccccgaucaaggacuucggcggguucaacuucagccagauccugcccgaccccuccaagcccagcaagcgguccuucaucgaggaccuccuguucaacaaggugacccuggccgacgccggcuucaucaagcaguacggcgacugccucggggacaucgcggcccgcgaccugaucugcgcccagaaguucaacggccugaccgugcucccgccccugcugaccgacgagaugaucgcccaguacaccagcgcccuccuggcggggaccaucacguccggcuggaccuucggggccggcgccgcccugcagauccccuucgcgaugcagauggccuaccgguucaacggcaucggggucacccagaacgugcucuacgagaaccagaagcugaucgccaaccaguucaacagcgccaucggcaagauccaggacucccugagcuccaccgccagcgcgcucgggaagcugcaggacguggucaaccagaacgcccaggcccugaacacgcucgugaagcagcuguccagcaacuucggcgccaucuccagcgugcugaacgacauccucucccgccuggacccgcccgaggccgaggugcagaucgaccggcugaucaccgggcgccuccagagccugcagaccuacgugacccagcagcugauccgggcggccgagauccgcgccagcgccaaccucgccgcgaccaagauguccgagugcguccugggccagagcaagcggguggacuucugcggcaagggguaccagcugauguccuucccccagagcgccccgcacggcguggucuuccucaacgugacguacguccccgcccaggagaagaacuucaccaccgcccccgcgaucugcaacgacgggaaggcccacuucccccgcgagggcguguucguguccaacgggaccaacugguucgucacgcagcggaacuucuacgagccgcagaucaucaccaccgacaacaccuucgugagcggcaacugcgacguggucaucggcaucgugaacaacacgguguacgacccccugcagcccgagcuggacuccuucaaggaggagcucgacaaguacuucaagaaccacaccagccccgacgucgaccugggggacaucuccggcaucaacgccagcguggugaacauccagaaggagaucgaccgccugaacgaggucgccaagaaccucaacgagucccugaucgaccugcaggagcucgggaaguacgagcaguacaucaagggcgggagcggcuacauccccgaggccccgcgcgacgggcaggccuacgugcggaaggacggcgaguggguccugcucagcaccuuccugugaggacuagucccuguucccagagcccacuuuuuuuucuuuuuuugaaauaaaauagccugucuuucagaucucaaaggcucuuuucagagccaccaaaaaaaaaaaaaaaaaaaaaaaaaaaaaaaaaaaaaaaaaaaaaaaaaaaaaaaaaaaaaaaaaaaaaaaaaaaaaaaaaaaaaaaaaaaaaaaaaaaaa

SEQ ID NO: 12388 - RNA, 3998 nt, Artificial Sequence
  SARS-CoV-2/Wuhan/WIV05/2019__EPI_ISL_402128 spike protein mRNA gc (1-1211)(I712C_T1077C) Foldon construct
aggagagucccgcagucggcguccagcggcucugcuuguucgugugugugucguugcaggccuuauucaagcuuaccauguucguguuccugguccuccugccccuggugagcucccagugcgugaaccucaccacccgcacgcagcugccgcccgccuacaccaacagcuucacccggggcgucuacuaccccgacaagguguuccgcuccagcgugcugcacuccacccaggaccucuuccugcccuucuucagcaacgucacgugguuccacgccauccacguguccgggaccaacggcaccaagcgguucgacaacccggugcugcccuucaacgacggggucuacuucgcgagcaccgagaaguccaacaucauccgcggcuggaucuucgggacgacccucgacagcaagacccagucccugcugaucgugaacaacgccaccaacguggucaucaaggugugcgaguuccaguucugcaacgaccccuuccucggcguguacuaccacaagaacaacaagagcuggauggaguccgaguuccgggucuacagcuccgccaacaacugcacguucgaguacgugagccagcccuuccugauggaccuggagggcaagcaggggaacuucaagaaccuccgcgaguucguguucaagaacaucgacggcuacuucaagaucuacuccaagcacaccccgaucaaccugguccgggaccugccccagggguucagcgcccucgagccccugguggaccugcccaucggcaucaacaucacccgcuuccagacccuccuggcccugcaccgguccuaccucacgccgggggacagcagcuccggcuggaccgcgggcgccgccgccuacuacgugggguaccugcagccccgcaccuuccugcucaaguacaacgagaacggcaccaucacggacgcggucgacugcgcccuggacccccugagcgagaccaagugcacccucaaguccuucaccguggagaaggggaucuaccagacgagcaacuuccgggugcagcccaccgaguccaucguccgcuucccgaacaucaccaaccugugccccuucggcgagguguucaacgccacccgguucgccagcgucuacgccuggaaccgcaagcggaucuccaacugcguggcggacuacagcgugcuguacaacuccgccagcuucuccacguucaagugcuacggcgucagccccaccaagcucaacgaccugugcuucaccaacguguacgccgacuccuucgugauccgcggggacgagguccggcagaucgcccccggccagaccgggaagaucgccgacuacaacuacaagcugccggacgacuucacgggcugcgugaucgcguggaacagcaacaaccucgacuccaaggucgggggcaacuacaacuaccuguaccgccuguuccgcaagagcaaccucaagcccuucgagcgggacaucuccaccgagaucuaccaggccggcagcacccccugcaacgggguggagggcuucaacugcuacuucccccugcaguccuacggguuccagccgaccaacggcgugggguaccagcccuaccggguggucgugcugagcuucgagcuccugcacgcccccgccacggugugcggccccaagaaguccaccaaccuggucaagaacaagugcgugaacuucaacuucaacggccucaccgggaccggcgugcugaccgagagcaacaagaaguuccugccguuccagcaguucgggcgcgacaucgccgacacgaccgacgcgguccgcgacccccagacccuggagauccucgacaucacccccugcagcuucggcgggguguccgugaucacgccgggcaccaacaccagcaaccaggucgccgugcuguaccaggacgugaacugcaccgagguccccguggccauccacgccgaccagcugacgcccaccuggcggguguacuccaccggcagcaacgucuuccagacccgcgccgggugccucaucggcgcggagcacgugaacaacuccuacgagugcgacauccccaucggggccggcaucugcgccagcuaccagacgcagaccaacuccccgcggcgcgcccggagcguggcgucccagagcaucaucgccuacaccaugucccugggcgccgagaacagcgucgccuacuccaacaacagcugcgccauccccaccaacuucacgaucuccgugaccaccgagauccugcccgugagcaugaccaagacgagcgucgacugcaccauguacaucugcggggacuccaccgagugcagcaaccuccugcugcaguacggcuccuucugcacccagcucaaccgcgcgcugacggggaucgccguggagcaggacaagaacacccaggagguguucgcccaggucaagcagaucuacaagacgcccccgaucaaggacuucggcggguucaacuucagccagauccugcccgaccccuccaagcccagcaagcgguccuucaucgaggaccuccuguucaacaaggugacccuggccgacgccggcuucaucaagcaguacggcgacugccucggggacaucgcggcccgcgaccugaucugcgcccagaaguucaacggccugaccgugcucccgccccugcugaccgacgagaugaucgcccaguacaccagcgcccuccuggcggggaccaucacguccggcuggaccuucggggccggcgccgcccugcagauccccuucgcgaugcagauggccuaccgguucaacggcaucggggucacccagaacgugcucuacgagaaccagaagcugaucgccaaccaguucaacagcgccaucggcaagauccaggacucccugagcuccaccgccagcgcgcucgggaagcugcaggacguggucaaccagaacgcccaggcccugaacacgcucgugaagcagcuguccagcaacuucggcgccaucuccagcgugcugaacgacauccucucccgccuggacaaggucgaggccgaggugcagaucgaccggcugaucaccgggcgccuccagagccugcagaccuacgugacccagcagcugauccgggcggccgagauccgcgccagcgccaaccucgccgcgaccaagauguccgagugcguccugggccagagcaagcggguggacuucugcggcaagggguaccaccugauguccuucccccagagcgccccgcacggcguggucuuccuccacgugacguacguccccgcccaggagaagaacuucaccugcgcccccgcgaucugccacgacgggaaggcccacuucccccgcgagggcguguucguguccaacgggacccacugguucgucacgcagcggaacuucuacgagccgcagaucaucaccaccgacaacaccuucgugagcggcaacugcgacguggucaucggcaucgugaacaacacgguguacgacccccugcagcccgagcuggacuccuucaaggaggagcucgacaaguacuucaagaaccacaccagccccgacgucgaccugggggacaucuccggcaucaacgccagcguggugaacauccagaaggagaucgaccgccugaacgaggucgccaagaaccucaacgagucccugaucgaccugcaggagcucgggaaguacgagcaguacaucaagggcgggagcggcuacauccccgaggccccgcgcgacgggcaggccuacgugcggaaggacggcgaguggguccugcucagcaccuuccugugaggacuagucccuguucccagagcccacuuuuuuuucuuuuuuugaaauaaaauagccugucuuucagaucucaaaggcucuuuucagagccaccaaaaaaaaaaaaaaaaaaaaaaaaaaaaaaaaaaaaaaaaaaaaaaaaaaaaaaaaaaaaaaaaaaaaaaaaaaaaaaaaaaaaaaaaaaaaaaaaaaaaa

SEQ ID NO: 12389 - RNA, 3998 nt, Artificial Sequence
  SARS-CoV-2/Wuhan/WIV05/2019__EPI_ISL_402128 spike protein mRNA gc (1-1211)(I714C_Y1110C) Foldon construct
aggagagucccgcagucggcguccagcggcucugcuuguucgugugugugucguugcaggccuuauucaagcuuaccauguucguguuccugguccuccugccccuggugagcucccagugcgugaaccucaccacccgcacgcagcugccgcccgccuacaccaacagcuucacccggggcgucuacuaccccgacaagguguuccgcuccagcgugcugcacuccacccaggaccucuuccugcccuucuucagcaacgucacgugguuccacgccauccacguguccgggaccaacggcaccaagcgguucgacaacccggugcugcccuucaacgacggggucuacuucgcgagcaccgagaaguccaacaucauccgcggcuggaucuucgggacgacccucgacagcaagacccagucccugcugaucgugaacaacgccaccaacguggucaucaaggugugcgaguuccaguucugcaacgaccccuuccucggcguguacuaccacaagaacaacaagagcuggauggaguccgaguuccgggucuacagcuccgccaacaacugcacguucgaguacgugagccagcccuuccugauggaccuggagggcaagcaggggaacuucaagaaccuccgcgaguucguguucaagaacaucgacggcuacuucaagaucuacuccaagcacaccccgaucaaccugguccgggaccugccccagggguucagcgcccucgagccccugguggaccugcccaucggcaucaacaucacccgcuuccagacccuccuggcccugcaccgguccuaccucacgccgggggacagcagcuccggcuggaccgcgggcgccgccgccuacuacgugggguaccugcagccccgcaccuuccugcucaaguacaacgagaacggcaccaucacggacgcggucgacugcgcccuggacccccugagcgagaccaagugcacccucaaguccuucaccguggagaaggggaucuaccagacgagcaacuuccgggugcagcccaccgaguccaucguccgcuucccgaacaucaccaaccugugccccuucggcgagguguucaacgccacccgguucgccagcgucuacgccuggaaccgcaagcggaucuccaacugcguggcggacuacagcgugcuguacaacuccgccagcuucuccacguucaagugcuacggcgucagccccaccaagcucaacgaccugugcuucaccaacguguacgccgacuccuucgugauccgcggggacgagguccggcagaucgcccccggccagaccgggaagaucgccgacuacaacuacaagcugccggacgacuucacgggcugcgugaucgcguggaacagcaacaaccucgacuccaaggucgggggcaacuacaacuaccuguaccgccuguuccgcaagagcaaccucaagcccuucgagcgggacaucuccaccgagaucuaccaggccggcagcacccccugcaacgggguggagggcuucaacugcuacuucccccugcaguccuacggguuccagccgaccaacggcgugggguaccagcccuaccggguggucgugcugagcuucgagcuccugcacgcccccgccacggugugcggccccaagaaguccaccaaccuggucaagaacaagugcgugaacuucaacuucaacggccucaccgggaccggcgugcugaccgagagcaacaagaaguuccugccguuccagcaguucgggcgcgacaucgccgacacgaccgacgcgguccgcgacccccagacccuggagauccucgacaucacccccugcagcuucggcgggguguccgugaucacgccgggcaccaacaccagcaaccaggucgccgugcuguaccaggacgugaacugcaccgagguccccguggccauccacgccgaccagcugacgcccaccuggcggguguacuccaccggcagcaacgucuuccagacccgcgccgggugccucaucggcgcggagcacgugaacaacuccuacgagugcgacauccccaucggggccggcaucugcgccagcuaccagacgcagaccaacuccccgcggcgcgcccggagcguggcgucccagagcaucaucgccuacaccaugucccugggcgccgagaacagcgucgccuacuccaacaacagcaucgccugccccaccaacuucacgaucuccgugaccaccgagauccugcccgugagcaugaccaagacgagcgucgacugcaccauguacaucugcggggacuccaccgagugcagcaaccuccugcugcaguacggcuccuucugcacccagcucaaccgcgcgcugacggggaucgccguggagcaggacaagaacacccaggagguguucgcccaggucaagcagaucuacaagacgcccccgaucaaggacuucggcggguucaacuucagccagauccugcccgaccccuccaagcccagcaagcgguccuucaucgaggaccuccuguucaacaaggugacccuggccgacgccggcuucaucaagcaguacggcgacugccucggggacaucgcggcccgcgaccugaucugcgcccagaaguucaacggccugaccgugcucccgccccugcugaccgacgagaugaucgcccaguacaccagcgcccuccuggcggggaccaucacguccggcuggaccuucggggccggcgccgcccugcagauccccuucgcgaugcagauggccuaccgguucaacggcaucggggucacccagaacgugcucuacgagaaccagaagcugaucgccaaccaguucaacagcgccaucggcaagauccaggacucccugagcuccaccgccagcgcgcucgggaagcugcaggacguggucaaccagaacgcccaggcccugaacacgcucgugaagcagcuguccagcaacuucggcgccaucuccagcgugcugaacgacauccucucccgccuggacaaggucgaggccgaggugcagaucgaccggcugaucaccgggcgccuccagagccugcagaccuacgugacccagcagcugauccgggcggccgagauccgcgccagcgccaaccucgccgcgaccaagauguccgagugcguccugggccagagcaagcggguggacuucugcggcaagggguaccaccugauguccuucccccagagcgccccgcacggcguggucuuccuccacgugacguacguccccgcccaggagaagaacuucaccaccgcccccgcgaucugccacgacgggaaggcccacuucccccgcgagggcguguucguguccaacgggacccacugguucgucacgcagcggaacuucugcgagccgcagaucaucaccaccgacaacaccuucgugagcggcaacugcgacguggucaucggcaucgugaacaacacgguguacgacccccugcagcccgagcuggacuccuucaaggaggagcucgacaaguacuucaagaaccacaccagccccgacgucgaccugggggacaucuccggcaucaacgccagcguggugaacauccagaaggagaucgaccgccugaacgaggucgccaagaaccucaacgagucccugaucgaccugcaggagcucgggaaguacgagcaguacaucaagggcgggagcggcuacauccccgaggccccgcgcgacgggcaggccuacgugcggaaggacggcgaguggguccugcucagcaccuuccugugaggacuagucccuguucccagagcccacuuuuuuuucuuuuuuugaaauaaaauagccugucuuucagaucucaaaggcucuuuucagagccaccaaaaaaaaaaaaaaaaaaaaaaaaaaaaaaaaaaaaaaaaaaaaaaaaaaaaaaaaaaaaaaaaaaaaaaaaaaaaaaaaaaaaaaaaaaaaaaaaaaaaa

SEQ ID NO: 12390 - RNA, 3998 nt, Artificial Sequence
  SARS-CoV-2/Wuhan/WIV05/2019__EPI_ISL_402128 spike protein mRNA gc (1-1211)(P715C_P1069C) Foldon construct
aggagagucccgcagucggcguccagcggcucugcuuguucgugugugugucguugcaggccuuauucaagcuuaccauguucguguuccugguccuccugccccuggugagcucccagugcgugaaccucaccacccgcacgcagcugccgcccgccuacaccaacagcuucacccggggcgucuacuaccccgacaagguguuccgcuccagcgugcugcacuccacccaggaccucuuccugcccuucuucagcaacgucacgugguuccacgccauccacguguccgggaccaacggcaccaagcgguucgacaacccggugcugcccuucaacgacggggucuacuucgcgagcaccgagaaguccaacaucauccgcggcuggaucuucgggacgacccucgacagcaagacccagucccugcugaucgugaacaacgccaccaacguggucaucaaggugugcgaguuccaguucugcaacgaccccuuccucggcguguacuaccacaagaacaacaagagcuggauggaguccgaguuccgggucuacagcuccgccaacaacugcacguucgaguacgugagccagcccuuccugauggaccuggagggcaagcaggggaacuucaagaaccuccgcgaguucguguucaagaacaucgacggcuacuucaagaucuacuccaagcacaccccgaucaaccugguccgggaccugccccagggguucagcgcccucgagccccugguggaccugcccaucggcaucaacaucacccgcuuccagacccuccuggcccugcaccgguccuaccucacgccgggggacagcagcuccggcuggaccgcgggcgccgccgccuacuacgugggguaccugcagccccgcaccuuccugcucaaguacaacgagaacggcaccaucacggacgcggucgacugcgcccuggacccccugagcgagaccaagugcacccucaaguccuucaccguggagaaggggaucuaccagacgagcaacuuccgggugcagcccaccgaguccaucguccgcuucccgaacaucaccaaccugugccccuucggcgagguguucaacgccacccgguucgccagcgucuacgccuggaaccgcaagcggaucuccaacugcguggcggacuacagcgugcuguacaacuccgccagcuucuccacguucaagugcuacggcgucagccccaccaagcucaacgaccugugcuucaccaacguguacgccgacuccuucgugauccgcggggacgagguccggcagaucgcccccggccagaccgggaagaucgccgacuacaacuacaagcugccggacgacuucacgggcugcgugaucgcguggaacagcaacaaccucgacuccaaggucgggggcaacuacaacuaccuguaccgccuguuccgcaagagcaaccucaagcccuucgagcgggacaucuccaccgagaucuaccaggccggcagcacccccugcaacgggguggagggcuucaacugcuacuucccccugcaguccuacggguuccagccgaccaacggcgugggguaccagcccuaccggguggucgugcugagcuucgagcuccugcacgcccccgccacggugugcggccccaagaaguccaccaaccuggucaagaacaagugcgugaacuucaacuucaacggccucaccgggaccggcgugcugaccgagagcaacaagaaguuccugccguuccagcaguucgggcgcgacaucgccgacacgaccgacgcgguccgcgacccccagacccuggagauccucgacaucacccccugcagcuucggcgggguguccgugaucacgccgggcaccaacaccagcaaccaggucgccgugcuguaccaggacgugaacugcaccgagguccccguggccauccacgccgaccagcugacgcccaccuggcggguguacuccaccggcagcaacgucuuccagacccgcgccgggugccucaucggcgcggagcacgugaacaacuccuacgagugcgacauccccaucggggccggcaucugcgccagcuaccagacgcagaccaacuccccgcggcgcgcccggagcguggcgucccagagcaucaucgccuacaccaugucccugggcgccgagaacagcgucgccuacuccaacaacagcaucgccaucugcaccaacuucacgaucuccgugaccaccgagauccugcccgugagcaugaccaagacgagcgucgacugcaccauguacaucugcggggacuccaccgagugcagcaaccuccugcugcaguacggcuccuucugcacccagcucaaccgcgcgcugacggggaucgccguggagcaggacaagaacacccaggagguguucgcccaggucaagcagaucuacaagacgcccccgaucaaggacuucggcggguucaacuucagccagauccugcccgaccccuccaagcccagcaagcgguccuucaucgaggaccuccuguucaacaaggugacccuggccgacgccggcuucaucaagcaguacggcgacugccucggggacaucgcggcccgcgaccugaucugcgcccagaaguucaacggccugaccgugcucccgccccugcugaccgacgagaugaucgcccaguacaccagcgcccuccuggcggggaccaucacguccggcuggaccuucggggccggcgccgcccugcagauccccuucgcgaugcagauggccuaccgguucaacggcaucggggucacccagaacgugcucuacgagaaccagaagcugaucgccaaccaguucaacagcgccaucggcaagauccaggacucccugagcuccaccgccagcgcgcucgggaagcugcaggacguggucaaccagaacgcccaggcccugaacacgcucgugaagcagcuguccagcaacuucggcgccaucuccagcgugcugaacgacauccucucccgccuggacaaggucgaggccgaggugcagaucgaccggcugaucaccgggcgccuccagagccugcagaccuacgugacccagcagcugauccgggcggccgagauccgcgccagcgccaaccucgccgcgaccaagauguccgagugcguccugggccagagcaagcggguggacuucugcggcaagggguaccaccugauguccuucccccagagcgccccgcacggcguggucuuccuccacgugacguacgucugcgcccaggagaagaacuucaccaccgcccccgcgaucugccacgacgggaaggcccacuucccccgcgagggcguguucguguccaacgggacccacugguucgucacgcagcggaacuucuacgagccgcagaucaucaccaccgacaacaccuucgugagcggcaacugcgacguggucaucggcaucgugaacaacacgguguacgacccccugcagcccgagcuggacuccuucaaggaggagcucgacaaguacuucaagaaccacaccagccccgacgucgaccugggggacaucuccggcaucaacgccagcguggugaacauccagaaggagaucgaccgccugaacgaggucgccaagaaccucaacgagucccugaucgaccugcaggagcucgggaaguacgagcaguacaucaagggcgggagcggcuacauccccgaggccccgcgcgacgggcaggccuacgugcggaaggacggcgaguggguccugcucagcaccuuccugugaggacuagucccuguucccagagcccacuuuuuuuucuuuuuuugaaauaaaauagccugucuuucagaucucaaaggcucuuuucagagccaccaaaaaaaaaaaaaaaaaaaaaaaaaaaaaaaaaaaaaaaaaaaaaaaaaaaaaaaaaaaaaaaaaaaaaaaaaaaaaaaaaaaaaaaaaaaaaaaaaaaaa

SEQ ID NO: 12391 - RNA, 3998 nt, Artificial Sequence
  SARS-CoV-2/Wuhan/WIV05/2019__EPI_ISL_402128 spike protein mRNA gc (1-1211)(G889C_L1034C) Foldon construct
aggagagucccgcagucggcguccagcggcucugcuuguucgugugugugucguugcaggccuuauucaagcuuaccauguucguguuccugguccuccugccccuggugagcucccagugcgugaaccucaccacccgcacgcagcugccgcccgccuacaccaacagcuucacccggggcgucuacuaccccgacaagguguuccgcuccagcgugcugcacuccacccaggaccucuuccugcccuucuucagcaacgucacgugguuccacgccauccacguguccgggaccaacggcaccaagcgguucgacaacccggugcugcccuucaacgacggggucuacuucgcgagcaccgagaaguccaacaucauccgcggcuggaucuucgggacgacccucgacagcaagacccagucccugcugaucgugaacaacgccaccaacguggucaucaaggugugcgaguuccaguucugcaacgaccccuuccucggcguguacuaccacaagaacaacaagagcuggauggaguccgaguuccgggucuacagcuccgccaacaacugcacguucgaguacgugagccagcccuuccugauggaccuggagggcaagcaggggaacuucaagaaccuccgcgaguucguguucaagaacaucgacggcuacuucaagaucuacuccaagcacaccccgaucaaccugguccgggaccugccccagggguucagcgcccucgagccccugguggaccugcccaucggcaucaacaucacccgcuuccagacccuccuggcccugcaccgguccuaccucacgccgggggacagcagcuccggcuggaccgcgggcgccgccgccuacuacgugggguaccugcagccccgcaccuuccugcucaaguacaacgagaacggcaccaucacggacgcggucgacugcgcccuggacccccugagcgagaccaagugcacccucaaguccuucaccguggagaaggggaucuaccagacgagcaacuuccgggugcagcccaccgaguccaucguccgcuucccgaacaucaccaaccugugccccuucggcgagguguucaacgccacccgguucgccagcgucuacgccuggaaccgcaagcggaucuccaacugcguggcggacuacagcgugcuguacaacuccgccagcuucuccacguucaagugcuacggcgucagccccaccaagcucaacgaccugugcuucaccaacguguacgccgacuccuucgugauccgcggggacgagguccggcagaucgcccccggccagaccgggaagaucgccgacuacaacuacaagcugccggacgacuucacgggcugcgugaucgcguggaacagcaacaaccucgacuccaaggucgggggcaacuacaacuaccuguaccgccuguuccgcaagagcaaccucaagcccuucgagcgggacaucuccaccgagaucuaccaggccggcagcacccccugcaacgggguggagggcuucaacugcuacuucccccugcaguccuacggguuccagccgaccaacggcgugggguaccagcccuaccggguggucgugcugagcuucgagcuccugcacgcccccgccacggugugcggccccaagaaguccaccaaccuggucaagaacaagugcgugaacuucaacuucaacggccucaccgggaccggcgugcugaccgagagcaacaagaaguuccugccguuccagcaguucgggcgcgacaucgccgacacgaccgacgcgguccgcgacccccagacccuggagauccucgacaucacccccugcagcuucggcgggguguccgugaucacgccgggcaccaacaccagcaaccaggucgccgugcuguaccaggacgugaacugcaccgagguccccguggccauccacgccgaccagcugacgcccaccuggcggguguacuccaccggcagcaacgucuuccagacccgcgccgggugccucaucggcgcggagcacgugaacaacuccuacgagugcgacauccccaucggggccggcaucugcgccagcuaccagacgcagaccaacuccccgcggcgcgcccggagcguggcgucccagagcaucaucgccuacaccaugucccugggcgccgagaacagcgucgccuacuccaacaacagcaucgccauccccaccaacuucacgaucuccgugaccaccgagauccugcccgugagcaugaccaagacgagcgucgacugcaccauguacaucugcggggacuccaccgagugcagcaaccuccugcugcaguacggcuccuucugcacccagcucaaccgcgcgcugacggggaucgccguggagcaggacaagaacacccaggagguguucgcccaggucaagcagaucuacaagacgcccccgaucaaggacuucggcggguucaacuucagccagauccugcccgaccccuccaagcccagcaagcgguccuucaucgaggaccuccuguucaacaaggugacccuggccgacgccggcuucaucaagcaguacggcgacugccucggggacaucgcggcccgcgaccugaucugcgcccagaaguucaacggccugaccgugcucccgccccugcugaccgacgagaugaucgcccaguacaccagcgcccuccuggcggggaccaucacguccggcuggaccuucugcgccggcgccgcccugcagauccccuucgcgaugcagauggccuaccgguucaacggcaucggggucacccagaacgugcucuacgagaaccagaagcugaucgccaaccaguucaacagcgccaucggcaagauccaggacucccugagcuccaccgccagcgcgcucgggaagcugcaggacguggucaaccagaacgcccaggcccugaacacgcucgugaagcagcuguccagcaacuucggcgccaucuccagcgugcugaacgacauccucucccgccuggacaaggucgaggccgaggugcagaucgaccggcugaucaccgggcgccuccagagccugcagaccuacgugacccagcagcugauccgggcggccgagauccgcgccagcgccaaccucgccgcgaccaagauguccgagugcgucugcggccagagcaagcggguggacuucugcggcaagggguaccaccugauguccuucccccagagcgccccgcacggcguggucuuccuccacgugacguacguccccgcccaggagaagaacuucaccaccgcccccgcgaucugccacgacgggaaggcccacuucccccgcgagggcguguucguguccaacgggacccacugguucgucacgcagcggaacuucuacgagccgcagaucaucaccaccgacaacaccuucgugagcggcaacugcgacguggucaucggcaucgugaacaacacgguguacgacccccugcagcccgagcuggacuccuucaaggaggagcucgacaaguacuucaagaaccacaccagccccgacgucgaccugggggacaucuccggcaucaacgccagcguggugaacauccagaaggagaucgaccgccugaacgaggucgccaagaaccucaacgagucccugaucgaccugcaggagcucgggaaguacgagcaguacaucaagggcgggagcggcuacauccccgaggccccgcgcgacgggcaggccuacgugcggaaggacggcgaguggguccugcucagcaccuuccugugaggacuagucccuguucccagagcccacuuuuuuuucuuuuuuugaaauaaaauagccugucuuucagaucucaaaggcucuuuucagagccaccaaaaaaaaaaaaaaaaaaaaaaaaaaaaaaaaaaaaaaaaaaaaaaaaaaaaaaaaaaaaaaaaaaaaaaaaaaaaaaaaaaaaaaaaaaaaaaaaaaaaa

SEQ ID NO: 12392 - RNA, 3998 nt, Artificial Sequence
  SARS-CoV-2/Wuhan/WIV05/2019__EPI_ISL_402128 spike protein mRNA gc (1-1211)(I909C_Y1047C) Foldon construct
aggagagucccgcagucggcguccagcggcucugcuuguucgugugugugucguugcaggccuuauucaagcuuaccauguucguguuccugguccuccugccccuggugagcucccagugcgugaaccucaccacccgcacgcagcugccgcccgccuacaccaacagcuucacccggggcgucuacuaccccgacaagguguuccgcuccagcgugcugcacuccacccaggaccucuuccugcccuucuucagcaacgucacgugguuccacgccauccacguguccgggaccaacggcaccaagcgguucgacaacccggugcugcccuucaacgacggggucuacuucgcgagcaccgagaaguccaacaucauccgcggcuggaucuucgggacgacccucgacagcaagacccagucccugcugaucgugaacaacgccaccaacguggucaucaaggugugcgaguuccaguucugcaacgaccccuuccucggcguguacuaccacaagaacaacaagagcuggauggaguccgaguuccgggucuacagcuccgccaacaacugcacguucgaguacgugagccagcccuuccugauggaccuggagggcaagcaggggaacuucaagaaccuccgcgaguucguguucaagaacaucgacggcuacuucaagaucuacuccaagcacaccccgaucaaccugguccgggaccugccccagggguucagcgcccucgagccccugguggaccugcccaucggcaucaacaucacccgcuuccagacccuccuggcccugcaccgguccuaccucacgccgggggacagcagcuccggcuggaccgcgggcgccgccgccuacuacgugggguaccugcagccccgcaccuuccugcucaaguacaacgagaacggcaccaucacggacgcggucgacugcgcccuggacccccugagcgagaccaagugcacccucaaguccuucaccguggagaaggggaucuaccagacgagcaacuuccgggugcagcccaccgaguccaucguccgcuucccgaacaucaccaaccugugccccuucggcgagguguucaacgccacccgguucgccagcgucuacgccuggaaccgcaagcggaucuccaacugcguggcggacuacagcgugcuguacaacuccgccagcuucuccacguucaagugcuacggcgucagccccaccaagcucaacgaccugugcuucaccaacguguacgccgacuccuucgugauccgcggggacgagguccggcagaucgcccccggccagaccgggaagaucgccgacuacaacuacaagcugccggacgacuucacgggcugcgugaucgcguggaacagcaacaaccucgacuccaaggucgggggcaacuacaacuaccuguaccgccuguuccgcaagagcaaccucaagcccuucgagcgggacaucuccaccgagaucuaccaggccggcagcacccccugcaacgggguggagggcuucaacugcuacuucccccugcaguccuacggguuccagccgaccaacggcgugggguaccagcccuaccggguggucgugcugagcuucgagcuccugcacgcccccgccacggugugcggccccaagaaguccaccaaccuggucaagaacaagugcgugaacuucaacuucaacggccucaccgggaccggcgugcugaccgagagcaacaagaaguuccugccguuccagcaguucgggcgcgacaucgccgacacgaccgacgcgguccgcgacccccagacccuggagauccucgacaucacccccugcagcuucggcgggguguccgugaucacgccgggcaccaacaccagcaaccaggucgccgugcuguaccaggacgugaacugcaccgagguccccguggccauccacgccgaccagcugacgcccaccuggcggguguacuccaccggcagcaacgucuuccagacccgcgccgggugccucaucggcgcggagcacgugaacaacuccuacgagugcgacauccccaucggggccggcaucugcgccagcuaccagacgcagaccaacuccccgcggcgcgcccggagcguggcgucccagagcaucaucgccuacaccaugucccugggcgccgagaacagcgucgccuacuccaacaacagcaucgccauccccaccaacuucacgaucuccgugaccaccgagauccugcccgugagcaugaccaagacgagcgucgacugcaccauguacaucugcggggacuccaccgagugcagcaaccuccugcugcaguacggcuccuucugcacccagcucaaccgcgcgcugacggggaucgccguggagcaggacaagaacacccaggagguguucgcccaggucaagcagaucuacaagacgcccccgaucaaggacuucggcggguucaacuucagccagauccugcccgaccccuccaagcccagcaagcgguccuucaucgaggaccuccuguucaacaaggugacccuggccgacgccggcuucaucaagcaguacggcgacugccucggggacaucgcggcccgcgaccugaucugcgcccagaaguucaacggccugaccgugcucccgccccugcugaccgacgagaugaucgcccaguacaccagcgcccuccuggcggggaccaucacguccggcuggaccuucggggccggcgccgcccugcagauccccuucgcgaugcagauggccuaccgguucaacggcugcggggucacccagaacgugcucuacgagaaccagaagcugaucgccaaccaguucaacagcgccaucggcaagauccaggacucccugagcuccaccgccagcgcgcucgggaagcugcaggacguggucaaccagaacgcccaggcccugaacacgcucgugaagcagcuguccagcaacuucggcgccaucuccagcgugcugaacgacauccucucccgccuggacaaggucgaggccgaggugcagaucgaccggcugaucaccgggcgccuccagagccugcagaccuacgugacccagcagcugauccgggcggccgagauccgcgccagcgccaaccucgccgcgaccaagauguccgagugcguccugggccagagcaagcggguggacuucugcggcaaggggugccaccugauguccuucccccagagcgccccgcacggcguggucuuccuccacgugacguacguccccgcccaggagaagaacuucaccaccgcccccgcgaucugccacgacgggaaggcccacuucccccgcgagggcguguucguguccaacgggacccacugguucgucacgcagcggaacuucuacgagccgcagaucaucaccaccgacaacaccuucgugagcggcaacugcgacguggucaucggcaucgugaacaacacgguguacgacccccugcagcccgagcuggacuccuucaaggaggagcucgacaaguacuucaagaaccacaccagccccgacgucgaccugggggacaucuccggcaucaacgccagcguggugaacauccagaaggagaucgaccgccugaacgaggucgccaagaaccucaacgagucccugaucgaccugcaggagcucgggaaguacgagcaguacaucaagggcgggagcggcuacauccccgaggccccgcgcgacgggcaggccuacgugcggaaggacggcgaguggguccugcucagcaccuuccugugaggacuagucccuguucccagagcccacuuuuuuuucuuuuuuugaaauaaaauagccugucuuucagaucucaaaggcucuuuucagagccaccaaaaaaaaaaaaaaaaaaaaaaaaaaaaaaaaaaaaaaaaaaaaaaaaaaaaaaaaaaaaaaaaaaaaaaaaaaaaaaaaaaaaaaaaaaaaaaaaaaaaa

SEQ ID NO: 12393 - RNA, 3998 nt, Artificial Sequence
  SARS-CoV-2/Wuhan/WIV05/2019__EPI_ISL_402128 spike protein mRNA gc (1-1211)(Q965C_S1003C) Foldon construct
aggagagucccgcagucggcguccagcggcucugcuuguucgugugugugucguugcaggccuuauucaagcuuaccauguucguguuccugguccuccugccccuggugagcucccagugcgugaaccucaccacccgcacgcagcugccgcccgccuacaccaacagcuucacccggggcgucuacuaccccgacaagguguuccgcuccagcgugcugcacuccacccaggaccucuuccugcccuucuucagcaacgucacgugguuccacgccauccacguguccgggaccaacggcaccaagcgguucgacaacccggugcugcccuucaacgacggggucuacuucgcgagcaccgagaaguccaacaucauccgcggcuggaucuucgggacgacccucgacagcaagacccagucccugcugaucgugaacaacgccaccaacguggucaucaaggugugcgaguuccaguucugcaacgaccccuuccucggcguguacuaccacaagaacaacaagagcuggauggaguccgaguuccgggucuacagcuccgccaacaacugcacguucgaguacgugagccagcccuuccugauggaccuggagggcaagcaggggaacuucaagaaccuccgcgaguucguguucaagaacaucgacggcuacuucaagaucuacuccaagcacaccccgaucaaccugguccgggaccugccccagggguucagcgcccucgagccccugguggaccugcccaucggcaucaacaucacccgcuuccagacccuccuggcccugcaccgguccuaccucacgccgggggacagcagcuccggcuggaccgcgggcgccgccgccuacuacgugggguaccugcagccccgcaccuuccugcucaaguacaacgagaacggcaccaucacggacgcggucgacugcgcccuggacccccugagcgagaccaagugcacccucaaguccuucaccguggagaaggggaucuaccagacgagcaacuuccgggugcagcccaccgaguccaucguccgcuucccgaacaucaccaaccugugccccuucggcgagguguucaacgccacccgguucgccagcgucuacgccuggaaccgcaagcggaucuccaacugcguggcggacuacagcgugcuguacaacuccgccagcuucuccacguucaagugcuacggcgucagccccaccaagcucaacgaccugugcuucaccaacguguacgccgacuccuucgugauccgcggggacgagguccggcagaucgcccccggccagaccgggaagaucgccgacuacaacuacaagcugccggacgacuucacgggcugcgugaucgcguggaacagcaacaaccucgacuccaaggucgggggcaacuacaacuaccuguaccgccuguuccgcaagagcaaccucaagcccuucgagcgggacaucuccaccgagaucuaccaggccggcagcacccccugcaacgggguggagggcuucaacugcuacuucccccugcaguccuacggguuccagccgaccaacggcgugggguaccagcccuaccggguggucgugcugagcuucgagcuccugcacgcccccgccacggugugcggccccaagaaguccaccaaccuggucaagaacaagugcgugaacuucaacuucaacggccucaccgggaccggcgugcugaccgagagcaacaagaaguuccugccguuccagcaguucgggcgcgacaucgccgacacgaccgacgcgguccgcgacccccagacccuggagauccucgacaucacccccugcagcuucggcgggguguccgugaucacgccgggcaccaacaccagcaaccaggucgccgugcuguaccaggacgugaacugcaccgagguccccguggccauccacgccgaccagcugacgcccaccuggcggguguacuccaccggcagcaacgucuuccagacccgcgccgggugccucaucggcgcggagcacgugaacaacuccuacgagugcgacauccccaucggggccggcaucugcgccagcuaccagacgcagaccaacuccccgcggcgcgcccggagcguggcgucccagagcaucaucgccuacaccaugucccugggcgccgagaacagcgucgccuacuccaacaacagcaucgccauccccaccaacuucacgaucuccgugaccaccgagauccugcccgugagcaugaccaagacgagcgucgacugcaccauguacaucugcggggacuccaccgagugcagcaaccuccugcugcaguacggcuccuucugcacccagcucaaccgcgcgcugacggggaucgccguggagcaggacaagaacacccaggagguguucgcccaggucaagcagaucuacaagacgcccccgaucaaggacuucggcggguucaacuucagccagauccugcccgaccccuccaagcccagcaagcgguccuucaucgaggaccuccuguucaacaaggugacccuggccgacgccggcuucaucaagcaguacggcgacugccucggggacaucgcggcccgcgaccugaucugcgcccagaaguucaacggccugaccgugcucccgccccugcugaccgacgagaugaucgcccaguacaccagcgcccuccuggcggggaccaucacguccggcuggaccuucggggccggcgccgcccugcagauccccuucgcgaugcagauggccuaccgguucaacggcaucggggucacccagaacgugcucuacgagaaccagaagcugaucgccaaccaguucaacagcgccaucggcaagauccaggacucccugagcuccaccgccagcgcgcucgggaagcugcaggacguggucaaccagaacgcccaggcccugaacacgcucgugaagugccuguccagcaacuucggcgccaucuccagcgugcugaacgacauccucucccgccuggacaaggucgaggccgaggugcagaucgaccggcugaucaccgggcgccuccagugccugcagaccuacgugacccagcagcugauccgggcggccgagauccgcgccagcgccaaccucgccgcgaccaagauguccgagugcguccugggccagagcaagcggguggacuucugcggcaagggguaccaccugauguccuucccccagagcgccccgcacggcguggucuuccuccacgugacguacguccccgcccaggagaagaacuucaccaccgcccccgcgaucugccacgacgggaaggcccacuucccccgcgagggcguguucguguccaacgggacccacugguucgucacgcagcggaacuucuacgagccgcagaucaucaccaccgacaacaccuucgugagcggcaacugcgacguggucaucggcaucgugaacaacacgguguacgacccccugcagcccgagcuggacuccuucaaggaggagcucgacaaguacuucaagaaccacaccagccccgacgucgaccugggggacaucuccggcaucaacgccagcguggugaacauccagaaggagaucgaccgccugaacgaggucgccaagaaccucaacgagucccugaucgaccugcaggagcucgggaaguacgagcaguacaucaagggcgggagcggcuacauccccgaggccccgcgcgacgggcaggccuacgugcggaaggacggcgaguggguccugcucagcaccuuccugugaggacuagucccuguucccagagcccacuuuuuuuucuuuuuuugaaauaaaauagccugucuuucagaucucaaaggcucuuuucagagccaccaaaaaaaaaaaaaaaaaaaaaaaaaaaaaaaaaaaaaaaaaaaaaaaaaaaaaaaaaaaaaaaaaaaaaaaaaaaaaaaaaaaaaaaaaaaaaaaaaaaaa

SEQ ID NO: 12394 - RNA, 3998 nt, Artificial Sequence
  SARS-CoV-2/Wuhan/WIV05/2019__EPI_ISL_402128 spike protein mRNA gc (1-1211)(F970C_G999C) Foldon construct
aggagagucccgcagucggcguccagcggcucugcuuguucgugugugugucguugcaggccuuauucaagcuuaccauguucguguuccugguccuccugccccuggugagcucccagugcgugaaccucaccacccgcacgcagcugccgcccgccuacaccaacagcuucacccggggcgucuacuaccccgacaagguguuccgcuccagcgugcugcacuccacccaggaccucuuccugcccuucuucagcaacgucacgugguuccacgccauccacguguccgggaccaacggcaccaagcgguucgacaacccggugcugcccuucaacgacggggucuacuucgcgagcaccgagaaguccaacaucauccgcggcuggaucuucgggacgacccucgacagcaagacccagucccugcugaucgugaacaacgccaccaacguggucaucaaggugugcgaguuccaguucugcaacgaccccuuccucggcguguacuaccacaagaacaacaagagcuggauggaguccgaguuccgggucuacagcuccgccaacaacugcacguucgaguacgugagccagcccuuccugauggaccuggagggcaagcaggggaacuucaagaaccuccgcgaguucguguucaagaacaucgacggcuacuucaagaucuacuccaagcacaccccgaucaaccugguccgggaccugccccagggguucagcgcccucgagccccugguggaccugcccaucggcaucaacaucacccgcuuccagacccuccuggcccugcaccgguccuaccucacgccgggggacagcagcuccggcuggaccgcgggcgccgccgccuacuacgugggguaccugcagccccgcaccuuccugcucaaguacaacgagaacggcaccaucacggacgcggucgacugcgcccuggacccccugagcgagaccaagugcacccucaaguccuucaccguggagaaggggaucuaccagacgagcaacuuccgggugcagcccaccgaguccaucguccgcuucccgaacaucaccaaccugugccccuucggcgagguguucaacgccacccgguucgccagcgucuacgccuggaaccgcaagcggaucuccaacugcguggcggacuacagcgugcuguacaacuccgccagcuucuccacguucaagugcuacggcgucagccccaccaagcucaacgaccugugcuucaccaacguguacgccgacuccuucgugauccgcggggacgagguccggcagaucgcccccggccagaccgggaagaucgccgacuacaacuacaagcugccggacgacuucacgggcugcgugaucgcguggaacagcaacaaccucgacuccaaggucgggggcaacuacaacuaccuguaccgccuguuccgcaagagcaaccucaagcccuucgagcgggacaucuccaccgagaucuaccaggccggcagcacccccugcaacgggguggagggcuucaacugcuacuucccccugcaguccuacggguuccagccgaccaacggcgugggguaccagcccuaccggguggucgugcugagcuucgagcuccugcacgcccccgccacggugugcggccccaagaaguccaccaaccuggucaagaacaagugcgugaacuucaacuucaacggccucaccgggaccggcgugcugaccgagagcaacaagaaguuccugccguuccagcaguucgggcgcgacaucgccgacacgaccgacgcgguccgcgacccccagacccuggagauccucgacaucacccccugcagcuucggcgggguguccgugaucacgccgggcaccaacaccagcaaccaggucgccgugcuguaccaggacgugaacugcaccgagguccccguggccauccacgccgaccagcugacgcccaccuggcggguguacuccaccggcagcaacgucuuccagacccgcgccgggugccucaucggcgcggagcacgugaacaacuccuacgagugcgacauccccaucggggccggcaucugcgccagcuaccagacgcagaccaacuccccgcggcgcgcccggagcguggcgucccagagcaucaucgccuacaccaugucccugggcgccgagaacagcgucgccuacuccaacaacagcaucgccauccccaccaacuucacgaucuccgugaccaccgagauccugcccgugagcaugaccaagacgagcgucgacugcaccauguacaucugcggggacuccaccgagugcagcaaccuccugcugcaguacggcuccuucugcacccagcucaaccgcgcgcugacggggaucgccguggagcaggacaagaacacccaggagguguucgcccaggucaagcagaucuacaagacgcccccgaucaaggacuucggcggguucaacuucagccagauccugcccgaccccuccaagcccagcaagcgguccuucaucgaggaccuccuguucaacaaggugacccuggccgacgccggcuucaucaagcaguacggcgacugccucggggacaucgcggcccgcgaccugaucugcgcccagaaguucaacggccugaccgugcucccgccccugcugaccgacgagaugaucgcccaguacaccagcgcccuccuggcggggaccaucacguccggcuggaccuucggggccggcgccgcccugcagauccccuucgcgaugcagauggccuaccgguucaacggcaucggggucacccagaacgugcucuacgagaaccagaagcugaucgccaaccaguucaacagcgccaucggcaagauccaggacucccugagcuccaccgccagcgcgcucgggaagcugcaggacguggucaaccagaacgcccaggcccugaacacgcucgugaagcagcuguccagcaacugcggcgccaucuccagcgugcugaacgacauccucucccgccuggacaaggucgaggccgaggugcagaucgaccggcugaucaccugucgccuccagagccugcagaccuacgugacccagcagcugauccgggcggccgagauccgcgccagcgccaaccucgccgcgaccaagauguccgagugcguccugggccagagcaagcggguggacuucugcggcaagggguaccaccugauguccuucccccagagcgccccgcacggcguggucuuccuccacgugacguacguccccgcccaggagaagaacuucaccaccgcccccgcgaucugccacgacgggaaggcccacuucccccgcgagggcguguucguguccaacgggacccacugguucgucacgcagcggaacuucuacgagccgcagaucaucaccaccgacaacaccuucgugagcggcaacugcgacguggucaucggcaucgugaacaacacgguguacgacccccugcagcccgagcuggacuccuucaaggaggagcucgacaaguacuucaagaaccacaccagccccgacgucgaccugggggacaucuccggcaucaacgccagcguggugaacauccagaaggagaucgaccgccugaacgaggucgccaagaaccucaacgagucccugaucgaccugcaggagcucgggaaguacgagcaguacaucaagggcgggagcggcuacauccccgaggccccgcgcgacgggcaggccuacgugcggaaggacggcgaguggguccugcucagcaccuuccugugaggacuagucccuguucccagagcccacuuuuuuuucuuuuuuugaaauaaaauagccugucuuucagaucucaaaggcucuuuucagagccaccaaaaaaaaaaaaaaaaaaaaaaaaaaaaaaaaaaaaaaaaaaaaaaaaaaaaaaaaaaaaaaaaaaaaaaaaaaaaaaaaaaaaaaaaaaaaaaaaaaaaa

SEQ ID NO: 12395 - RNA, 3998 nt, Artificial Sequence
  SARS-CoV-2/Wuhan/WIV05/2019__EPI_ISL_402128 spike protein mRNA gc (1-1211)(A972C_R995C) Foldon construct
aggagagucccgcagucggcguccagcggcucugcuuguucgugugugugucguugcaggccuuauucaagcuuaccauguucguguuccugguccuccugccccuggugagcucccagugcgugaaccucaccacccgcacgcagcugccgcccgccuacaccaacagcuucacccggggcgucuacuaccccgacaagguguuccgcuccagcgugcugcacuccacccaggaccucuuccugcccuucuucagcaacgucacgugguuccacgccauccacguguccgggaccaacggcaccaagcgguucgacaacccggugcugcccuucaacgacggggucuacuucgcgagcaccgagaaguccaacaucauccgcggcuggaucuucgggacgacccucgacagcaagacccagucccugcugaucgugaacaacgccaccaacguggucaucaaggugugcgaguuccaguucugcaacgaccccuuccucggcguguacuaccacaagaacaacaagagcuggauggaguccgaguuccgggucuacagcuccgccaacaacugcacguucgaguacgugagccagcccuuccugauggaccuggagggcaagcaggggaacuucaagaaccuccgcgaguucguguucaagaacaucgacggcuacuucaagaucuacuccaagcacaccccgaucaaccugguccgggaccugccccagggguucagcgcccucgagccccugguggaccugcccaucggcaucaacaucacccgcuuccagacccuccuggcccugcaccgguccuaccucacgccgggggacagcagcuccggcuggaccgcgggcgccgccgccuacuacgugggguaccugcagccccgcaccuuccugcucaaguacaacgagaacggcaccaucacggacgcggucgacugcgcccuggacccccugagcgagaccaagugcacccucaaguccuucaccguggagaaggggaucuaccagacgagcaacuuccgggugcagcccaccgaguccaucguccgcuucccgaacaucaccaaccugugccccuucggcgagguguucaacgccacccgguucgccagcgucuacgccuggaaccgcaagcggaucuccaacugcguggcggacuacagcgugcuguacaacuccgccagcuucuccacguucaagugcuacggcgucagccccaccaagcucaacgaccugugcuucaccaacguguacgccgacuccuucgugauccgcggggacgagguccggcagaucgcccccggccagaccgggaagaucgccgacuacaacuacaagcugccggacgacuucacgggcugcgugaucgcguggaacagcaacaaccucgacuccaaggucgggggcaacuacaacuaccuguaccgccuguuccgcaagagcaaccucaagcccuucgagcgggacaucuccaccgagaucuaccaggccggcagcacccccugcaacgggguggagggcuucaacugcuacuucccccugcaguccuacggguuccagccgaccaacggcgugggguaccagcccuaccggguggucgugcugagcuucgagcuccugcacgcccccgccacggugugcggccccaagaaguccaccaaccuggucaagaacaagugcgugaacuucaacuucaacggccucaccgggaccggcgugcugaccgagagcaacaagaaguuccugccguuccagcaguucgggcgcgacaucgccgacacgaccgacgcgguccgcgacccccagacccuggagauccucgacaucacccccugcagcuucggcgggguguccgugaucacgccgggcaccaacaccagcaaccaggucgccgugcuguaccaggacgugaacugcaccgagguccccguggccauccacgccgaccagcugacgcccaccuggcggguguacuccaccggcagcaacgucuuccagacccgcgccgggugccucaucggcgcggagcacgugaacaacuccuacgagugcgacauccccaucggggccggcaucugcgccagcuaccagacgcagaccaacuccccgcggcgcgcccggagcguggcgucccagagcaucaucgccuacaccaugucccugggcgccgagaacagcgucgccuacuccaacaacagcaucgccauccccaccaacuucacgaucuccgugaccaccgagauccugcccgugagcaugaccaagacgagcgucgacugcaccauguacaucugcggggacuccaccgagugcagcaaccuccugcugcaguacggcuccuucugcacccagcucaaccgcgcgcugacggggaucgccguggagcaggacaagaacacccaggagguguucgcccaggucaagcagaucuacaagacgcccccgaucaaggacuucggcggguucaacuucagccagauccugcccgaccccuccaagcccagcaagcgguccuucaucgaggaccuccuguucaacaaggugacccuggccgacgccggcuucaucaagcaguacggcgacugccucggggacaucgcggcccgcgaccugaucugcgcccagaaguucaacggccugaccgugcucccgccccugcugaccgacgagaugaucgcccaguacaccagcgcccuccuggcggggaccaucacguccggcuggaccuucggggccggcgccgcccugcagauccccuucgcgaugcagauggccuaccgguucaacggcaucggggucacccagaacgugcucuacgagaaccagaagcugaucgccaaccaguucaacagcgccaucggcaagauccaggacucccugagcuccaccgccagcgcgcucgggaagcugcaggacguggucaaccagaacgcccaggcccugaacacgcucgugaagcagcuguccagcaacuucggcugcaucuccagcgugcugaacgacauccucucccgccuggacaaggucgaggccgaggugcagaucgacugccugaucaccgggcgccuccagagccugcagaccuacgugacccagcagcugauccgggcggccgagauccgcgccagcgccaaccucgccgcgaccaagauguccgagugcguccugggccagagcaagcggguggacuucugcggcaagggguaccaccugauguccuucccccagagcgccccgcacggcguggucuuccuccacgugacguacguccccgcccaggagaagaacuucaccaccgcccccgcgaucugccacgacgggaaggcccacuucccccgcgagggcguguucguguccaacgggacccacugguucgucacgcagcggaacuucuacgagccgcagaucaucaccaccgacaacaccuucgugagcggcaacugcgacguggucaucggcaucgugaacaacacgguguacgacccccugcagcccgagcuggacuccuucaaggaggagcucgacaaguacuucaagaaccacaccagccccgacgucgaccugggggacaucuccggcaucaacgccagcguggugaacauccagaaggagaucgaccgccugaacgaggucgccaagaaccucaacgagucccugaucgaccugcaggagcucgggaaguacgagcaguacaucaagggcgggagcggcuacauccccgaggccccgcgcgacgggcaggccuacgugcggaaggacggcgaguggguccugcucagcaccuuccugugaggacuagucccuguucccagagcccacuuuuuuuucuuuuuuugaaauaaaauagccugucuuucagaucucaaaggcucuuuucagagccaccaaaaaaaaaaaaaaaaaaaaaaaaaaaaaaaaaaaaaaaaaaaaaaaaaaaaaaaaaaaaaaaaaaaaaaaaaaaaaaaaaaaaaaaaaaaaaaaaaaaaa

SEQ ID NO: 12396 - RNA, 3998 nt, Artificial Sequence
  SARS-CoV-2/Wuhan/WIV05/2019__EPI_ISL_402128 spike protein mRNA gc (1-1211)(A890C_V1040C) Foldon construct
aggagagucccgcagucggcguccagcggcucugcuuguucgugugugugucguugcaggccuuauucaagcuuaccauguucguguuccugguccuccugccccuggugagcucccagugcgugaaccucaccacccgcacgcagcugccgcccgccuacaccaacagcuucacccggggcgucuacuaccccgacaagguguuccgcuccagcgugcugcacuccacccaggaccucuuccugcccuucuucagcaacgucacgugguuccacgccauccacguguccgggaccaacggcaccaagcgguucgacaacccggugcugcccuucaacgacggggucuacuucgcgagcaccgagaaguccaacaucauccgcggcuggaucuucgggacgacccucgacagcaagacccagucccugcugaucgugaacaacgccaccaacguggucaucaaggugugcgaguuccaguucugcaacgaccccuuccucggcguguacuaccacaagaacaacaagagcuggauggaguccgaguuccgggucuacagcuccgccaacaacugcacguucgaguacgugagccagcccuuccugauggaccuggagggcaagcaggggaacuucaagaaccuccgcgaguucguguucaagaacaucgacggcuacuucaagaucuacuccaagcacaccccgaucaaccugguccgggaccugccccagggguucagcgcccucgagccccugguggaccugcccaucggcaucaacaucacccgcuuccagacccuccuggcccugcaccgguccuaccucacgccgggggacagcagcuccggcuggaccgcgggcgccgccgccuacuacgugggguaccugcagccccgcaccuuccugcucaaguacaacgagaacggcaccaucacggacgcggucgacugcgcccuggacccccugagcgagaccaagugcacccucaaguccuucaccguggagaaggggaucuaccagacgagcaacuuccgggugcagcccaccgaguccaucguccgcuucccgaacaucaccaaccugugccccuucggcgagguguucaacgccacccgguucgccagcgucuacgccuggaaccgcaagcggaucuccaacugcguggcggacuacagcgugcuguacaacuccgccagcuucuccacguucaagugcuacggcgucagccccaccaagcucaacgaccugugcuucaccaacguguacgccgacuccuucgugauccgcggggacgagguccggcagaucgcccccggccagaccgggaagaucgccgacuacaacuacaagcugccggacgacuucacgggcugcgugaucgcguggaacagcaacaaccucgacuccaaggucgggggcaacuacaacuaccuguaccgccuguuccgcaagagcaaccucaagcccuucgagcgggacaucuccaccgagaucuaccaggccggcagcacccccugcaacgggguggagggcuucaacugcuacuucccccugcaguccuacggguuccagccgaccaacggcgugggguaccagcccuaccggguggucgugcugagcuucgagcuccugcacgcccccgccacggugugcggccccaagaaguccaccaaccuggucaagaacaagugcgugaacuucaacuucaacggccucaccgggaccggcgugcugaccgagagcaacaagaaguuccugccguuccagcaguucgggcgcgacaucgccgacacgaccgacgcgguccgcgacccccagacccuggagauccucgacaucacccccugcagcuucggcgggguguccgugaucacgccgggcaccaacaccagcaaccaggucgccgugcuguaccaggacgugaacugcaccgagguccccguggccauccacgccgaccagcugacgcccaccuggcggguguacuccaccggcagcaacgucuuccagacccgcgccgggugccucaucggcgcggagcacgugaacaacuccuacgagugcgacauccccaucggggccggcaucugcgccagcuaccagacgcagaccaacuccccgcggcgcgcccggagcguggcgucccagagcaucaucgccuacaccaugucccugggcgccgagaacagcgucgccuacuccaacaacagcaucgccauccccaccaacuucacgaucuccgugaccaccgagauccugcccgugagcaugaccaagacgagcgucgacugcaccauguacaucugcggggacuccaccgagugcagcaaccuccugcugcaguacggcuccuucugcacccagcucaaccgcgcgcugacggggaucgccguggagcaggacaagaacacccaggagguguucgcccaggucaagcagaucuacaagacgcccccgaucaaggacuucggcggguucaacuucagccagauccugcccgaccccuccaagcccagcaagcgguccuucaucgaggaccuccuguucaacaaggugacccuggccgacgccggcuucaucaagcaguacggcgacugccucggggacaucgcggcccgcgaccugaucugcgcccagaaguucaacggccugaccgugcucccgccccugcugaccgacgagaugaucgcccaguacaccagcgcccuccuggcggggaccaucacguccggcuggaccuucgggugcggcgccgcccugcagauccccuucgcgaugcagauggccuaccgguucaacggcaucggggucacccagaacgugcucuacgagaaccagaagcugaucgccaaccaguucaacagcgccaucggcaagauccaggacucccugagcuccaccgccagcgcgcucgggaagcugcaggacguggucaaccagaacgcccaggcccugaacacgcucgugaagcagcuguccagcaacuucggcgccaucuccagcgugcugaacgacauccucucccgccuggacaaggucgaggccgaggugcagaucgaccggcugaucaccgggcgccuccagagccugcagaccuacgugacccagcagcugauccgggcggccgagauccgcgccagcgccaaccucgccgcgaccaagauguccgagugcguccugggccagagcaagcggugcgacuucugcggcaagggguaccaccugauguccuucccccagagcgccccgcacggcguggucuuccuccacgugacguacguccccgcccaggagaagaacuucaccaccgcccccgcgaucugccacgacgggaaggcccacuucccccgcgagggcguguucguguccaacgggacccacugguucgucacgcagcggaacuucuacgagccgcagaucaucaccaccgacaacaccuucgugagcggcaacugcgacguggucaucggcaucgugaacaacacgguguacgacccccugcagcccgagcuggacuccuucaaggaggagcucgacaaguacuucaagaaccacaccagccccgacgucgaccugggggacaucuccggcaucaacgccagcguggugaacauccagaaggagaucgaccgccugaacgaggucgccaagaaccucaacgagucccugaucgaccugcaggagcucgggaaguacgagcaguacaucaagggcgggagcggcuacauccccgaggccccgcgcgacgggcaggccuacgugcggaaggacggcgaguggguccugcucagcaccuuccugugaggacuagucccuguucccagagcccacuuuuuuuucuuuuuuugaaauaaaauagccugucuuucagaucucaaaggcucuuuucagagccaccaaaaaaaaaaaaaaaaaaaaaaaaaaaaaaaaaaaaaaaaaaaaaaaaaaaaaaaaaaaaaaaaaaaaaaaaaaaaaaaaaaaaaaaaaaaaaaaaaaaaa

SEQ ID NO: 12397 - RNA, 3998 nt, Artificial Sequence
  SARS-CoV-2/Wuhan/WIV05/2019__EPI_ISL_402128 spike protein mRNA gc (1-1211)(T874C_S1055C) Foldon construct
aggagagucccgcagucggcguccagcggcucugcuuguucgugugugugucguugcaggccuuauucaagcuuaccauguucguguuccugguccuccugccccuggugagcucccagugcgugaaccucaccacccgcacgcagcugccgcccgccuacaccaacagcuucacccggggcgucuacuaccccgacaagguguuccgcuccagcgugcugcacuccacccaggaccucuuccugcccuucuucagcaacgucacgugguuccacgccauccacguguccgggaccaacggcaccaagcgguucgacaacccggugcugcccuucaacgacggggucuacuucgcgagcaccgagaaguccaacaucauccgcggcuggaucuucgggacgacccucgacagcaagacccagucccugcugaucgugaacaacgccaccaacguggucaucaaggugugcgaguuccaguucugcaacgaccccuuccucggcguguacuaccacaagaacaacaagagcuggauggaguccgaguuccgggucuacagcuccgccaacaacugcacguucgaguacgugagccagcccuuccugauggaccuggagggcaagcaggggaacuucaagaaccuccgcgaguucguguucaagaacaucgacggcuacuucaagaucuacuccaagcacaccccgaucaaccugguccgggaccugccccagggguucagcgcccucgagccccugguggaccugcccaucggcaucaacaucacccgcuuccagacccuccuggcccugcaccgguccuaccucacgccgggggacagcagcuccggcuggaccgcgggcgccgccgccuacuacgugggguaccugcagccccgcaccuuccugcucaaguacaacgagaacggcaccaucacggacgcggucgacugcgcccuggacccccugagcgagaccaagugcacccucaaguccuucaccguggagaaggggaucuaccagacgagcaacuuccgggugcagcccaccgaguccaucguccgcuucccgaacaucaccaaccugugccccuucggcgagguguucaacgccacccgguucgccagcgucuacgccuggaaccgcaagcggaucuccaacugcguggcggacuacagcgugcuguacaacuccgccagcuucuccacguucaagugcuacggcgucagccccaccaagcucaacgaccugugcuucaccaacguguacgccgacuccuucgugauccgcggggacgagguccggcagaucgcccccggccagaccgggaagaucgccgacuacaacuacaagcugccggacgacuucacgggcugcgugaucgcguggaacagcaacaaccucgacuccaaggucgggggcaacuacaacuaccuguaccgccuguuccgcaagagcaaccucaagcccuucgagcgggacaucuccaccgagaucuaccaggccggcagcacccccugcaacgggguggagggcuucaacugcuacuucccccugcaguccuacggguuccagccgaccaacggcgugggguaccagcccuaccggguggucgugcugagcuucgagcuccugcacgcccccgccacggugugcggccccaagaaguccaccaaccuggucaagaacaagugcgugaacuucaacuucaacggccucaccgggaccggcgugcugaccgagagcaacaagaaguuccugccguuccagcaguucgggcgcgacaucgccgacacgaccgacgcgguccgcgacccccagacccuggagauccucgacaucacccccugcagcuucggcgggguguccgugaucacgccgggcaccaacaccagcaaccaggucgccgugcuguaccaggacgugaacugcaccgagguccccguggccauccacgccgaccagcugacgcccaccuggcggguguacuccaccggcagcaacgucuuccagacccgcgccgggugccucaucggcgcggagcacgugaacaacuccuacgagugcgacauccccaucggggccggcaucugcgccagcuaccagacgcagaccaacuccccgcggcgcgcccggagcguggcgucccagagcaucaucgccuacaccaugucccugggcgccgagaacagcgucgccuacuccaacaacagcaucgccauccccaccaacuucacgaucuccgugaccaccgagauccugcccgugagcaugaccaagacgagcgucgacugcaccauguacaucugcggggacuccaccgagugcagcaaccuccugcugcaguacggcuccuucugcacccagcucaaccgcgcgcugacggggaucgccguggagcaggacaagaacacccaggagguguucgcccaggucaagcagaucuacaagacgcccccgaucaaggacuucggcggguucaacuucagccagauccugcccgaccccuccaagcccagcaagcgguccuucaucgaggaccuccuguucaacaaggugacccuggccgacgccggcuucaucaagcaguacggcgacugccucggggacaucgcggcccgcgaccugaucugcgcccagaaguucaacggccugaccgugcucccgccccugcugaccgacgagaugaucgcccaguacugcagcgcccuccuggcggggaccaucacguccggcuggaccuucggggccggcgccgcccugcagauccccuucgcgaugcagauggccuaccgguucaacggcaucggggucacccagaacgugcucuacgagaaccagaagcugaucgccaaccaguucaacagcgccaucggcaagauccaggacucccugagcuccaccgccagcgcgcucgggaagcugcaggacguggucaaccagaacgcccaggcccugaacacgcucgugaagcagcuguccagcaacuucggcgccaucuccagcgugcugaacgacauccucucccgccuggacaaggucgaggccgaggugcagaucgaccggcugaucaccgggcgccuccagagccugcagaccuacgugacccagcagcugauccgggcggccgagauccgcgccagcgccaaccucgccgcgaccaagauguccgagugcguccugggccagagcaagcggguggacuucugcggcaagggguaccaccugauguccuucccccagugcgccccgcacggcguggucuuccuccacgugacguacguccccgcccaggagaagaacuucaccaccgcccccgcgaucugccacgacgggaaggcccacuucccccgcgagggcguguucguguccaacgggacccacugguucgucacgcagcggaacuucuacgagccgcagaucaucaccaccgacaacaccuucgugagcggcaacugcgacguggucaucggcaucgugaacaacacgguguacgacccccugcagcccgagcuggacuccuucaaggaggagcucgacaaguacuucaagaaccacaccagccccgacgucgaccugggggacaucuccggcaucaacgccagcguggugaacauccagaaggagaucgaccgccugaacgaggucgccaagaaccucaacgagucccugaucgaccugcaggagcucgggaaguacgagcaguacaucaagggcgggagcggcuacauccccgaggccccgcgcgacgggcaggccuacgugcggaaggacggcgaguggguccugcucagcaccuuccugugaggacuagucccuguucccagagcccacuuuuuuuucuuuuuuugaaauaaaauagccugucuuucagaucucaaaggcucuuuucagagccaccaaaaaaaaaaaaaaaaaaaaaaaaaaaaaaaaaaaaaaaaaaaaaaaaaaaaaaaaaaaaaaaaaaaaaaaaaaaaaaaaaaaaaaaaaaaaaaaaaaaaa

SEQ ID NO: 12398 - RNA, 4370 nt, Artificial Sequence
  SARS-CoV-2/Wuhan/WIV05/2019__EPI_ISL_402128 spike protein mRNA gc (1-1211) WhcAg construct
aggagagucccgcagucggcguccagcggcucugcuuguucgugugugugucguugcaggccuuauucaagcuuaccauguucguguuccugguccuccugccccuggugagcucccagugcgugaaccucaccacccgcacgcagcugccgcccgccuacaccaacagcuucacccggggcgucuacuaccccgacaagguguuccgcuccagcgugcugcacuccacccaggaccucuuccugcccuucuucagcaacgucacgugguuccacgccauccacguguccgggaccaacggcaccaagcgguucgacaacccggugcugcccuucaacgacggggucuacuucgcgagcaccgagaaguccaacaucauccgcggcuggaucuucgggacgacccucgacagcaagacccagucccugcugaucgugaacaacgccaccaacguggucaucaaggugugcgaguuccaguucugcaacgaccccuuccucggcguguacuaccacaagaacaacaagagcuggauggaguccgaguuccgggucuacagcuccgccaacaacugcacguucgaguacgugagccagcccuuccugauggaccuggagggcaagcaggggaacuucaagaaccuccgcgaguucguguucaagaacaucgacggcuacuucaagaucuacuccaagcacaccccgaucaaccugguccgggaccugccccagggguucagcgcccucgagccccugguggaccugcccaucggcaucaacaucacccgcuuccagacccuccuggcccugcaccgguccuaccucacgccgggggacagcagcuccggcuggaccgcgggcgccgccgccuacuacgugggguaccugcagccccgcaccuuccugcucaaguacaacgagaacggcaccaucacggacgcggucgacugcgcccuggacccccugagcgagaccaagugcacccucaaguccuucaccguggagaaggggaucuaccagacgagcaacuuccgggugcagcccaccgaguccaucguccgcuucccgaacaucaccaaccugugccccuucggcgagguguucaacgccacccgguucgccagcgucuacgccuggaaccgcaagcggaucuccaacugcguggcggacuacagcgugcuguacaacuccgccagcuucuccacguucaagugcuacggcgucagccccaccaagcucaacgaccugugcuucaccaacguguacgccgacuccuucgugauccgcggggacgagguccggcagaucgcccccggccagaccgggaagaucgccgacuacaacuacaagcugccggacgacuucacgggcugcgugaucgcguggaacagcaacaaccucgacuccaaggucgggggcaacuacaacuaccuguaccgccuguuccgcaagagcaaccucaagcccuucgagcgggacaucuccaccgagaucuaccaggccggcagcacccccugcaacgggguggagggcuucaacugcuacuucccccugcaguccuacggguuccagccgaccaacggcgugggguaccagcccuaccggguggucgugcugagcuucgagcuccugcacgcccccgccacggugugcggccccaagaaguccaccaaccuggucaagaacaagugcgugaacuucaacuucaacggccucaccgggaccggcgugcugaccgagagcaacaagaaguuccugccguuccagcaguucgggcgcgacaucgccgacacgaccgacgcgguccgcgacccccagacccuggagauccucgacaucacccccugcagcuucggcgggguguccgugaucacgccgggcaccaacaccagcaaccaggucgccgugcuguaccaggacgugaacugcaccgagguccccguggccauccacgccgaccagcugacgcccaccuggcggguguacuccaccggcagcaacgucuuccagacccgcgccgggugccucaucggcgcggagcacgugaacaacuccuacgagugcgacauccccaucggggccggcaucugcgccagcuaccagacgcagaccaacuccccgcggcgcgcccggagcguggcgucccagagcaucaucgccuacaccaugucccugggcgccgagaacagcgucgccuacuccaacaacagcaucgccauccccaccaacuucacgaucuccgugaccaccgagauccugcccgugagcaugaccaagacgagcgucgacugcaccauguacaucugcggggacuccaccgagugcagcaaccuccugcugcaguacggcuccuucugcacccagcucaaccgcgcgcugacggggaucgccguggagcaggacaagaacacccaggagguguucgcccaggucaagcagaucuacaagacgcccccgaucaaggacuucggcggguucaacuucagccagauccugcccgaccccuccaagcccagcaagcgguccuucaucgaggaccuccuguucaacaaggugacccuggccgacgccggcuucaucaagcaguacggcgacugccucggggacaucgcggcccgcgaccugaucugcgcccagaaguucaacggccugaccgugcucccgccccugcugaccgacgagaugaucgcccaguacaccagcgcccuccuggcggggaccaucacguccggcuggaccuucggggccggcgccgcccugcagauccccuucgcgaugcagauggccuaccgguucaacggcaucggggucacccagaacgugcucuacgagaaccagaagcugaucgccaaccaguucaacagcgccaucggcaagauccaggacucccugagcuccaccgccagcgcgcucgggaagcugcaggacguggucaaccagaacgcccaggcccugaacacgcucgugaagcagcuguccagcaacuucggcgccaucuccagcgugcugaacgacauccucucccgccuggacaaggucgaggccgaggugcagaucgaccggcugaucaccgggcgccuccagagccugcagaccuacgugacccagcagcugauccgggcggccgagauccgcgccagcgccaaccucgccgcgaccaagauguccgagugcguccugggccagagcaagcggguggacuucugcggcaagggguaccaccugauguccuucccccagagcgccccgcacggcguggucuuccuccacgugacguacguccccgcccaggagaagaacuucaccaccgcccccgcgaucugccacgacgggaaggcccacuucccccgcgagggcguguucguguccaacgggacccacugguucgucacgcagcggaacuucuacgagccgcagaucaucaccaccgacaacaccuucgugagcggcaacugcgacguggucaucggcaucgugaacaacacgguguacgacccccugcagcccgagcuggacuccuucaaggaggagcucgacaaguacuucaagaaccacaccagccccgacgucgaccugggggacaucuccggcaucaacgccagcguggugaacauccagaaggagaucgaccgccugaacgaggucgccaagaaccucaacgagucccugaucgaccugcaggagcucgggaaguacgagcaguacaucaagggcgggggcgggagcgacaucgaccccuacaaggaguucggcagcuccuaccagcugcucaacuuccugccccuggacuucuuccccgaccucaacgcccugguggacaccgccaccgcgcuguacgaggaggagcucacggggcgcgagcacugcagcccccaccacaccgccauccggcaggcccuggucugcugggacgagcugaccaagcucaucgccuggauguccagcaacaucaccuccgagcagguccgcacgaucaucgugaaccacgucaacgacaccuggggccugaaggugcggcagagccugugguuccaccucuccugccugaccuucgggcagcacaccgugcaggaguuccuggucagcuucggcguguggauccgcacgcccgccccguaccggccgcccaacgcgccgauccucuccacccugccggagcacaccgugaucugcugaggacuagucccuguucccagagcccacuuuuuuuucuuuuuuugaaauaaaauagccugucuuucagaucucaaaggcucuuuucagagccaccaaaaaaaaaaaaaaaaaaaaaaaaaaaaaaaaaaaaaaaaaaaaaaaaaaaaaaaaaaaaaaaaaaaaaaaaaaaaaaaaaaaaaaaaaaaaaaaaaaaaa

SEQ ID NO: 12399 - RNA, 4370 nt, Artificial Sequence
  SARS-CoV-2/Wuhan/WIV05/2019__EPI_ISL_402128 spike protein mRNA gc (1-1211)(K986P_V987P) WhcAg construct
aggagagucccgcagucggcguccagcggcucugcuuguucgugugugugucguugcaggccuuauucaagcuuaccauguucguguuccugguccuccugccccuggugagcucccagugcgugaaccucaccacccgcacgcagcugccgcccgccuacaccaacagcuucacccggggcgucuacuaccccgacaagguguuccgcuccagcgugcugcacuccacccaggaccucuuccugcccuucuucagcaacgucacgugguuccacgccauccacguguccgggaccaacggcaccaagcgguucgacaacccggugcugcccuucaacgacggggucuacuucgcgagcaccgagaaguccaacaucauccgcggcuggaucuucgggacgacccucgacagcaagacccagucccugcugaucgugaacaacgccaccaacguggucaucaaggugugcgaguuccaguucugcaacgaccccuuccucggcguguacuaccacaagaacaacaagagcuggauggaguccgaguuccgggucuacagcuccgccaacaacugcacguucgaguacgugagccagcccuuccugauggaccuggagggcaagcaggggaacuucaagaaccuccgcgaguucguguucaagaacaucgacggcuacuucaagaucuacuccaagcacaccccgaucaaccugguccgggaccugccccagggguucagcgcccucgagccccugguggaccugcccaucggcaucaacaucacccgcuuccagacccuccuggcccugcaccgguccuaccucacgccgggggacagcagcuccggcuggaccgcgggcgccgccgccuacuacgugggguaccugcagccccgcaccuuccugcucaaguacaacgagaacggcaccaucacggacgcggucgacugcgcccuggacccccugagcgagaccaagugcacccucaaguccuucaccguggagaaggggaucuaccagacgagcaacuuccgggugcagcccaccgaguccaucguccgcuucccgaacaucaccaaccugugccccuucggcgagguguucaacgccacccgguucgccagcgucuacgccuggaaccgcaagcggaucuccaacugcguggcggacuacagcgugcuguacaacuccgccagcuucuccacguucaagugcuacggcgucagccccaccaagcucaacgaccugugcuucaccaacguguacgccgacuccuucgugauccgcggggacgagguccggcagaucgcccccggccagaccgggaagaucgccgacuacaacuacaagcugccggacgacuucacgggcugcgugaucgcguggaacagcaacaaccucgacuccaaggucgggggcaacuacaacuaccuguaccgccuguuccgcaagagcaaccucaagcccuucgagcgggacaucuccaccgagaucuaccaggccggcagcacccccugcaacgggguggagggcuucaacugcuacuucccccugcaguccuacggguuccagccgaccaacggcgugggguaccagcccuaccggguggucgugcugagcuucgagcuccugcacgcccccgccacggugugcggccccaagaaguccaccaaccuggucaagaacaagugcgugaacuucaacuucaacggccucaccgggaccggcgugcugaccgagagcaacaagaaguuccugccguuccagcaguucgggcgcgacaucgccgacacgaccgacgcgguccgcgacccccagacccuggagauccucgacaucacccccugcagcuucggcgggguguccgugaucacgccgggcaccaacaccagcaaccaggucgccgugcuguaccaggacgugaacugcaccgagguccccguggccauccacgccgaccagcugacgcccaccuggcggguguacuccaccggcagcaacgucuuccagacccgcgccgggugccucaucggcgcggagcacgugaacaacuccuacgagugcgacauccccaucggggccggcaucugcgccagcuaccagacgcagaccaacuccccgcggcgcgcccggagcguggcgucccagagcaucaucgccuacaccaugucccugggcgccgagaacagcgucgccuacuccaacaacagcaucgccauccccaccaacuucacgaucuccgugaccaccgagauccugcccgugagcaugaccaagacgagcgucgacugcaccauguacaucugcggggacuccaccgagugcagcaaccuccugcugcaguacggcuccuucugcacccagcucaaccgcgcgcugacggggaucgccguggagcaggacaagaacacccaggagguguucgcccaggucaagcagaucuacaagacgcccccgaucaaggacuucggcggguucaacuucagccagauccugcccgaccccuccaagcccagcaagcgguccuucaucgaggaccuccuguucaacaaggugacccuggccgacgccggcuucaucaagcaguacggcgacugccucggggacaucgcggcccgcgaccugaucugcgcccagaaguucaacggccugaccgugcucccgccccugcugaccgacgagaugaucgcccaguacaccagcgcccuccuggcggggaccaucacguccggcuggaccuucggggccggcgccgcccugcagauccccuucgcgaugcagauggccuaccgguucaacggcaucggggucacccagaacgugcucuacgagaaccagaagcugaucgccaaccaguucaacagcgccaucggcaagauccaggacucccugagcuccaccgccagcgcgcucgggaagcugcaggacguggucaaccagaacgcccaggcccugaacacgcucgugaagcagcuguccagcaacuucggcgccaucuccagcgugcugaacgacauccucucccgccuggacccgcccgaggccgaggugcagaucgaccggcugaucaccgggcgccuccagagccugcagaccuacgugacccagcagcugauccgggcggccgagauccgcgccagcgccaaccucgccgcgaccaagauguccgagugcguccugggccagagcaagcggguggacuucugcggcaagggguaccaccugauguccuucccccagagcgccccgcacggcguggucuuccuccacgugacguacguccccgcccaggagaagaacuucaccaccgcccccgcgaucugccacgacgggaaggcccacuucccccgcgagggcguguucguguccaacgggacccacugguucgucacgcagcggaacuucuacgagccgcagaucaucaccaccgacaacaccuucgugagcggcaacugcgacguggucaucggcaucgugaacaacacgguguacgacccccugcagcccgagcuggacuccuucaaggaggagcucgacaaguacuucaagaaccacaccagccccgacgucgaccugggggacaucuccggcaucaacgccagcguggugaacauccagaaggagaucgaccgccugaacgaggucgccaagaaccucaacgagucccugaucgaccugcaggagcucgggaaguacgagcaguacaucaagggcgggggcgggagcgacaucgaccccuacaaggaguucggcagcuccuaccagcugcucaacuuccugccccuggacuucuuccccgaccucaacgcccugguggacaccgccaccgcgcuguacgaggaggagcucacggggcgcgagcacugcagcccccaccacaccgccauccggcaggcccuggucugcugggacgagcugaccaagcucaucgccuggauguccagcaacaucaccuccgagcagguccgcacgaucaucgugaaccacgucaacgacaccuggggccugaaggugcggcagagccugugguuccaccucuccugccugaccuucgggcagcacaccgugcaggaguuccuggucagcuucggcguguggauccgcacgcccgccccguaccggccgcccaacgcgccgauccucuccacccugccggagcacaccgugaucugcugaggacuagucccuguucccagagcccacuuuuuuuucuuuuuuugaaauaaaauagccugucuuucagaucucaaaggcucuuuucagagccaccaaaaaaaaaaaaaaaaaaaaaaaaaaaaaaaaaaaaaaaaaaaaaaaaaaaaaaaaaaaaaaaaaaaaaaaaaaaaaaaaaaaaaaaaaaaaaaaaaaaaa

SEQ ID NO: 12400 - RNA, 4370 nt, Artificial Sequence
  SARS-CoV-2/Wuhan/WIV05/2019__EPI_ISL_402128 spike protein mRNA gc (1-1211)(K986P_V987P_T887WN_A1020W) WhcAg construct
aggagagucccgcagucggcguccagcggcucugcuuguucgugugugugucguugcaggccuuauucaagcuuaccauguucguguuccugguccuccugccccuggugagcucccagugcgugaaccucaccacccgcacgcagcugccgcccgccuacaccaacagcuucacccggggcgucuacuaccccgacaagguguuccgcuccagcgugcugcacuccacccaggaccucuuccugcccuucuucagcaacgucacgugguuccacgccauccacguguccgggaccaacggcaccaagcgguucgacaacccggugcugcccuucaacgacggggucuacuucgcgagcaccgagaaguccaacaucauccgcggcuggaucuucgggacgacccucgacagcaagacccagucccugcugaucgugaacaacgccaccaacguggucaucaaggugugcgaguuccaguucugcaacgaccccuuccucggcguguacuaccacaagaacaacaagagcuggauggaguccgaguuccgggucuacagcuccgccaacaacugcacguucgaguacgugagccagcccuuccugauggaccuggagggcaagcaggggaacuucaagaaccuccgcgaguucguguucaagaacaucgacggcuacuucaagaucuacuccaagcacaccccgaucaaccugguccgggaccugccccagggguucagcgcccucgagccccugguggaccugcccaucggcaucaacaucacccgcuuccagacccuccuggcccugcaccgguccuaccucacgccgggggacagcagcuccggcuggaccgcgggcgccgccgccuacuacgugggguaccugcagccccgcaccuuccugcucaaguacaacgagaacggcaccaucacggacgcggucgacugcgcccuggacccccugagcgagaccaagugcacccucaaguccuucaccguggagaaggggaucuaccagacgagcaacuuccgggugcagcccaccgaguccaucguccgcuucccgaacaucaccaaccugugccccuucggcgagguguucaacgccacccgguucgccagcgucuacgccuggaaccgcaagcggaucuccaacugcguggcggacuacagcgugcuguacaacuccgccagcuucuccacguucaagugcuacggcgucagccccaccaagcucaacgaccugugcuucaccaacguguacgccgacuccuucgugauccgcggggacgagguccggcagaucgcccccggccagaccgggaagaucgccgacuacaacuacaagcugccggacgacuucacgggcugcgugaucgcguggaacagcaacaaccucgacuccaaggucgggggcaacuacaacuaccuguaccgccuguuccgcaagagcaaccucaagcccuucgagcgggacaucuccaccgagaucuaccaggccggcagcacccccugcaacgggguggagggcuucaacugcuacuucccccugcaguccuacggguuccagccgaccaacggcgugggguaccagcccuaccggguggucgugcugagcuucgagcuccugcacgcccccgccacggugugcggccccaagaaguccaccaaccuggucaagaacaagugcgugaacuucaacuucaacggccucaccgggaccggcgugcugaccgagagcaacaagaaguuccugccguuccagcaguucgggcgcgacaucgccgacacgaccgacgcgguccgcgacccccagacccuggagauccucgacaucacccccugcagcuucggcgggguguccgugaucacgccgggcaccaacaccagcaaccaggucgccgugcuguaccaggacgugaacugcaccgagguccccguggccauccacgccgaccagcugacgcccaccuggcggguguacuccaccggcagcaacgucuuccagacccgcgccgggugccucaucggcgcggagcacgugaacaacuccuacgagugcgacauccccaucggggccggcaucugcgccagcuaccagacgcagaccaacuccccgcggcgcgcccggagcguggcgucccagagcaucaucgccuacaccaugucccugggcgccgagaacagcgucgccuacuccaacaacagcaucgccauccccaccaacuucacgaucuccgugaccaccgagauccugcccgugagcaugaccaagacgagcgucgacugcaccauguacaucugcggggacuccaccgagugcagcaaccuccugcugcaguacggcuccuucugcacccagcucaaccgcgcgcugacggggaucgccguggagcaggacaagaacacccaggagguguucgcccaggucaagcagaucuacaagacgcccccgaucaaggacuucggcggguucaacuucagccagauccugcccgaccccuccaagcccagcaagcgguccuucaucgaggaccuccuguucaacaaggugacccuggccgacgccggcuucaucaagcaguacggcgacugccucggggacaucgcggcccgcgaccugaucugcgcccagaaguucaacggccugaccgugcucccgccccugcugaccgacgagaugaucgcccaguacaccagcgcccuccuggcggggaccaucacguccggcuggugguucggggccggcgccgcccugcagauccccuucgcgaugcagauggccuaccgguucaacggcaucggggucacccagaacgugcucuacgagaaccagaagcugaucgccaaccaguucaacagcgccaucggcaagauccaggacucccugagcuccaccgccagcgcgcucgggaagcugcaggacguggucaaccagaacgcccaggcccugaacacgcucgugaagcagcuguccagcaacuucggcgccaucuccagcgugcugaacgacauccucucccgccuggacccgcccgaggccgaggugcagaucgaccggcugaucaccgggcgccuccagagccugcagaccuacgugacccagcagcugauccgggcggccgagauccgcuggagcgccaaccucgccgcgaccaagauguccgagugcguccugggccagagcaagcggguggacuucugcggcaagggguaccaccugauguccuucccccagagcgccccgcacggcguggucuuccuccacgugacguacguccccgcccaggagaagaacuucaccaccgcccccgcgaucugccacgacgggaaggcccacuucccccgcgagggcguguucguguccaacgggacccacugguucgucacgcagcggaacuucuacgagccgcagaucaucaccaccgacaacaccuucgugagcggcaacugcgacguggucaucggcaucgugaacaacacgguguacgacccccugcagcccgagcuggacuccuucaaggaggagcucgacaaguacuucaagaaccacaccagccccgacgucgaccugggggacaucuccggcaucaacgccagcguggugaacauccagaaggagaucgaccgccugaacgaggucgccaagaaccucaacgagucccugaucgaccugcaggagcucgggaaguacgagcaguacaucaagggcgggggcgggagcgacaucgaccccuacaaggaguucggcagcuccuaccagcugcucaacuuccugccccuggacuucuuccccgaccucaacgcccugguggacaccgccaccgcgcuguacgaggaggagcucacggggcgcgagcacugcagcccccaccacaccgccauccggcaggcccuggucugcugggacgagcugaccaagcucaucgccuggauguccagcaacaucaccuccgagcagguccgcacgaucaucgugaaccacgucaacgacaccuggggccugaaggugcggcagagccugugguuccaccucuccugccugaccuucgggcagcacaccgugcaggaguuccuggucagcuucggcguguggauccgcacgcccgccccguaccggccgcccaacgcgccgauccucuccacccugccggagcacaccgugaucugcugaggacuagucccuguucccagagcccacuuuuuuuucuuuuuuugaaauaaaauagccugucuuucagaucucaaaggcucuuuucagagccaccaaaaaaaaaaaaaaaaaaaaaaaaaaaaaaaaaaaaaaaaaaaaaaaaaaaaaaaaaaaaaaaaaaaaaaaaaaaaaaaaaaaaaaaaaaaaaaaaaaaaa

SEQ ID NO: 12401 - RNA, 4370 nt, Artificial Sequence
  SARS-CoV-2/Wuhan/WIV05/2019__EPI_ISL_402128 spike protein mRNA gc (1-1211)(K986P_V987P_P1069F) WhcAg construct
aggagagucccgcagucggcguccagcggcucugcuuguucgugugugugucguugcaggccuuauucaagcuuaccauguucguguuccugguccuccugccccuggugagcucccagugcgugaaccucaccacccgcacgcagcugccgcccgccuacaccaacagcuucacccggggcgucuacuaccccgacaagguguuccgcuccagcgugcugcacuccacccaggaccucuuccugcccuucuucagcaacgucacgugguuccacgccauccacguguccgggaccaacggcaccaagcgguucgacaacccggugcugcccuucaacgacggggucuacuucgcgagcaccgagaaguccaacaucauccgcggcuggaucuucgggacgacccucgacagcaagacccagucccugcugaucgugaacaacgccaccaacguggucaucaaggugugcgaguuccaguucugcaacgaccccuuccucggcguguacuaccacaagaacaacaagagcuggauggaguccgaguuccgggucuacagcuccgccaacaacugcacguucgaguacgugagccagcccuuccugauggaccuggagggcaagcaggggaacuucaagaaccuccgcgaguucguguucaagaacaucgacggcuacuucaagaucuacuccaagcacaccccgaucaaccugguccgggaccugccccagggguucagcgcccucgagccccugguggaccugcccaucggcaucaacaucacccgcuuccagacccuccuggcccugcaccgguccuaccucacgccgggggacagcagcuccggcuggaccgcgggcgccgccgccuacuacgugggguaccugcagccccgcaccuuccugcucaaguacaacgagaacggcaccaucacggacgcggucgacugcgcccuggacccccugagcgagaccaagugcacccucaaguccuucaccguggagaaggggaucuaccagacgagcaacuuccgggugcagcccaccgaguccaucguccgcuucccgaacaucaccaaccugugccccuucggcgagguguucaacgccacccgguucgccagcgucuacgccuggaaccgcaagcggaucuccaacugcguggcggacuacagcgugcuguacaacuccgccagcuucuccacguucaagugcuacggcgucagccccaccaagcucaacgaccugugcuucaccaacguguacgccgacuccuucgugauccgcggggacgagguccggcagaucgcccccggccagaccgggaagaucgccgacuacaacuacaagcugccggacgacuucacgggcugcgugaucgcguggaacagcaacaaccucgacuccaaggucgggggcaacuacaacuaccuguaccgccuguuccgcaagagcaaccucaagcccuucgagcgggacaucuccaccgagaucuaccaggccggcagcacccccugcaacgggguggagggcuucaacugcuacuucccccugcaguccuacggguuccagccgaccaacggcgugggguaccagcccuaccggguggucgugcugagcuucgagcuccugcacgcccccgccacggugugcggccccaagaaguccaccaaccuggucaagaacaagugcgugaacuucaacuucaacggccucaccgggaccggcgugcugaccgagagcaacaagaaguuccugccguuccagcaguucgggcgcgacaucgccgacacgaccgacgcgguccgcgacccccagacccuggagauccucgacaucacccccugcagcuucggcgggguguccgugaucacgccgggcaccaacaccagcaaccaggucgccgugcuguaccaggacgugaacugcaccgagguccccguggccauccacgccgaccagcugacgcccaccuggcggguguacuccaccggcagcaacgucuuccagacccgcgccgggugccucaucggcgcggagcacgugaacaacuccuacgagugcgacauccccaucggggccggcaucugcgccagcuaccagacgcagaccaacuccccgcggcgcgcccggagcguggcgucccagagcaucaucgccuacaccaugucccugggcgccgagaacagcgucgccuacuccaacaacagcaucgccauccccaccaacuucacgaucuccgugaccaccgagauccugcccgugagcaugaccaagacgagcgucgacugcaccauguacaucugcggggacuccaccgagugcagcaaccuccugcugcaguacggcuccuucugcacccagcucaaccgcgcgcugacggggaucgccguggagcaggacaagaacacccaggagguguucgcccaggucaagcagaucuacaagacgcccccgaucaaggacuucggcggguucaacuucagccagauccugcccgaccccuccaagcccagcaagcgguccuucaucgaggaccuccuguucaacaaggugacccuggccgacgccggcuucaucaagcaguacggcgacugccucggggacaucgcggcccgcgaccugaucugcgcccagaaguucaacggccugaccgugcucccgccccugcugaccgacgagaugaucgcccaguacaccagcgcccuccuggcggggaccaucacguccggcuggaccuucggggccggcgccgcccugcagauccccuucgcgaugcagauggccuaccgguucaacggcaucggggucacccagaacgugcucuacgagaaccagaagcugaucgccaaccaguucaacagcgccaucggcaagauccaggacucccugagcuccaccgccagcgcgcucgggaagcugcaggacguggucaaccagaacgcccaggcccugaacacgcucgugaagcagcuguccagcaacuucggcgccaucuccagcgugcugaacgacauccucucccgccuggacccgcccgaggccgaggugcagaucgaccggcugaucaccgggcgccuccagagccugcagaccuacgugacccagcagcugauccgggcggccgagauccgcgccagcgccaaccucgccgcgaccaagauguccgagugcguccugggccagagcaagcggguggacuucugcggcaagggguaccaccugauguccuucccccagagcgccccgcacggcguggucuuccuccacgugacguacgucuucgcccaggagaagaacuucaccaccgcccccgcgaucugccacgacgggaaggcccacuucccccgcgagggcguguucguguccaacgggacccacugguucgucacgcagcggaacuucuacgagccgcagaucaucaccaccgacaacaccuucgugagcggcaacugcgacguggucaucggcaucgugaacaacacgguguacgacccccugcagcccgagcuggacuccuucaaggaggagcucgacaaguacuucaagaaccacaccagccccgacgucgaccugggggacaucuccggcaucaacgccagcguggugaacauccagaaggagaucgaccgccugaacgaggucgccaagaaccucaacgagucccugaucgaccugcaggagcucgggaaguacgagcaguacaucaagggcgggggcgggagcgacaucgaccccuacaaggaguucggcagcuccuaccagcugcucaacuuccugccccuggacuucuuccccgaccucaacgcccugguggacaccgccaccgcgcuguacgaggaggagcucacggggcgcgagcacugcagcccccaccacaccgccauccggcaggcccuggucugcugggacgagcugaccaagcucaucgccuggauguccagcaacaucaccuccgagcagguccgcacgaucaucgugaaccacgucaacgacaccuggggccugaaggugcggcagagccugugguuccaccucuccugccugaccuucgggcagcacaccgugcaggaguuccuggucagcuucggcguguggauccgcacgcccgccccguaccggccgcccaacgcgccgauccucuccacccugccggagcacaccgugaucugcugaggacuagucccuguucccagagcccacuuuuuuuucuuuuuuugaaauaaaauagccugucuuucagaucucaaaggcucuuuucagagccaccaaaaaaaaaaaaaaaaaaaaaaaaaaaaaaaaaaaaaaaaaaaaaaaaaaaaaaaaaaaaaaaaaaaaaaaaaaaaaaaaaaaaaaaaaaaaaaaaaaaaa

SEQ ID NO: 12402 - RNA, 4370 nt, Artificial Sequence
  SARS-CoV-2/Wuhan/WIV05/2019__EPI_ISL_402128 spike protein mRNA gc (1-1211)(K986P_V987P_ H1048Q_H1064N_ H1083N_H1101N) WhcAg construct
aggagagucccgcagucggcguccagcggcucugcuuguucgugugugugucguugcaggccuuauucaagcuuaccauguucguguuccugguccuccugccccuggugagcucccagugcgugaaccucaccacccgcacgcagcugccgcccgccuacaccaacagcuucacccggggcgucuacuaccccgacaagguguuccgcuccagcgugcugcacuccacccaggaccucuuccugcccuucuucagcaacgucacgugguuccacgccauccacguguccgggaccaacggcaccaagcgguucgacaacccggugcugcccuucaacgacggggucuacuucgcgagcaccgagaaguccaacaucauccgcggcuggaucuucgggacgacccucgacagcaagacccagucccugcugaucgugaacaacgccaccaacguggucaucaaggugugcgaguuccaguucugcaacgaccccuuccucggcguguacuaccacaagaacaacaagagcuggauggaguccgaguuccgggucuacagcuccgccaacaacugcacguucgaguacgugagccagcccuuccugauggaccuggagggcaagcaggggaacuucaagaaccuccgcgaguucguguucaagaacaucgacggcuacuucaagaucuacuccaagcacaccccgaucaaccugguccgggaccugccccagggguucagcgcccucgagccccugguggaccugcccaucggcaucaacaucacccgcuuccagacccuccuggcccugcaccgguccuaccucacgccgggggacagcagcuccggcuggaccgcgggcgccgccgccuacuacgugggguaccugcagccccgcaccuuccugcucaaguacaacgagaacggcaccaucacggacgcggucgacugcgcccuggacccccugagcgagaccaagugcacccucaaguccuucaccguggagaaggggaucuaccagacgagcaacuuccgggugcagcccaccgaguccaucguccgcuucccgaacaucaccaaccugugccccuucggcgagguguucaacgccacccgguucgccagcgucuacgccuggaaccgcaagcggaucuccaacugcguggcggacuacagcgugcuguacaacuccgccagcuucuccacguucaagugcuacggcgucagccccaccaagcucaacgaccugugcuucaccaacguguacgccgacuccuucgugauccgcggggacgagguccggcagaucgcccccggccagaccgggaagaucgccgacuacaacuacaagcugccggacgacuucacgggcugcgugaucgcguggaacagcaacaaccucgacuccaaggucgggggcaacuacaacuaccuguaccgccuguuccgcaagagcaaccucaagcccuucgagcgggacaucuccaccgagaucuaccaggccggcagcacccccugcaacgggguggagggcuucaacugcuacuucccccugcaguccuacggguuccagccgaccaacggcgugggguaccagcccuaccggguggucgugcugagcuucgagcuccugcacgcccccgccacggugugcggccccaagaaguccaccaaccuggucaagaacaagugcgugaacuucaacuucaacggccucaccgggaccggcgugcugaccgagagcaacaagaaguuccugccguuccagcaguucgggcgcgacaucgccgacacgaccgacgcgguccgcgacccccagacccuggagauccucgacaucacccccugcagcuucggcgggguguccgugaucacgccgggcaccaacaccagcaaccaggucgccgugcuguaccaggacgugaacugcaccgagguccccguggccauccacgccgaccagcugacgcccaccuggcggguguacuccaccggcagcaacgucuuccagacccgcgccgggugccucaucggcgcggagcacgugaacaacuccuacgagugcgacauccccaucggggccggcaucugcgccagcuaccagacgcagaccaacuccccgcggcgcgcccggagcguggcgucccagagcaucaucgccuacaccaugucccugggcgccgagaacagcgucgccuacuccaacaacagcaucgccauccccaccaacuucacgaucuccgugaccaccgagauccugcccgugagcaugaccaagacgagcgucgacugcaccauguacaucugcggggacuccaccgagugcagcaaccuccugcugcaguacggcuccuucugcacccagcucaaccgcgcgcugacggggaucgccguggagcaggacaagaacacccaggagguguucgcccaggucaagcagaucuacaagacgcccccgaucaaggacuucggcggguucaacuucagccagauccugcccgaccccuccaagcccagcaagcgguccuucaucgaggaccuccuguucaacaaggugacccuggccgacgccggcuucaucaagcaguacggcgacugccucggggacaucgcggcccgcgaccugaucugcgcccagaaguucaacggccugaccgugcucccgccccugcugaccgacgagaugaucgcccaguacaccagcgcccuccuggcggggaccaucacguccggcuggaccuucggggccggcgccgcccugcagauccccuucgcgaugcagauggccuaccgguucaacggcaucggggucacccagaacgugcucuacgagaaccagaagcugaucgccaaccaguucaacagcgccaucggcaagauccaggacucccugagcuccaccgccagcgcgcucgggaagcugcaggacguggucaaccagaacgcccaggcccugaacacgcucgugaagcagcuguccagcaacuucggcgccaucuccagcgugcugaacgacauccucucccgccuggacccgcccgaggccgaggugcagaucgaccggcugaucaccgggcgccuccagagccugcagaccuacgugacccagcagcugauccgggcggccgagauccgcgccagcgccaaccucgccgcgaccaagauguccgagugcguccugggccagagcaagcggguggacuucugcggcaagggguaccagcugauguccuucccccagagcgccccgcacggcguggucuuccucaacgugacguacguccccgcccaggagaagaacuucaccaccgcccccgcgaucugcaacgacgggaaggcccacuucccccgcgagggcguguucguguccaacgggaccaacugguucgucacgcagcggaacuucuacgagccgcagaucaucaccaccgacaacaccuucgugagcggcaacugcgacguggucaucggcaucgugaacaacacgguguacgacccccugcagcccgagcuggacuccuucaaggaggagcucgacaaguacuucaagaaccacaccagccccgacgucgaccugggggacaucuccggcaucaacgccagcguggugaacauccagaaggagaucgaccgccugaacgaggucgccaagaaccucaacgagucccugaucgaccugcaggagcucgggaaguacgagcaguacaucaagggcgggggcgggagcgacaucgaccccuacaaggaguucggcagcuccuaccagcugcucaacuuccugccccuggacuucuuccccgaccucaacgcccugguggacaccgccaccgcgcuguacgaggaggagcucacggggcgcgagcacugcagcccccaccacaccgccauccggcaggcccuggucugcugggacgagcugaccaagcucaucgccuggauguccagcaacaucaccuccgagcagguccgcacgaucaucgugaaccacgucaacgacaccuggggccugaaggugcggcagagccugugguuccaccucuccugccugaccuucgggcagcacaccgugcaggaguuccuggucagcuucggcguguggauccgcacgcccgccccguaccggccgcccaacgcgccgauccucuccacccugccggagcacaccgugaucugcugaggacuagucccuguucccagagcccacuuuuuuuucuuuuuuugaaauaaaauagccugucuuucagaucucaaaggcucuuuucagagccaccaaaaaaaaaaaaaaaaaaaaaaaaaaaaaaaaaaaaaaaaaaaaaaaaaaaaaaaaaaaaaaaaaaaaaaaaaaaaaaaaaaaaaaaaaaaaaaaaaaaaa

SEQ ID NO: 12403 - RNA, 4370 nt, Artificial Sequence
  SARS-CoV-2/Wuhan/WIV05/2019__EPI_ISL_402128 spike protein mRNA gc (1-1211)(I712C_T1077C) WhcAg construct
aggagagucccgcagucggcguccagcggcucugcuuguucgugugugugucguugcaggccuuauucaagcuuaccauguucguguuccugguccuccugccccuggugagcucccagugcgugaaccucaccacccgcacgcagcugccgcccgccuacaccaacagcuucacccggggcgucuacuaccccgacaagguguuccgcuccagcgugcugcacuccacccaggaccucuuccugcccuucuucagcaacgucacgugguuccacgccauccacguguccgggaccaacggcaccaagcgguucgacaacccggugcugcccuucaacgacggggucuacuucgcgagcaccgagaaguccaacaucauccgcggcuggaucuucgggacgacccucgacagcaagacccagucccugcugaucgugaacaacgccaccaacguggucaucaaggugugcgaguuccaguucugcaacgaccccuuccucggcguguacuaccacaagaacaacaagagcuggauggaguccgaguuccgggucuacagcuccgccaacaacugcacguucgaguacgugagccagcccuuccugauggaccuggagggcaagcaggggaacuucaagaaccuccgcgaguucguguucaagaacaucgacggcuacuucaagaucuacuccaagcacaccccgaucaaccugguccgggaccugccccagggguucagcgcccucgagccccugguggaccugcccaucggcaucaacaucacccgcuuccagacccuccuggcccugcaccgguccuaccucacgccgggggacagcagcuccggcuggaccgcgggcgccgccgccuacuacgugggguaccugcagccccgcaccuuccugcucaaguacaacgagaacggcaccaucacggacgcggucgacugcgcccuggacccccugagcgagaccaagugcacccucaaguccuucaccguggagaaggggaucuaccagacgagcaacuuccgggugcagcccaccgaguccaucguccgcuucccgaacaucaccaaccugugccccuucggcgagguguucaacgccacccgguucgccagcgucuacgccuggaaccgcaagcggaucuccaacugcguggcggacuacagcgugcuguacaacuccgccagcuucuccacguucaagugcuacggcgucagccccaccaagcucaacgaccugugcuucaccaacguguacgccgacuccuucgugauccgcggggacgagguccggcagaucgcccccggccagaccgggaagaucgccgacuacaacuacaagcugccggacgacuucacgggcugcgugaucgcguggaacagcaacaaccucgacuccaaggucgggggcaacuacaacuaccuguaccgccuguuccgcaagagcaaccucaagcccuucgagcgggacaucuccaccgagaucuaccaggccggcagcacccccugcaacgggguggagggcuucaacugcuacuucccccugcaguccuacggguuccagccgaccaacggcgugggguaccagcccuaccggguggucgugcugagcuucgagcuccugcacgcccccgccacggugugcggccccaagaaguccaccaaccuggucaagaacaagugcgugaacuucaacuucaacggccucaccgggaccggcgugcugaccgagagcaacaagaaguuccugccguuccagcaguucgggcgcgacaucgccgacacgaccgacgcgguccgcgacccccagacccuggagauccucgacaucacccccugcagcuucggcgggguguccgugaucacgccgggcaccaacaccagcaaccaggucgccgugcuguaccaggacgugaacugcaccgagguccccguggccauccacgccgaccagcugacgcccaccuggcggguguacuccaccggcagcaacgucuuccagacccgcgccgggugccucaucggcgcggagcacgugaacaacuccuacgagugcgacauccccaucggggccggcaucugcgccagcuaccagacgcagaccaacuccccgcggcgcgcccggagcguggcgucccagagcaucaucgccuacaccaugucccugggcgccgagaacagcgucgccuacuccaacaacagcugcgccauccccaccaacuucacgaucuccgugaccaccgagauccugcccgugagcaugaccaagacgagcgucgacugcaccauguacaucugcggggacuccaccgagugcagcaaccuccugcugcaguacggcuccuucugcacccagcucaaccgcgcgcugacggggaucgccguggagcaggacaagaacacccaggagguguucgcccaggucaagcagaucuacaagacgcccccgaucaaggacuucggcggguucaacuucagccagauccugcccgaccccuccaagcccagcaagcgguccuucaucgaggaccuccuguucaacaaggugacccuggccgacgccggcuucaucaagcaguacggcgacugccucggggacaucgcggcccgcgaccugaucugcgcccagaaguucaacggccugaccgugcucccgccccugcugaccgacgagaugaucgcccaguacaccagcgcccuccuggcggggaccaucacguccggcuggaccuucggggccggcgccgcccugcagauccccuucgcgaugcagauggccuaccgguucaacggcaucggggucacccagaacgugcucuacgagaaccagaagcugaucgccaaccaguucaacagcgccaucggcaagauccaggacucccugagcuccaccgccagcgcgcucgggaagcugcaggacguggucaaccagaacgcccaggcccugaacacgcucgugaagcagcuguccagcaacuucggcgccaucuccagcgugcugaacgacauccucucccgccuggacaaggucgaggccgaggugcagaucgaccggcugaucaccgggcgccuccagagccugcagaccuacgugacccagcagcugauccgggcggccgagauccgcgccagcgccaaccucgccgcgaccaagauguccgagugcguccugggccagagcaagcggguggacuucugcggcaagggguaccaccugauguccuucccccagagcgccccgcacggcguggucuuccuccacgugacguacguccccgcccaggagaagaacuucaccugcgcccccgcgaucugccacgacgggaaggcccacuucccccgcgagggcguguucguguccaacgggacccacugguucgucacgcagcggaacuucuacgagccgcagaucaucaccaccgacaacaccuucgugagcggcaacugcgacguggucaucggcaucgugaacaacacgguguacgacccccugcagcccgagcuggacuccuucaaggaggagcucgacaaguacuucaagaaccacaccagccccgacgucgaccugggggacaucuccggcaucaacgccagcguggugaacauccagaaggagaucgaccgccugaacgaggucgccaagaaccucaacgagucccugaucgaccugcaggagcucgggaaguacgagcaguacaucaagggcgggggcgggagcgacaucgaccccuacaaggaguucggcagcuccuaccagcugcucaacuuccugccccuggacuucuuccccgaccucaacgcccugguggacaccgccaccgcgcuguacgaggaggagcucacggggcgcgagcacugcagcccccaccacaccgccauccggcaggcccuggucugcugggacgagcugaccaagcucaucgccuggauguccagcaacaucaccuccgagcagguccgcacgaucaucgugaaccacgucaacgacaccuggggccugaaggugcggcagagccugugguuccaccucuccugccugaccuucgggcagcacaccgugcaggaguuccuggucagcuucggcguguggauccgcacgcccgccccguaccggccgcccaacgcgccgauccucuccacccugccggagcacaccgugaucugcugaggacuagucccuguucccagagcccacuuuuuuuucuuuuuuugaaauaaaauagccugucuuucagaucucaaaggcucuuuucagagccaccaaaaaaaaaaaaaaaaaaaaaaaaaaaaaaaaaaaaaaaaaaaaaaaaaaaaaaaaaaaaaaaaaaaaaaaaaaaaaaaaaaaaaaaaaaaaaaaaaaaaa

SEQ ID NO: 12404 - RNA, 4370 nt, Artificial Sequence
  SARS-CoV-2/Wuhan/WIV05/2019__EPI_ISL_402128 spike protein mRNA gc (1-1211)(I714C_Y1110C) WhcAg construct
aggagagucccgcagucggcguccagcggcucugcuuguucgugugugugucguugcaggccuuauucaagcuuaccauguucguguuccugguccuccugccccuggugagcucccagugcgugaaccucaccacccgcacgcagcugccgcccgccuacaccaacagcuucacccggggcgucuacuaccccgacaagguguuccgcuccagcgugcugcacuccacccaggaccucuuccugcccuucuucagcaacgucacgugguuccacgccauccacguguccgggaccaacggcaccaagcgguucgacaacccggugcugcccuucaacgacggggucuacuucgcgagcaccgagaaguccaacaucauccgcggcuggaucuucgggacgacccucgacagcaagacccagucccugcugaucgugaacaacgccaccaacguggucaucaaggugugcgaguuccaguucugcaacgaccccuuccucggcguguacuaccacaagaacaacaagagcuggauggaguccgaguuccgggucuacagcuccgccaacaacugcacguucgaguacgugagccagcccuuccugauggaccuggagggcaagcaggggaacuucaagaaccuccgcgaguucguguucaagaacaucgacggcuacuucaagaucuacuccaagcacaccccgaucaaccugguccgggaccugccccagggguucagcgcccucgagccccugguggaccugcccaucggcaucaacaucacccgcuuccagacccuccuggcccugcaccgguccuaccucacgccgggggacagcagcuccggcuggaccgcgggcgccgccgccuacuacgugggguaccugcagccccgcaccuuccugcucaaguacaacgagaacggcaccaucacggacgcggucgacugcgcccuggacccccugagcgagaccaagugcacccucaaguccuucaccguggagaaggggaucuaccagacgagcaacuuccgggugcagcccaccgaguccaucguccgcuucccgaacaucaccaaccugugccccuucggcgagguguucaacgccacccgguucgccagcgucuacgccuggaaccgcaagcggaucuccaacugcguggcggacuacagcgugcuguacaacuccgccagcuucuccacguucaagugcuacggcgucagccccaccaagcucaacgaccugugcuucaccaacguguacgccgacuccuucgugauccgcggggacgagguccggcagaucgcccccggccagaccgggaagaucgccgacuacaacuacaagcugccggacgacuucacgggcugcgugaucgcguggaacagcaacaaccucgacuccaaggucgggggcaacuacaacuaccuguaccgccuguuccgcaagagcaaccucaagcccuucgagcgggacaucuccaccgagaucuaccaggccggcagcacccccugcaacgggguggagggcuucaacugcuacuucccccugcaguccuacggguuccagccgaccaacggcgugggguaccagcccuaccggguggucgugcugagcuucgagcuccugcacgcccccgccacggugugcggccccaagaaguccaccaaccuggucaagaacaagugcgugaacuucaacuucaacggccucaccgggaccggcgugcugaccgagagcaacaagaaguuccugccguuccagcaguucgggcgcgacaucgccgacacgaccgacgcgguccgcgacccccagacccuggagauccucgacaucacccccugcagcuucggcgggguguccgugaucacgccgggcaccaacaccagcaaccaggucgccgugcuguaccaggacgugaacugcaccgagguccccguggccauccacgccgaccagcugacgcccaccuggcggguguacuccaccggcagcaacgucuuccagacccgcgccgggugccucaucggcgcggagcacgugaacaacuccuacgagugcgacauccccaucggggccggcaucugcgccagcuaccagacgcagaccaacuccccgcggcgcgcccggagcguggcgucccagagcaucaucgccuacaccaugucccugggcgccgagaacagcgucgccuacuccaacaacagcaucgccugccccaccaacuucacgaucuccgugaccaccgagauccugcccgugagcaugaccaagacgagcgucgacugcaccauguacaucugcggggacuccaccgagugcagcaaccuccugcugcaguacggcuccuucugcacccagcucaaccgcgcgcugacggggaucgccguggagcaggacaagaacacccaggagguguucgcccaggucaagcagaucuacaagacgcccccgaucaaggacuucggcggguucaacuucagccagauccugcccgaccccuccaagcccagcaagcgguccuucaucgaggaccuccuguucaacaaggugacccuggccgacgccggcuucaucaagcaguacggcgacugccucggggacaucgcggcccgcgaccugaucugcgcccagaaguucaacggccugaccgugcucccgccccugcugaccgacgagaugaucgcccaguacaccagcgcccuccuggcggggaccaucacguccggcuggaccuucggggccggcgccgcccugcagauccccuucgcgaugcagauggccuaccgguucaacggcaucggggucacccagaacgugcucuacgagaaccagaagcugaucgccaaccaguucaacagcgccaucggcaagauccaggacucccugagcuccaccgccagcgcgcucgggaagcugcaggacguggucaaccagaacgcccaggcccugaacacgcucgugaagcagcuguccagcaacuucggcgccaucuccagcgugcugaacgacauccucucccgccuggacaaggucgaggccgaggugcagaucgaccggcugaucaccgggcgccuccagagccugcagaccuacgugacccagcagcugauccgggcggccgagauccgcgccagcgccaaccucgccgcgaccaagauguccgagugcguccugggccagagcaagcggguggacuucugcggcaagggguaccaccugauguccuucccccagagcgccccgcacggcguggucuuccuccacgugacguacguccccgcccaggagaagaacuucaccaccgcccccgcgaucugccacgacgggaaggcccacuucccccgcgagggcguguucguguccaacgggacccacugguucgucacgcagcggaacuucugcgagccgcagaucaucaccaccgacaacaccuucgugagcggcaacugcgacguggucaucggcaucgugaacaacacgguguacgacccccugcagcccgagcuggacuccuucaaggaggagcucgacaaguacuucaagaaccacaccagccccgacgucgaccugggggacaucuccggcaucaacgccagcguggugaacauccagaaggagaucgaccgccugaacgaggucgccaagaaccucaacgagucccugaucgaccugcaggagcucgggaaguacgagcaguacaucaagggcgggggcgggagcgacaucgaccccuacaaggaguucggcagcuccuaccagcugcucaacuuccugccccuggacuucuuccccgaccucaacgcccugguggacaccgccaccgcgcuguacgaggaggagcucacggggcgcgagcacugcagcccccaccacaccgccauccggcaggcccuggucugcugggacgagcugaccaagcucaucgccuggauguccagcaacaucaccuccgagcagguccgcacgaucaucgugaaccacgucaacgacaccuggggccugaaggugcggcagagccugugguuccaccucuccugccugaccuucgggcagcacaccgugcaggaguuccuggucagcuucggcguguggauccgcacgcccgccccguaccggccgcccaacgcgccgauccucuccacccugccggagcacaccgugaucugcugaggacuagucccuguucccagagcccacuuuuuuuucuuuuuuugaaauaaaauagccugucuuucagaucucaaaggcucuuuucagagccaccaaaaaaaaaaaaaaaaaaaaaaaaaaaaaaaaaaaaaaaaaaaaaaaaaaaaaaaaaaaaaaaaaaaaaaaaaaaaaaaaaaaaaaaaaaaaaaaaaaaaa

SEQ ID NO: 12405 - RNA, 4370 nt, Artificial Sequence
  SARS-CoV-2/Wuhan/WIV05/2019__EPI_ISL_402128 spike protein mRNA gc (1-1211)(P715C_P1069C) WhcAg construct
aggagagucccgcagucggcguccagcggcucugcuuguucgugugugugucguugcaggccuuauucaagcuuaccauguucguguuccugguccuccugccccuggugagcucccagugcgugaaccucaccacccgcacgcagcugccgcccgccuacaccaacagcuucacccggggcgucuacuaccccgacaagguguuccgcuccagcgugcugcacuccacccaggaccucuuccugcccuucuucagcaacgucacgugguuccacgccauccacguguccgggaccaacggcaccaagcgguucgacaacccggugcugcccuucaacgacggggucuacuucgcgagcaccgagaaguccaacaucauccgcggcuggaucuucgggacgacccucgacagcaagacccagucccugcugaucgugaacaacgccaccaacguggucaucaaggugugcgaguuccaguucugcaacgaccccuuccucggcguguacuaccacaagaacaacaagagcuggauggaguccgaguuccgggucuacagcuccgccaacaacugcacguucgaguacgugagccagcccuuccugauggaccuggagggcaagcaggggaacuucaagaaccuccgcgaguucguguucaagaacaucgacggcuacuucaagaucuacuccaagcacaccccgaucaaccugguccgggaccugccccagggguucagcgcccucgagccccugguggaccugcccaucggcaucaacaucacccgcuuccagacccuccuggcccugcaccgguccuaccucacgccgggggacagcagcuccggcuggaccgcgggcgccgccgccuacuacgugggguaccugcagccccgcaccuuccugcucaaguacaacgagaacggcaccaucacggacgcggucgacugcgcccuggacccccugagcgagaccaagugcacccucaaguccuucaccguggagaaggggaucuaccagacgagcaacuuccgggugcagcccaccgaguccaucguccgcuucccgaacaucaccaaccugugccccuucggcgagguguucaacgccacccgguucgccagcgucuacgccuggaaccgcaagcggaucuccaacugcguggcggacuacagcgugcuguacaacuccgccagcuucuccacguucaagugcuacggcgucagccccaccaagcucaacgaccugugcuucaccaacguguacgccgacuccuucgugauccgcggggacgagguccggcagaucgcccccggccagaccgggaagaucgccgacuacaacuacaagcugccggacgacuucacgggcugcgugaucgcguggaacagcaacaaccucgacuccaaggucgggggcaacuacaacuaccuguaccgccuguuccgcaagagcaaccucaagcccuucgagcgggacaucuccaccgagaucuaccaggccggcagcacccccugcaacgggguggagggcuucaacugcuacuucccccugcaguccuacggguuccagccgaccaacggcgugggguaccagcccuaccggguggucgugcugagcuucgagcuccugcacgcccccgccacggugugcggccccaagaaguccaccaaccuggucaagaacaagugcgugaacuucaacuucaacggccucaccgggaccggcgugcugaccgagagcaacaagaaguuccugccguuccagcaguucgggcgcgacaucgccgacacgaccgacgcgguccgcgacccccagacccuggagauccucgacaucacccccugcagcuucggcgggguguccgugaucacgccgggcaccaacaccagcaaccaggucgccgugcuguaccaggacgugaacugcaccgagguccccguggccauccacgccgaccagcugacgcccaccuggcggguguacuccaccggcagcaacgucuuccagacccgcgccgggugccucaucggcgcggagcacgugaacaacuccuacgagugcgacauccccaucggggccggcaucugcgccagcuaccagacgcagaccaacuccccgcggcgcgcccggagcguggcgucccagagcaucaucgccuacaccaugucccugggcgccgagaacagcgucgccuacuccaacaacagcaucgccaucugcaccaacuucacgaucuccgugaccaccgagauccugcccgugagcaugaccaagacgagcgucgacugcaccauguacaucugcggggacuccaccgagugcagcaaccuccugcugcaguacggcuccuucugcacccagcucaaccgcgcgcugacggggaucgccguggagcaggacaagaacacccaggagguguucgcccaggucaagcagaucuacaagacgcccccgaucaaggacuucggcggguucaacuucagccagauccugcccgaccccuccaagcccagcaagcgguccuucaucgaggaccuccuguucaacaaggugacccuggccgacgccggcuucaucaagcaguacggcgacugccucggggacaucgcggcccgcgaccugaucugcgcccagaaguucaacggccugaccgugcucccgccccugcugaccgacgagaugaucgcccaguacaccagcgcccuccuggcggggaccaucacguccggcuggaccuucggggccggcgccgcccugcagauccccuucgcgaugcagauggccuaccgguucaacggcaucggggucacccagaacgugcucuacgagaaccagaagcugaucgccaaccaguucaacagcgccaucggcaagauccaggacucccugagcuccaccgccagcgcgcucgggaagcugcaggacguggucaaccagaacgcccaggcccugaacacgcucgugaagcagcuguccagcaacuucggcgccaucuccagcgugcugaacgacauccucucccgccuggacaaggucgaggccgaggugcagaucgaccggcugaucaccgggcgccuccagagccugcagaccuacgugacccagcagcugauccgggcggccgagauccgcgccagcgccaaccucgccgcgaccaagauguccgagugcguccugggccagagcaagcggguggacuucugcggcaagggguaccaccugauguccuucccccagagcgccccgcacggcguggucuuccuccacgugacguacgucugcgcccaggagaagaacuucaccaccgcccccgcgaucugccacgacgggaaggcccacuucccccgcgagggcguguucguguccaacgggacccacugguucgucacgcagcggaacuucuacgagccgcagaucaucaccaccgacaacaccuucgugagcggcaacugcgacguggucaucggcaucgugaacaacacgguguacgacccccugcagcccgagcuggacuccuucaaggaggagcucgacaaguacuucaagaaccacaccagccccgacgucgaccugggggacaucuccggcaucaacgccagcguggugaacauccagaaggagaucgaccgccugaacgaggucgccaagaaccucaacgagucccugaucgaccugcaggagcucgggaaguacgagcaguacaucaagggcgggggcgggagcgacaucgaccccuacaaggaguucggcagcuccuaccagcugcucaacuuccugccccuggacuucuuccccgaccucaacgcccugguggacaccgccaccgcgcuguacgaggaggagcucacggggcgcgagcacugcagcccccaccacaccgccauccggcaggcccuggucugcugggacgagcugaccaagcucaucgccuggauguccagcaacaucaccuccgagcagguccgcacgaucaucgugaaccacgucaacgacaccuggggccugaaggugcggcagagccugugguuccaccucuccugccugaccuucgggcagcacaccgugcaggaguuccuggucagcuucggcguguggauccgcacgcccgccccguaccggccgcccaacgcgccgauccucuccacccugccggagcacaccgugaucugcugaggacuagucccuguucccagagcccacuuuuuuuucuuuuuuugaaauaaaauagccugucuuucagaucucaaaggcucuuuucagagccaccaaaaaaaaaaaaaaaaaaaaaaaaaaaaaaaaaaaaaaaaaaaaaaaaaaaaaaaaaaaaaaaaaaaaaaaaaaaaaaaaaaaaaaaaaaaaaaaaaaaaa

SEQ ID NO: 12406 - RNA, 4370 nt, Artificial Sequence
  SARS-CoV-2/Wuhan/WIV05/2019__EPI_ISL_402128 spike protein mRNA gc (1-1211)(G889C_L1034C) WhcAg construct
aggagagucccgcagucggcguccagcggcucugcuuguucgugugugugucguugcaggccuuauucaagcuuaccauguucguguuccugguccuccugccccuggugagcucccagugcgugaaccucaccacccgcacgcagcugccgcccgccuacaccaacagcuucacccggggcgucuacuaccccgacaagguguuccgcuccagcgugcugcacuccacccaggaccucuuccugcccuucuucagcaacgucacgugguuccacgccauccacguguccgggaccaacggcaccaagcgguucgacaacccggugcugcccuucaacgacggggucuacuucgcgagcaccgagaaguccaacaucauccgcggcuggaucuucgggacgacccucgacagcaagacccagucccugcugaucgugaacaacgccaccaacguggucaucaaggugugcgaguuccaguucugcaacgaccccuuccucggcguguacuaccacaagaacaacaagagcuggauggaguccgaguuccgggucuacagcuccgccaacaacugcacguucgaguacgugagccagcccuuccugauggaccuggagggcaagcaggggaacuucaagaaccuccgcgaguucguguucaagaacaucgacggcuacuucaagaucuacuccaagcacaccccgaucaaccugguccgggaccugccccagggguucagcgcccucgagccccugguggaccugcccaucggcaucaacaucacccgcuuccagacccuccuggcccugcaccgguccuaccucacgccgggggacagcagcuccggcuggaccgcgggcgccgccgccuacuacgugggguaccugcagccccgcaccuuccugcucaaguacaacgagaacggcaccaucacggacgcggucgacugcgcccuggacccccugagcgagaccaagugcacccucaaguccuucaccguggagaaggggaucuaccagacgagcaacuuccgggugcagcccaccgaguccaucguccgcuucccgaacaucaccaaccugugccccuucggcgagguguucaacgccacccgguucgccagcgucuacgccuggaaccgcaagcggaucuccaacugcguggcggacuacagcgugcuguacaacuccgccagcuucuccacguucaagugcuacggcgucagccccaccaagcucaacgaccugugcuucaccaacguguacgccgacuccuucgugauccgcggggacgagguccggcagaucgcccccggccagaccgggaagaucgccgacuacaacuacaagcugccggacgacuucacgggcugcgugaucgcguggaacagcaacaaccucgacuccaaggucgggggcaacuacaacuaccuguaccgccuguuccgcaagagcaaccucaagcccuucgagcgggacaucuccaccgagaucuaccaggccggcagcacccccugcaacgggguggagggcuucaacugcuacuucccccugcaguccuacggguuccagccgaccaacggcgugggguaccagcccuaccggguggucgugcugagcuucgagcuccugcacgcccccgccacggugugcggccccaagaaguccaccaaccuggucaagaacaagugcgugaacuucaacuucaacggccucaccgggaccggcgugcugaccgagagcaacaagaaguuccugccguuccagcaguucgggcgcgacaucgccgacacgaccgacgcgguccgcgacccccagacccuggagauccucgacaucacccccugcagcuucggcgggguguccgugaucacgccgggcaccaacaccagcaaccaggucgccgugcuguaccaggacgugaacugcaccgagguccccguggccauccacgccgaccagcugacgcccaccuggcggguguacuccaccggcagcaacgucuuccagacccgcgccgggugccucaucggcgcggagcacgugaacaacuccuacgagugcgacauccccaucggggccggcaucugcgccagcuaccagacgcagaccaacuccccgcggcgcgcccggagcguggcgucccagagcaucaucgccuacaccaugucccugggcgccgagaacagcgucgccuacuccaacaacagcaucgccauccccaccaacuucacgaucuccgugaccaccgagauccugcccgugagcaugaccaagacgagcgucgacugcaccauguacaucugcggggacuccaccgagugcagcaaccuccugcugcaguacggcuccuucugcacccagcucaaccgcgcgcugacggggaucgccguggagcaggacaagaacacccaggagguguucgcccaggucaagcagaucuacaagacgcccccgaucaaggacuucggcggguucaacuucagccagauccugcccgaccccuccaagcccagcaagcgguccuucaucgaggaccuccuguucaacaaggugacccuggccgacgccggcuucaucaagcaguacggcgacugccucggggacaucgcggcccgcgaccugaucugcgcccagaaguucaacggccugaccgugcucccgccccugcugaccgacgagaugaucgcccaguacaccagcgcccuccuggcggggaccaucacguccggcuggaccuucugcgccggcgccgcccugcagauccccuucgcgaugcagauggccuaccgguucaacggcaucggggucacccagaacgugcucuacgagaaccagaagcugaucgccaaccaguucaacagcgccaucggcaagauccaggacucccugagcuccaccgccagcgcgcucgggaagcugcaggacguggucaaccagaacgcccaggcccugaacacgcucgugaagcagcuguccagcaacuucggcgccaucuccagcgugcugaacgacauccucucccgccuggacaaggucgaggccgaggugcagaucgaccggcugaucaccgggcgccuccagagccugcagaccuacgugacccagcagcugauccgggcggccgagauccgcgccagcgccaaccucgccgcgaccaagauguccgagugcgucugcggccagagcaagcggguggacuucugcggcaagggguaccaccugauguccuucccccagagcgccccgcacggcguggucuuccuccacgugacguacguccccgcccaggagaagaacuucaccaccgcccccgcgaucugccacgacgggaaggcccacuucccccgcgagggcguguucguguccaacgggacccacugguucgucacgcagcggaacuucuacgagccgcagaucaucaccaccgacaacaccuucgugagcggcaacugcgacguggucaucggcaucgugaacaacacgguguacgacccccugcagcccgagcuggacuccuucaaggaggagcucgacaaguacuucaagaaccacaccagccccgacgucgaccugggggacaucuccggcaucaacgccagcguggugaacauccagaaggagaucgaccgccugaacgaggucgccaagaaccucaacgagucccugaucgaccugcaggagcucgggaaguacgagcaguacaucaagggcgggggcgggagcgacaucgaccccuacaaggaguucggcagcuccuaccagcugcucaacuuccugccccuggacuucuuccccgaccucaacgcccugguggacaccgccaccgcgcuguacgaggaggagcucacggggcgcgagcacugcagcccccaccacaccgccauccggcaggcccuggucugcugggacgagcugaccaagcucaucgccuggauguccagcaacaucaccuccgagcagguccgcacgaucaucgugaaccacgucaacgacaccuggggccugaaggugcggcagagccugugguuccaccucuccugccugaccuucgggcagcacaccgugcaggaguuccuggucagcuucggcguguggauccgcacgcccgccccguaccggccgcccaacgcgccgauccucuccacccugccggagcacaccgugaucugcugaggacuagucccuguucccagagcccacuuuuuuuucuuuuuuugaaauaaaauagccugucuuucagaucucaaaggcucuuuucagagccaccaaaaaaaaaaaaaaaaaaaaaaaaaaaaaaaaaaaaaaaaaaaaaaaaaaaaaaaaaaaaaaaaaaaaaaaaaaaaaaaaaaaaaaaaaaaaaaaaaaaaa

SEQ ID NO: 12407 - RNA, 4370 nt, Artificial Sequence
  SARS-CoV-2/Wuhan/WIV05/2019__EPI_ISL_402128 spike protein mRNA gc (1-1211)(I909C_Y1047C) WhcAg construct
aggagagucccgcagucggcguccagcggcucugcuuguucgugugugugucguugcaggccuuauucaagcuuaccauguucguguuccugguccuccugccccuggugagcucccagugcgugaaccucaccacccgcacgcagcugccgcccgccuacaccaacagcuucacccggggcgucuacuaccccgacaagguguuccgcuccagcgugcugcacuccacccaggaccucuuccugcccuucuucagcaacgucacgugguuccacgccauccacguguccgggaccaacggcaccaagcgguucgacaacccggugcugcccuucaacgacggggucuacuucgcgagcaccgagaaguccaacaucauccgcggcuggaucuucgggacgacccucgacagcaagacccagucccugcugaucgugaacaacgccaccaacguggucaucaaggugugcgaguuccaguucugcaacgaccccuuccucggcguguacuaccacaagaacaacaagagcuggauggaguccgaguuccgggucuacagcuccgccaacaacugcacguucgaguacgugagccagcccuuccugauggaccuggagggcaagcaggggaacuucaagaaccuccgcgaguucguguucaagaacaucgacggcuacuucaagaucuacuccaagcacaccccgaucaaccugguccgggaccugccccagggguucagcgcccucgagccccugguggaccugcccaucggcaucaacaucacccgcuuccagacccuccuggcccugcaccgguccuaccucacgccgggggacagcagcuccggcuggaccgcgggcgccgccgccuacuacgugggguaccugcagccccgcaccuuccugcucaaguacaacgagaacggcaccaucacggacgcggucgacugcgcccuggacccccugagcgagaccaagugcacccucaaguccuucaccguggagaaggggaucuaccagacgagcaacuuccgggugcagcccaccgaguccaucguccgcuucccgaacaucaccaaccugugccccuucggcgagguguucaacgccacccgguucgccagcgucuacgccuggaaccgcaagcggaucuccaacugcguggcggacuacagcgugcuguacaacuccgccagcuucuccacguucaagugcuacggcgucagccccaccaagcucaacgaccugugcuucaccaacguguacgccgacuccuucgugauccgcggggacgagguccggcagaucgcccccggccagaccgggaagaucgccgacuacaacuacaagcugccggacgacuucacgggcugcgugaucgcguggaacagcaacaaccucgacuccaaggucgggggcaacuacaacuaccuguaccgccuguuccgcaagagcaaccucaagcccuucgagcgggacaucuccaccgagaucuaccaggccggcagcacccccugcaacgggguggagggcuucaacugcuacuucccccugcaguccuacggguuccagccgaccaacggcgugggguaccagcccuaccggguggucgugcugagcuucgagcuccugcacgcccccgccacggugugcggccccaagaaguccaccaaccuggucaagaacaagugcgugaacuucaacuucaacggccucaccgggaccggcgugcugaccgagagcaacaagaaguuccugccguuccagcaguucgggcgcgacaucgccgacacgaccgacgcgguccgcgacccccagacccuggagauccucgacaucacccccugcagcuucggcgggguguccgugaucacgccgggcaccaacaccagcaaccaggucgccgugcuguaccaggacgugaacugcaccgagguccccguggccauccacgccgaccagcugacgcccaccuggcggguguacuccaccggcagcaacgucuuccagacccgcgccgggugccucaucggcgcggagcacgugaacaacuccuacgagugcgacauccccaucggggccggcaucugcgccagcuaccagacgcagaccaacuccccgcggcgcgcccggagcguggcgucccagagcaucaucgccuacaccaugucccugggcgccgagaacagcgucgccuacuccaacaacagcaucgccauccccaccaacuucacgaucuccgugaccaccgagauccugcccgugagcaugaccaagacgagcgucgacugcaccauguacaucugcggggacuccaccgagugcagcaaccuccugcugcaguacggcuccuucugcacccagcucaaccgcgcgcugacggggaucgccguggagcaggacaagaacacccaggagguguucgcccaggucaagcagaucuacaagacgcccccgaucaaggacuucggcggguucaacuucagccagauccugcccgaccccuccaagcccagcaagcgguccuucaucgaggaccuccuguucaacaaggugacccuggccgacgccggcuucaucaagcaguacggcgacugccucggggacaucgcggcccgcgaccugaucugcgcccagaaguucaacggccugaccgugcucccgccccugcugaccgacgagaugaucgcccaguacaccagcgcccuccuggcggggaccaucacguccggcuggaccuucggggccggcgccgcccugcagauccccuucgcgaugcagauggccuaccgguucaacggcugcggggucacccagaacgugcucuacgagaaccagaagcugaucgccaaccaguucaacagcgccaucggcaagauccaggacucccugagcuccaccgccagcgcgcucgggaagcugcaggacguggucaaccagaacgcccaggcccugaacacgcucgugaagcagcuguccagcaacuucggcgccaucuccagcgugcugaacgacauccucucccgccuggacaaggucgaggccgaggugcagaucgaccggcugaucaccgggcgccuccagagccugcagaccuacgugacccagcagcugauccgggcggccgagauccgcgccagcgccaaccucgccgcgaccaagauguccgagugcguccugggccagagcaagcggguggacuucugcggcaaggggugccaccugauguccuucccccagagcgccccgcacggcguggucuuccuccacgugacguacguccccgcccaggagaagaacuucaccaccgcccccgcgaucugccacgacgggaaggcccacuucccccgcgagggcguguucguguccaacgggacccacugguucgucacgcagcggaacuucuacgagccgcagaucaucaccaccgacaacaccuucgugagcggcaacugcgacguggucaucggcaucgugaacaacacgguguacgacccccugcagcccgagcuggacuccuucaaggaggagcucgacaaguacuucaagaaccacaccagccccgacgucgaccugggggacaucuccggcaucaacgccagcguggugaacauccagaaggagaucgaccgccugaacgaggucgccaagaaccucaacgagucccugaucgaccugcaggagcucgggaaguacgagcaguacaucaagggcgggggcgggagcgacaucgaccccuacaaggaguucggcagcuccuaccagcugcucaacuuccugccccuggacuucuuccccgaccucaacgcccugguggacaccgccaccgcgcuguacgaggaggagcucacggggcgcgagcacugcagcccccaccacaccgccauccggcaggcccuggucugcugggacgagcugaccaagcucaucgccuggauguccagcaacaucaccuccgagcagguccgcacgaucaucgugaaccacgucaacgacaccuggggccugaaggugcggcagagccugugguuccaccucuccugccugaccuucgggcagcacaccgugcaggaguuccuggucagcuucggcguguggauccgcacgcccgccccguaccggccgcccaacgcgccgauccucuccacccugccggagcacaccgugaucugcugaggacuagucccuguucccagagcccacuuuuuuuucuuuuuuugaaauaaaauagccugucuuucagaucucaaaggcucuuuucagagccaccaaaaaaaaaaaaaaaaaaaaaaaaaaaaaaaaaaaaaaaaaaaaaaaaaaaaaaaaaaaaaaaaaaaaaaaaaaaaaaaaaaaaaaaaaaaaaaaaaaaaa

SEQ ID NO: 12408 - RNA, 4370 nt, Artificial Sequence
  SARS-CoV-2/Wuhan/WIV05/2019__EPI_ISL_402128 spike protein mRNA gc (1-1211)(Q965C_S1003C) WhcAg construct
aggagagucccgcagucggcguccagcggcucugcuuguucgugugugugucguugcaggccuuauucaagcuuaccauguucguguuccugguccuccugccccuggugagcucccagugcgugaaccucaccacccgcacgcagcugccgcccgccuacaccaacagcuucacccggggcgucuacuaccccgacaagguguuccgcuccagcgugcugcacuccacccaggaccucuuccugcccuucuucagcaacgucacgugguuccacgccauccacguguccgggaccaacggcaccaagcgguucgacaacccggugcugcccuucaacgacggggucuacuucgcgagcaccgagaaguccaacaucauccgcggcuggaucuucgggacgacccucgacagcaagacccagucccugcugaucgugaacaacgccaccaacguggucaucaaggugugcgaguuccaguucugcaacgaccccuuccucggcguguacuaccacaagaacaacaagagcuggauggaguccgaguuccgggucuacagcuccgccaacaacugcacguucgaguacgugagccagcccuuccugauggaccuggagggcaagcaggggaacuucaagaaccuccgcgaguucguguucaagaacaucgacggcuacuucaagaucuacuccaagcacaccccgaucaaccugguccgggaccugccccagggguucagcgcccucgagccccugguggaccugcccaucggcaucaacaucacccgcuuccagacccuccuggcccugcaccgguccuaccucacgccgggggacagcagcuccggcuggaccgcgggcgccgccgccuacuacgugggguaccugcagccccgcaccuuccugcucaaguacaacgagaacggcaccaucacggacgcggucgacugcgcccuggacccccugagcgagaccaagugcacccucaaguccuucaccguggagaaggggaucuaccagacgagcaacuuccgggugcagcccaccgaguccaucguccgcuucccgaacaucaccaaccugugccccuucggcgagguguucaacgccacccgguucgccagcgucuacgccuggaaccgcaagcggaucuccaacugcguggcggacuacagcgugcuguacaacuccgccagcuucuccacguucaagugcuacggcgucagccccaccaagcucaacgaccugugcuucaccaacguguacgccgacuccuucgugauccgcggggacgagguccggcagaucgcccccggccagaccgggaagaucgccgacuacaacuacaagcugccggacgacuucacgggcugcgugaucgcguggaacagcaacaaccucgacuccaaggucgggggcaacuacaacuaccuguaccgccuguuccgcaagagcaaccucaagcccuucgagcgggacaucuccaccgagaucuaccaggccggcagcacccccugcaacgggguggagggcuucaacugcuacuucccccugcaguccuacggguuccagccgaccaacggcgugggguaccagcccuaccggguggucgugcugagcuucgagcuccugcacgcccccgccacggugugcggccccaagaaguccaccaaccuggucaagaacaagugcgugaacuucaacuucaacggccucaccgggaccggcgugcugaccgagagcaacaagaaguuccugccguuccagcaguucgggcgcgacaucgccgacacgaccgacgcgguccgcgacccccagacccuggagauccucgacaucacccccugcagcuucggcgggguguccgugaucacgccgggcaccaacaccagcaaccaggucgccgugcuguaccaggacgugaacugcaccgagguccccguggccauccacgccgaccagcugacgcccaccuggcggguguacuccaccggcagcaacgucuuccagacccgcgccgggugccucaucggcgcggagcacgugaacaacuccuacgagugcgacauccccaucggggccggcaucugcgccagcuaccagacgcagaccaacuccccgcggcgcgcccggagcguggcgucccagagcaucaucgccuacaccaugucccugggcgccgagaacagcgucgccuacuccaacaacagcaucgccauccccaccaacuucacgaucuccgugaccaccgagauccugcccgugagcaugaccaagacgagcgucgacugcaccauguacaucugcggggacuccaccgagugcagcaaccuccugcugcaguacggcuccuucugcacccagcucaaccgcgcgcugacggggaucgccguggagcaggacaagaacacccaggagguguucgcccaggucaagcagaucuacaagacgcccccgaucaaggacuucggcggguucaacuucagccagauccugcccgaccccuccaagcccagcaagcgguccuucaucgaggaccuccuguucaacaaggugacccuggccgacgccggcuucaucaagcaguacggcgacugccucggggacaucgcggcccgcgaccugaucugcgcccagaaguucaacggccugaccgugcucccgccccugcugaccgacgagaugaucgcccaguacaccagcgcccuccuggcggggaccaucacguccggcuggaccuucggggccggcgccgcccugcagauccccuucgcgaugcagauggccuaccgguucaacggcaucggggucacccagaacgugcucuacgagaaccagaagcugaucgccaaccaguucaacagcgccaucggcaagauccaggacucccugagcuccaccgccagcgcgcucgggaagcugcaggacguggucaaccagaacgcccaggcccugaacacgcucgugaagugccuguccagcaacuucggcgccaucuccagcgugcugaacgacauccucucccgccuggacaaggucgaggccgaggugcagaucgaccggcugaucaccgggcgccuccagugccugcagaccuacgugacccagcagcugauccgggcggccgagauccgcgccagcgccaaccucgccgcgaccaagauguccgagugcguccugggccagagcaagcggguggacuucugcggcaagggguaccaccugauguccuucccccagagcgccccgcacggcguggucuuccuccacgugacguacguccccgcccaggagaagaacuucaccaccgcccccgcgaucugccacgacgggaaggcccacuucccccgcgagggcguguucguguccaacgggacccacugguucgucacgcagcggaacuucuacgagccgcagaucaucaccaccgacaacaccuucgugagcggcaacugcgacguggucaucggcaucgugaacaacacgguguacgacccccugcagcccgagcuggacuccuucaaggaggagcucgacaaguacuucaagaaccacaccagccccgacgucgaccugggggacaucuccggcaucaacgccagcguggugaacauccagaaggagaucgaccgccugaacgaggucgccaagaaccucaacgagucccugaucgaccugcaggagcucgggaaguacgagcaguacaucaagggcgggggcgggagcgacaucgaccccuacaaggaguucggcagcuccuaccagcugcucaacuuccugccccuggacuucuuccccgaccucaacgcccugguggacaccgccaccgcgcuguacgaggaggagcucacggggcgcgagcacugcagcccccaccacaccgccauccggcaggcccuggucugcugggacgagcugaccaagcucaucgccuggauguccagcaacaucaccuccgagcagguccgcacgaucaucgugaaccacgucaacgacaccuggggccugaaggugcggcagagccugugguuccaccucuccugccugaccuucgggcagcacaccgugcaggaguuccuggucagcuucggcguguggauccgcacgcccgccccguaccggccgcccaacgcgccgauccucuccacccugccggagcacaccgugaucugcugaggacuagucccuguucccagagcccacuuuuuuuucuuuuuuugaaauaaaauagccugucuuucagaucucaaaggcucuuuucagagccaccaaaaaaaaaaaaaaaaaaaaaaaaaaaaaaaaaaaaaaaaaaaaaaaaaaaaaaaaaaaaaaaaaaaaaaaaaaaaaaaaaaaaaaaaaaaaaaaaaaaaa

SEQ ID NO: 12409 - RNA, 4370 nt, Artificial Sequence
  SARS-CoV-2/Wuhan/WIV05/2019__EPI_ISL_402128 spike protein mRNA gc (1-1211)(F970C_G999C) WhcAg construct
aggagagucccgcagucggcguccagcggcucugcuuguucgugugugugucguugcaggccuuauucaagcuuaccauguucguguuccugguccuccugccccuggugagcucccagugcgugaaccucaccacccgcacgcagcugccgcccgccuacaccaacagcuucacccggggcgucuacuaccccgacaagguguuccgcuccagcgugcugcacuccacccaggaccucuuccugcccuucuucagcaacgucacgugguuccacgccauccacguguccgggaccaacggcaccaagcgguucgacaacccggugcugcccuucaacgacggggucuacuucgcgagcaccgagaaguccaacaucauccgcggcuggaucuucgggacgacccucgacagcaagacccagucccugcugaucgugaacaacgccaccaacguggucaucaaggugugcgaguuccaguucugcaacgaccccuuccucggcguguacuaccacaagaacaacaagagcuggauggaguccgaguuccgggucuacagcuccgccaacaacugcacguucgaguacgugagccagcccuuccugauggaccuggagggcaagcaggggaacuucaagaaccuccgcgaguucguguucaagaacaucgacggcuacuucaagaucuacuccaagcacaccccgaucaaccugguccgggaccugccccagggguucagcgcccucgagccccugguggaccugcccaucggcaucaacaucacccgcuuccagacccuccuggcccugcaccgguccuaccucacgccgggggacagcagcuccggcuggaccgcgggcgccgccgccuacuacgugggguaccugcagccccgcaccuuccugcucaaguacaacgagaacggcaccaucacggacgcggucgacugcgcccuggacccccugagcgagaccaagugcacccucaaguccuucaccguggagaaggggaucuaccagacgagcaacuuccgggugcagcccaccgaguccaucguccgcuucccgaacaucaccaaccugugccccuucggcgagguguucaacgccacccgguucgccagcgucuacgccuggaaccgcaagcggaucuccaacugcguggcggacuacagcgugcuguacaacuccgccagcuucuccacguucaagugcuacggcgucagccccaccaagcucaacgaccugugcuucaccaacguguacgccgacuccuucgugauccgcggggacgagguccggcagaucgcccccggccagaccgggaagaucgccgacuacaacuacaagcugccggacgacuucacgggcugcgugaucgcguggaacagcaacaaccucgacuccaaggucgggggcaacuacaacuaccuguaccgccuguuccgcaagagcaaccucaagcccuucgagcgggacaucuccaccgagaucuaccaggccggcagcacccccugcaacgggguggagggcuucaacugcuacuucccccugcaguccuacggguuccagccgaccaacggcgugggguaccagcccuaccggguggucgugcugagcuucgagcuccugcacgcccccgccacggugugcggccccaagaaguccaccaaccuggucaagaacaagugcgugaacuucaacuucaacggccucaccgggaccggcgugcugaccgagagcaacaagaaguuccugccguuccagcaguucgggcgcgacaucgccgacacgaccgacgcgguccgcgacccccagacccuggagauccucgacaucacccccugcagcuucggcgggguguccgugaucacgccgggcaccaacaccagcaaccaggucgccgugcuguaccaggacgugaacugcaccgagguccccguggccauccacgccgaccagcugacgcccaccuggcggguguacuccaccggcagcaacgucuuccagacccgcgccgggugccucaucggcgcggagcacgugaacaacuccuacgagugcgacauccccaucggggccggcaucugcgccagcuaccagacgcagaccaacuccccgcggcgcgcccggagcguggcgucccagagcaucaucgccuacaccaugucccugggcgccgagaacagcgucgccuacuccaacaacagcaucgccauccccaccaacuucacgaucuccgugaccaccgagauccugcccgugagcaugaccaagacgagcgucgacugcaccauguacaucugcggggacuccaccgagugcagcaaccuccugcugcaguacggcuccuucugcacccagcucaaccgcgcgcugacggggaucgccguggagcaggacaagaacacccaggagguguucgcccaggucaagcagaucuacaagacgcccccgaucaaggacuucggcggguucaacuucagccagauccugcccgaccccuccaagcccagcaagcgguccuucaucgaggaccuccuguucaacaaggugacccuggccgacgccggcuucaucaagcaguacggcgacugccucggggacaucgcggcccgcgaccugaucugcgcccagaaguucaacggccugaccgugcucccgccccugcugaccgacgagaugaucgcccaguacaccagcgcccuccuggcggggaccaucacguccggcuggaccuucggggccggcgccgcccugcagauccccuucgcgaugcagauggccuaccgguucaacggcaucggggucacccagaacgugcucuacgagaaccagaagcugaucgccaaccaguucaacagcgccaucggcaagauccaggacucccugagcuccaccgccagcgcgcucgggaagcugcaggacguggucaaccagaacgcccaggcccugaacacgcucgugaagcagcuguccagcaacugcggcgccaucuccagcgugcugaacgacauccucucccgccuggacaaggucgaggccgaggugcagaucgaccggcugaucaccugucgccuccagagccugcagaccuacgugacccagcagcugauccgggcggccgagauccgcgccagcgccaaccucgccgcgaccaagauguccgagugcguccugggccagagcaagcggguggacuucugcggcaagggguaccaccugauguccuucccccagagcgccccgcacggcguggucuuccuccacgugacguacguccccgcccaggagaagaacuucaccaccgcccccgcgaucugccacgacgggaaggcccacuucccccgcgagggcguguucguguccaacgggacccacugguucgucacgcagcggaacuucuacgagccgcagaucaucaccaccgacaacaccuucgugagcggcaacugcgacguggucaucggcaucgugaacaacacgguguacgacccccugcagcccgagcuggacuccuucaaggaggagcucgacaaguacuucaagaaccacaccagccccgacgucgaccugggggacaucuccggcaucaacgccagcguggugaacauccagaaggagaucgaccgccugaacgaggucgccaagaaccucaacgagucccugaucgaccugcaggagcucgggaaguacgagcaguacaucaagggcgggggcgggagcgacaucgaccccuacaaggaguucggcagcuccuaccagcugcucaacuuccugccccuggacuucuuccccgaccucaacgcccugguggacaccgccaccgcgcuguacgaggaggagcucacggggcgcgagcacugcagcccccaccacaccgccauccggcaggcccuggucugcugggacgagcugaccaagcucaucgccuggauguccagcaacaucaccuccgagcagguccgcacgaucaucgugaaccacgucaacgacaccuggggccugaaggugcggcagagccugugguuccaccucuccugccugaccuucgggcagcacaccgugcaggaguuccuggucagcuucggcguguggauccgcacgcccgccccguaccggccgcccaacgcgccgauccucuccacccugccggagcacaccgugaucugcugaggacuagucccuguucccagagcccacuuuuuuuucuuuuuuugaaauaaaauagccugucuuucagaucucaaaggcucuuuucagagccaccaaaaaaaaaaaaaaaaaaaaaaaaaaaaaaaaaaaaaaaaaaaaaaaaaaaaaaaaaaaaaaaaaaaaaaaaaaaaaaaaaaaaaaaaaaaaaaaaaaaaa

SEQ ID NO: 12410 - RNA, 4370 nt, Artificial Sequence
  SARS-CoV-2/Wuhan/WIV05/2019__EPI_ISL_402128 spike protein mRNA gc (1-1211)(A972C_R995C) WhcAg construct
aggagagucccgcagucggcguccagcggcucugcuuguucgugugugugucguugcaggccuuauucaagcuuaccauguucguguuccugguccuccugccccuggugagcucccagugcgugaaccucaccacccgcacgcagcugccgcccgccuacaccaacagcuucacccggggcgucuacuaccccgacaagguguuccgcuccagcgugcugcacuccacccaggaccucuuccugcccuucuucagcaacgucacgugguuccacgccauccacguguccgggaccaacggcaccaagcgguucgacaacccggugcugcccuucaacgacggggucuacuucgcgagcaccgagaaguccaacaucauccgcggcuggaucuucgggacgacccucgacagcaagacccagucccugcugaucgugaacaacgccaccaacguggucaucaaggugugcgaguuccaguucugcaacgaccccuuccucggcguguacuaccacaagaacaacaagagcuggauggaguccgaguuccgggucuacagcuccgccaacaacugcacguucgaguacgugagccagcccuuccugauggaccuggagggcaagcaggggaacuucaagaaccuccgcgaguucguguucaagaacaucgacggcuacuucaagaucuacuccaagcacaccccgaucaaccugguccgggaccugccccagggguucagcgcccucgagccccugguggaccugcccaucggcaucaacaucacccgcuuccagacccuccuggcccugcaccgguccuaccucacgccgggggacagcagcuccggcuggaccgcgggcgccgccgccuacuacgugggguaccugcagccccgcaccuuccugcucaaguacaacgagaacggcaccaucacggacgcggucgacugcgcccuggacccccugagcgagaccaagugcacccucaaguccuucaccguggagaaggggaucuaccagacgagcaacuuccgggugcagcccaccgaguccaucguccgcuucccgaacaucaccaaccugugccccuucggcgagguguucaacgccacccgguucgccagcgucuacgccuggaaccgcaagcggaucuccaacugcguggcggacuacagcgugcuguacaacuccgccagcuucuccacguucaagugcuacggcgucagccccaccaagcucaacgaccugugcuucaccaacguguacgccgacuccuucgugauccgcggggacgagguccggcagaucgcccccggccagaccgggaagaucgccgacuacaacuacaagcugccggacgacuucacgggcugcgugaucgcguggaacagcaacaaccucgacuccaaggucgggggcaacuacaacuaccuguaccgccuguuccgcaagagcaaccucaagcccuucgagcgggacaucuccaccgagaucuaccaggccggcagcacccccugcaacgggguggagggcuucaacugcuacuucccccugcaguccuacggguuccagccgaccaacggcgugggguaccagcccuaccggguggucgugcugagcuucgagcuccugcacgcccccgccacggugugcggccccaagaaguccaccaaccuggucaagaacaagugcgugaacuucaacuucaacggccucaccgggaccggcgugcugaccgagagcaacaagaaguuccugccguuccagcaguucgggcgcgacaucgccgacacgaccgacgcgguccgcgacccccagacccuggagauccucgacaucacccccugcagcuucggcgggguguccgugaucacgccgggcaccaacaccagcaaccaggucgccgugcuguaccaggacgugaacugcaccgagguccccguggccauccacgccgaccagcugacgcccaccuggcggguguacuccaccggcagcaacgucuuccagacccgcgccgggugccucaucggcgcggagcacgugaacaacuccuacgagugcgacauccccaucggggccggcaucugcgccagcuaccagacgcagaccaacuccccgcggcgcgcccggagcguggcgucccagagcaucaucgccuacaccaugucccugggcgccgagaacagcgucgccuacuccaacaacagcaucgccauccccaccaacuucacgaucuccgugaccaccgagauccugcccgugagcaugaccaagacgagcgucgacugcaccauguacaucugcggggacuccaccgagugcagcaaccuccugcugcaguacggcuccuucugcacccagcucaaccgcgcgcugacggggaucgccguggagcaggacaagaacacccaggagguguucgcccaggucaagcagaucuacaagacgcccccgaucaaggacuucggcggguucaacuucagccagauccugcccgaccccuccaagcccagcaagcgguccuucaucgaggaccuccuguucaacaaggugacccuggccgacgccggcuucaucaagcaguacggcgacugccucggggacaucgcggcccgcgaccugaucugcgcccagaaguucaacggccugaccgugcucccgccccugcugaccgacgagaugaucgcccaguacaccagcgcccuccuggcggggaccaucacguccggcuggaccuucggggccggcgccgcccugcagauccccuucgcgaugcagauggccuaccgguucaacggcaucggggucacccagaacgugcucuacgagaaccagaagcugaucgccaaccaguucaacagcgccaucggcaagauccaggacucccugagcuccaccgccagcgcgcucgggaagcugcaggacguggucaaccagaacgcccaggcccugaacacgcucgugaagcagcuguccagcaacuucggcugcaucuccagcgugcugaacgacauccucucccgccuggacaaggucgaggccgaggugcagaucgacugccugaucaccgggcgccuccagagccugcagaccuacgugacccagcagcugauccgggcggccgagauccgcgccagcgccaaccucgccgcgaccaagauguccgagugcguccugggccagagcaagcggguggacuucugcggcaagggguaccaccugauguccuucccccagagcgccccgcacggcguggucuuccuccacgugacguacguccccgcccaggagaagaacuucaccaccgcccccgcgaucugccacgacgggaaggcccacuucccccgcgagggcguguucguguccaacgggacccacugguucgucacgcagcggaacuucuacgagccgcagaucaucaccaccgacaacaccuucgugagcggcaacugcgacguggucaucggcaucgugaacaacacgguguacgacccccugcagcccgagcuggacuccuucaaggaggagcucgacaaguacuucaagaaccacaccagccccgacgucgaccugggggacaucuccggcaucaacgccagcguggugaacauccagaaggagaucgaccgccugaacgaggucgccaagaaccucaacgagucccugaucgaccugcaggagcucgggaaguacgagcaguacaucaagggcgggggcgggagcgacaucgaccccuacaaggaguucggcagcuccuaccagcugcucaacuuccugccccuggacuucuuccccgaccucaacgcccugguggacaccgccaccgcgcuguacgaggaggagcucacggggcgcgagcacugcagcccccaccacaccgccauccggcaggcccuggucugcugggacgagcugaccaagcucaucgccuggauguccagcaacaucaccuccgagcagguccgcacgaucaucgugaaccacgucaacgacaccuggggccugaaggugcggcagagccugugguuccaccucuccugccugaccuucgggcagcacaccgugcaggaguuccuggucagcuucggcguguggauccgcacgcccgccccguaccggccgcccaacgcgccgauccucuccacccugccggagcacaccgugaucugcugaggacuagucccuguucccagagcccacuuuuuuuucuuuuuuugaaauaaaauagccugucuuucagaucucaaaggcucuuuucagagccaccaaaaaaaaaaaaaaaaaaaaaaaaaaaaaaaaaaaaaaaaaaaaaaaaaaaaaaaaaaaaaaaaaaaaaaaaaaaaaaaaaaaaaaaaaaaaaaaaaaaaa

SEQ ID NO: 12411 - RNA, 4370 nt, Artificial Sequence
  SARS-CoV-2/Wuhan/WIV05/2019__EPI_ISL_402128 spike protein mRNA gc (1-1211)(A890C_V1040C) WhcAg construct
aggagagucccgcagucggcguccagcggcucugcuuguucgugugugugucguugcaggccuuauucaagcuuaccauguucguguuccugguccuccugccccuggugagcucccagugcgugaaccucaccacccgcacgcagcugccgcccgccuacaccaacagcuucacccggggcgucuacuaccccgacaagguguuccgcuccagcgugcugcacuccacccaggaccucuuccugcccuucuucagcaacgucacgugguuccacgccauccacguguccgggaccaacggcaccaagcgguucgacaacccggugcugcccuucaacgacggggucuacuucgcgagcaccgagaaguccaacaucauccgcggcuggaucuucgggacgacccucgacagcaagacccagucccugcugaucgugaacaacgccaccaacguggucaucaaggugugcgaguuccaguucugcaacgaccccuuccucggcguguacuaccacaagaacaacaagagcuggauggaguccgaguuccgggucuacagcuccgccaacaacugcacguucgaguacgugagccagcccuuccugauggaccuggagggcaagcaggggaacuucaagaaccuccgcgaguucguguucaagaacaucgacggcuacuucaagaucuacuccaagcacaccccgaucaaccugguccgggaccugccccagggguucagcgcccucgagccccugguggaccugcccaucggcaucaacaucacccgcuuccagacccuccuggcccugcaccgguccuaccucacgccgggggacagcagcuccggcuggaccgcgggcgccgccgccuacuacgugggguaccugcagccccgcaccuuccugcucaaguacaacgagaacggcaccaucacggacgcggucgacugcgcccuggacccccugagcgagaccaagugcacccucaaguccuucaccguggagaaggggaucuaccagacgagcaacuuccgggugcagcccaccgaguccaucguccgcuucccgaacaucaccaaccugugccccuucggcgagguguucaacgccacccgguucgccagcgucuacgccuggaaccgcaagcggaucuccaacugcguggcggacuacagcgugcuguacaacuccgccagcuucuccacguucaagugcuacggcgucagccccaccaagcucaacgaccugugcuucaccaacguguacgccgacuccuucgugauccgcggggacgagguccggcagaucgcccccggccagaccgggaagaucgccgacuacaacuacaagcugccggacgacuucacgggcugcgugaucgcguggaacagcaacaaccucgacuccaaggucgggggcaacuacaacuaccuguaccgccuguuccgcaagagcaaccucaagcccuucgagcgggacaucuccaccgagaucuaccaggccggcagcacccccugcaacgggguggagggcuucaacugcuacuucccccugcaguccuacggguuccagccgaccaacggcgugggguaccagcccuaccggguggucgugcugagcuucgagcuccugcacgcccccgccacggugugcggccccaagaaguccaccaaccuggucaagaacaagugcgugaacuucaacuucaacggccucaccgggaccggcgugcugaccgagagcaacaagaaguuccugccguuccagcaguucgggcgcgacaucgccgacacgaccgacgcgguccgcgacccccagacccuggagauccucgacaucacccccugcagcuucggcgggguguccgugaucacgccgggcaccaacaccagcaaccaggucgccgugcuguaccaggacgugaacugcaccgagguccccguggccauccacgccgaccagcugacgcccaccuggcggguguacuccaccggcagcaacgucuuccagacccgcgccgggugccucaucggcgcggagcacgugaacaacuccuacgagugcgacauccccaucggggccggcaucugcgccagcuaccagacgcagaccaacuccccgcggcgcgcccggagcguggcgucccagagcaucaucgccuacaccaugucccugggcgccgagaacagcgucgccuacuccaacaacagcaucgccauccccaccaacuucacgaucuccgugaccaccgagauccugcccgugagcaugaccaagacgagcgucgacugcaccauguacaucugcggggacuccaccgagugcagcaaccuccugcugcaguacggcuccuucugcacccagcucaaccgcgcgcugacggggaucgccguggagcaggacaagaacacccaggagguguucgcccaggucaagcagaucuacaagacgcccccgaucaaggacuucggcggguucaacuucagccagauccugcccgaccccuccaagcccagcaagcgguccuucaucgaggaccuccuguucaacaaggugacccuggccgacgccggcuucaucaagcaguacggcgacugccucggggacaucgcggcccgcgaccugaucugcgcccagaaguucaacggccugaccgugcucccgccccugcugaccgacgagaugaucgcccaguacaccagcgcccuccuggcggggaccaucacguccggcuggaccuucgggugcggcgccgcccugcagauccccuucgcgaugcagauggccuaccgguucaacggcaucggggucacccagaacgugcucuacgagaaccagaagcugaucgccaaccaguucaacagcgccaucggcaagauccaggacucccugagcuccaccgccagcgcgcucgggaagcugcaggacguggucaaccagaacgcccaggcccugaacacgcucgugaagcagcuguccagcaacuucggcgccaucuccagcgugcugaacgacauccucucccgccuggacaaggucgaggccgaggugcagaucgaccggcugaucaccgggcgccuccagagccugcagaccuacgugacccagcagcugauccgggcggccgagauccgcgccagcgccaaccucgccgcgaccaagauguccgagugcguccugggccagagcaagcggugcgacuucugcggcaagggguaccaccugauguccuucccccagagcgccccgcacggcguggucuuccuccacgugacguacguccccgcccaggagaagaacuucaccaccgcccccgcgaucugccacgacgggaaggcccacuucccccgcgagggcguguucguguccaacgggacccacugguucgucacgcagcggaacuucuacgagccgcagaucaucaccaccgacaacaccuucgugagcggcaacugcgacguggucaucggcaucgugaacaacacgguguacgacccccugcagcccgagcuggacuccuucaaggaggagcucgacaaguacuucaagaaccacaccagccccgacgucgaccugggggacaucuccggcaucaacgccagcguggugaacauccagaaggagaucgaccgccugaacgaggucgccaagaaccucaacgagucccugaucgaccugcaggagcucgggaaguacgagcaguacaucaagggcgggggcgggagcgacaucgaccccuacaaggaguucggcagcuccuaccagcugcucaacuuccugccccuggacuucuuccccgaccucaacgcccugguggacaccgccaccgcgcuguacgaggaggagcucacggggcgcgagcacugcagcccccaccacaccgccauccggcaggcccuggucugcugggacgagcugaccaagcucaucgccuggauguccagcaacaucaccuccgagcagguccgcacgaucaucgugaaccacgucaacgacaccuggggccugaaggugcggcagagccugugguuccaccucuccugccugaccuucgggcagcacaccgugcaggaguuccuggucagcuucggcguguggauccgcacgcccgccccguaccggccgcccaacgcgccgauccucuccacccugccggagcacaccgugaucugcugaggacuagucccuguucccagagcccacuuuuuuuucuuuuuuugaaauaaaauagccugucuuucagaucucaaaggcucuuuucagagccaccaaaaaaaaaaaaaaaaaaaaaaaaaaaaaaaaaaaaaaaaaaaaaaaaaaaaaaaaaaaaaaaaaaaaaaaaaaaaaaaaaaaaaaaaaaaaaaaaaaaaa

SEQ ID NO: 12412 - RNA, 4370 nt, Artificial Sequence
  SARS-CoV-2/Wuhan/WIV05/2019__EPI_ISL_402128 spike protein mRNA gc (1-1211)(T874C_S1055C) WhcAg construct
aggagagucccgcagucggcguccagcggcucugcuuguucgugugugugucguugcaggccuuauucaagcuuaccauguucguguuccugguccuccugccccuggugagcucccagugcgugaaccucaccacccgcacgcagcugccgcccgccuacaccaacagcuucacccggggcgucuacuaccccgacaagguguuccgcuccagcgugcugcacuccacccaggaccucuuccugcccuucuucagcaacgucacgugguuccacgccauccacguguccgggaccaacggcaccaagcgguucgacaacccggugcugcccuucaacgacggggucuacuucgcgagcaccgagaaguccaacaucauccgcggcuggaucuucgggacgacccucgacagcaagacccagucccugcugaucgugaacaacgccaccaacguggucaucaaggugugcgaguuccaguucugcaacgaccccuuccucggcguguacuaccacaagaacaacaagagcuggauggaguccgaguuccgggucuacagcuccgccaacaacugcacguucgaguacgugagccagcccuuccugauggaccuggagggcaagcaggggaacuucaagaaccuccgcgaguucguguucaagaacaucgacggcuacuucaagaucuacuccaagcacaccccgaucaaccugguccgggaccugccccagggguucagcgcccucgagccccugguggaccugcccaucggcaucaacaucacccgcuuccagacccuccuggcccugcaccgguccuaccucacgccgggggacagcagcuccggcuggaccgcgggcgccgccgccuacuacgugggguaccugcagccccgcaccuuccugcucaaguacaacgagaacggcaccaucacggacgcggucgacugcgcccuggacccccugagcgagaccaagugcacccucaaguccuucaccguggagaaggggaucuaccagacgagcaacuuccgggugcagcccaccgaguccaucguccgcuucccgaacaucaccaaccugugccccuucggcgagguguucaacgccacccgguucgccagcgucuacgccuggaaccgcaagcggaucuccaacugcguggcggacuacagcgugcuguacaacuccgccagcuucuccacguucaagugcuacggcgucagccccaccaagcucaacgaccugugcuucaccaacguguacgccgacuccuucgugauccgcggggacgagguccggcagaucgcccccggccagaccgggaagaucgccgacuacaacuacaagcugccggacgacuucacgggcugcgugaucgcguggaacagcaacaaccucgacuccaaggucgggggcaacuacaacuaccuguaccgccuguuccgcaagagcaaccucaagcccuucgagcgggacaucuccaccgagaucuaccaggccggcagcacccccugcaacgggguggagggcuucaacugcuacuucccccugcaguccuacggguuccagccgaccaacggcgugggguaccagcccuaccggguggucgugcugagcuucgagcuccugcacgcccccgccacggugugcggccccaagaaguccaccaaccuggucaagaacaagugcgugaacuucaacuucaacggccucaccgggaccggcgugcugaccgagagcaacaagaaguuccugccguuccagcaguucgggcgcgacaucgccgacacgaccgacgcgguccgcgacccccagacccuggagauccucgacaucacccccugcagcuucggcgggguguccgugaucacgccgggcaccaacaccagcaaccaggucgccgugcuguaccaggacgugaacugcaccgagguccccguggccauccacgccgaccagcugacgcccaccuggcggguguacuccaccggcagcaacgucuuccagacccgcgccgggugccucaucggcgcggagcacgugaacaacuccuacgagugcgacauccccaucggggccggcaucugcgccagcuaccagacgcagaccaacuccccgcggcgcgcccggagcguggcgucccagagcaucaucgccuacaccaugucccugggcgccgagaacagcgucgccuacuccaacaacagcaucgccauccccaccaacuucacgaucuccgugaccaccgagauccugcccgugagcaugaccaagacgagcgucgacugcaccauguacaucugcggggacuccaccgagugcagcaaccuccugcugcaguacggcuccuucugcacccagcucaaccgcgcgcugacggggaucgccguggagcaggacaagaacacccaggagguguucgcccaggucaagcagaucuacaagacgcccccgaucaaggacuucggcggguucaacuucagccagauccugcccgaccccuccaagcccagcaagcgguccuucaucgaggaccuccuguucaacaaggugacccuggccgacgccggcuucaucaagcaguacggcgacugccucggggacaucgcggcccgcgaccugaucugcgcccagaaguucaacggccugaccgugcucccgccccugcugaccgacgagaugaucgcccaguacugcagcgcccuccuggcggggaccaucacguccggcuggaccuucggggccggcgccgcccugcagauccccuucgcgaugcagauggccuaccgguucaacggcaucggggucacccagaacgugcucuacgagaaccagaagcugaucgccaaccaguucaacagcgccaucggcaagauccaggacucccugagcuccaccgccagcgcgcucgggaagcugcaggacguggucaaccagaacgcccaggcccugaacacgcucgugaagcagcuguccagcaacuucggcgccaucuccagcgugcugaacgacauccucucccgccuggacaaggucgaggccgaggugcagaucgaccggcugaucaccgggcgccuccagagccugcagaccuacgugacccagcagcugauccgggcggccgagauccgcgccagcgccaaccucgccgcgaccaagauguccgagugcguccugggccagagcaagcggguggacuucugcggcaagggguaccaccugauguccuucccccagugcgccccgcacggcguggucuuccuccacgugacguacguccccgcccaggagaagaacuucaccaccgcccccgcgaucugccacgacgggaaggcccacuucccccgcgagggcguguucguguccaacgggacccacugguucgucacgcagcggaacuucuacgagccgcagaucaucaccaccgacaacaccuucgugagcggcaacugcgacguggucaucggcaucgugaacaacacgguguacgacccccugcagcccgagcuggacuccuucaaggaggagcucgacaaguacuucaagaaccacaccagccccgacgucgaccugggggacaucuccggcaucaacgccagcguggugaacauccagaaggagaucgaccgccugaacgaggucgccaagaaccucaacgagucccugaucgaccugcaggagcucgggaaguacgagcaguacaucaagggcgggggcgggagcgacaucgaccccuacaaggaguucggcagcuccuaccagcugcucaacuuccugccccuggacuucuuccccgaccucaacgcccugguggacaccgccaccgcgcuguacgaggaggagcucacggggcgcgagcacugcagcccccaccacaccgccauccggcaggcccuggucugcugggacgagcugaccaagcucaucgccuggauguccagcaacaucaccuccgagcagguccgcacgaucaucgugaaccacgucaacgacaccuggggccugaaggugcggcagagccugugguuccaccucuccugccugaccuucgggcagcacaccgugcaggaguuccuggucagcuucggcguguggauccgcacgcccgccccguaccggccgcccaacgcgccgauccucuccacccugccggagcacaccgugaucugcugaggacuagucccuguucccagagcccacuuuuuuuucuuuuuuugaaauaaaauagccugucuuucagaucucaaaggcucuuuucagagccaccaaaaaaaaaaaaaaaaaaaaaaaaaaaaaaaaaaaaaaaaaaaaaaaaaaaaaaaaaaaaaaaaaaaaaaaaaaaaaaaaaaaaaaaaaaaaaaaaaaaaa

SEQ ID NO: 12413 - RNA, 4196 nt, Artificial Sequence
  SARS-CoV-2/Wuhan/WIV05/2019__EPI_ISL_402128 spike protein mRNA gc (1-1147) LumSynth construct
aggagagucccgcagucggcguccagcggcucugcuuguucgugugugugucguugcaggccuuauucaagcuuaccauguucguguuccugguccuccugccccuggugagcucccagugcgugaaccucaccacccgcacgcagcugccgcccgccuacaccaacagcuucacccggggcgucuacuaccccgacaagguguuccgcuccagcgugcugcacuccacccaggaccucuuccugcccuucuucagcaacgucacgugguuccacgccauccacguguccgggaccaacggcaccaagcgguucgacaacccggugcugcccuucaacgacggggucuacuucgcgagcaccgagaaguccaacaucauccgcggcuggaucuucgggacgacccucgacagcaagacccagucccugcugaucgugaacaacgccaccaacguggucaucaaggugugcgaguuccaguucugcaacgaccccuuccucggcguguacuaccacaagaacaacaagagcuggauggaguccgaguuccgggucuacagcuccgccaacaacugcacguucgaguacgugagccagcccuuccugauggaccuggagggcaagcaggggaacuucaagaaccuccgcgaguucguguucaagaacaucgacggcuacuucaagaucuacuccaagcacaccccgaucaaccugguccgggaccugccccagggguucagcgcccucgagccccugguggaccugcccaucggcaucaacaucacccgcuuccagacccuccuggcccugcaccgguccuaccucacgccgggggacagcagcuccggcuggaccgcgggcgccgccgccuacuacgugggguaccugcagccccgcaccuuccugcucaaguacaacgagaacggcaccaucacggacgcggucgacugcgcccuggacccccugagcgagaccaagugcacccucaaguccuucaccguggagaaggggaucuaccagacgagcaacuuccgggugcagcccaccgaguccaucguccgcuucccgaacaucaccaaccugugccccuucggcgagguguucaacgccacccgguucgccagcgucuacgccuggaaccgcaagcggaucuccaacugcguggcggacuacagcgugcuguacaacuccgccagcuucuccacguucaagugcuacggcgucagccccaccaagcucaacgaccugugcuucaccaacguguacgccgacuccuucgugauccgcggggacgagguccggcagaucgcccccggccagaccgggaagaucgccgacuacaacuacaagcugccggacgacuucacgggcugcgugaucgcguggaacagcaacaaccucgacuccaaggucgggggcaacuacaacuaccuguaccgccuguuccgcaagagcaaccucaagcccuucgagcgggacaucuccaccgagaucuaccaggccggcagcacccccugcaacgggguggagggcuucaacugcuacuucccccugcaguccuacggguuccagccgaccaacggcgugggguaccagcccuaccggguggucgugcugagcuucgagcuccugcacgcccccgccacggugugcggccccaagaaguccaccaaccuggucaagaacaagugcgugaacuucaacuucaacggccucaccgggaccggcgugcugaccgagagcaacaagaaguuccugccguuccagcaguucgggcgcgacaucgccgacacgaccgacgcgguccgcgacccccagacccuggagauccucgacaucacccccugcagcuucggcgggguguccgugaucacgccgggcaccaacaccagcaaccaggucgccgugcuguaccaggacgugaacugcaccgagguccccguggccauccacgccgaccagcugacgcccaccuggcggguguacuccaccggcagcaacgucuuccagacccgcgccgggugccucaucggcgcggagcacgugaacaacuccuacgagugcgacauccccaucggggccggcaucugcgccagcuaccagacgcagaccaacuccccgcggcgcgcccggagcguggcgucccagagcaucaucgccuacaccaugucccugggcgccgagaacagcgucgccuacuccaacaacagcaucgccauccccaccaacuucacgaucuccgugaccaccgagauccugcccgugagcaugaccaagacgagcgucgacugcaccauguacaucugcggggacuccaccgagugcagcaaccuccugcugcaguacggcuccuucugcacccagcucaaccgcgcgcugacggggaucgccguggagcaggacaagaacacccaggagguguucgcccaggucaagcagaucuacaagacgcccccgaucaaggacuucggcggguucaacuucagccagauccugcccgaccccuccaagcccagcaagcgguccuucaucgaggaccuccuguucaacaaggugacccuggccgacgccggcuucaucaagcaguacggcgacugccucggggacaucgcggcccgcgaccugaucugcgcccagaaguucaacggccugaccgugcucccgccccugcugaccgacgagaugaucgcccaguacaccagcgcccuccuggcggggaccaucacguccggcuggaccuucggggccggcgccgcccugcagauccccuucgcgaugcagauggccuaccgguucaacggcaucggggucacccagaacgugcucuacgagaaccagaagcugaucgccaaccaguucaacagcgccaucggcaagauccaggacucccugagcuccaccgccagcgcgcucgggaagcugcaggacguggucaaccagaacgcccaggcccugaacacgcucgugaagcagcuguccagcaacuucggcgccaucuccagcgugcugaacgacauccucucccgccuggacaaggucgaggccgaggugcagaucgaccggcugaucaccgggcgccuccagagccugcagaccuacgugacccagcagcugauccgggcggccgagauccgcgccagcgccaaccucgccgcgaccaagauguccgagugcguccugggccagagcaagcggguggacuucugcggcaagggguaccaccugauguccuucccccagagcgccccgcacggcguggucuuccuccacgugacguacguccccgcccaggagaagaacuucaccaccgcccccgcgaucugccacgacgggaaggcccacuucccccgcgagggcguguucguguccaacgggacccacugguucgucacgcagcggaacuucuacgagccgcagaucaucaccaccgacaacaccuucgugagcggcaacugcgacguggucaucggcaucgugaacaacacgguguacgacccccugcagcccgagcuggacuccggcggcgggagcgggggcgggcagaucuacgagggcaagcugaccgccgaggggcuccgcuucggcaucguggccagccgguucaaccacgcgcuggucgaccgccugguggagggggccaucgacgccaucgugcggcacggcgggcgcgaggaggacaucacccucguccgggugcccggcuccugggagaucccgguggccgccggcgagcuggcccgcaaggaggacaucgacgcggucaucgccaucggggugcugauccggggcgccacgccccacuucgacuacaucgccagcgagguguccaaggggcucgcggaccugagccuggagcuccgcaagcccaucaccuucggcgucaucaccgccgacacccuggagcaggccaucgagcgggccgggacgaagcacggcaacaagggcugggaggccgcgcuguccgccaucgagauggccaaccucuucaagagccugcgcugaggacuagucccuguucccagagcccacuuuuuuuucuuuuuuugaaauaaaauagccugucuuucagaucucaaaggcucuuuucagagccaccaaaaaaaaaaaaaaaaaaaaaaaaaaaaaaaaaaaaaaaaaaaaaaaaaaaaaaaaaaaaaaaaaaaaaaaaaaaaaaaaaaaaaaaaaaaaaaaaaaaaa

SEQ ID NO: 12414 - RNA, 4196 nt, Artificial Sequence
  SARS-CoV-2/Wuhan/WIV05/2019__EPI_ISL_402128 spike protein mRNA gc (1-1147)(K986P_V987P) LumSynth construct
aggagagucccgcagucggcguccagcggcucugcuuguucgugugugugucguugcaggccuuauucaagcuuaccauguucguguuccugguccuccugccccuggugagcucccagugcgugaaccucaccacccgcacgcagcugccgcccgccuacaccaacagcuucacccggggcgucuacuaccccgacaagguguuccgcuccagcgugcugcacuccacccaggaccucuuccugcccuucuucagcaacgucacgugguuccacgccauccacguguccgggaccaacggcaccaagcgguucgacaacccggugcugcccuucaacgacggggucuacuucgcgagcaccgagaaguccaacaucauccgcggcuggaucuucgggacgacccucgacagcaagacccagucccugcugaucgugaacaacgccaccaacguggucaucaaggugugcgaguuccaguucugcaacgaccccuuccucggcguguacuaccacaagaacaacaagagcuggauggaguccgaguuccgggucuacagcuccgccaacaacugcacguucgaguacgugagccagcccuuccugauggaccuggagggcaagcaggggaacuucaagaaccuccgcgaguucguguucaagaacaucgacggcuacuucaagaucuacuccaagcacaccccgaucaaccugguccgggaccugccccagggguucagcgcccucgagccccugguggaccugcccaucggcaucaacaucacccgcuuccagacccuccuggcccugcaccgguccuaccucacgccgggggacagcagcuccggcuggaccgcgggcgccgccgccuacuacgugggguaccugcagccccgcaccuuccugcucaaguacaacgagaacggcaccaucacggacgcggucgacugcgcccuggacccccugagcgagaccaagugcacccucaaguccuucaccguggagaaggggaucuaccagacgagcaacuuccgggugcagcccaccgaguccaucguccgcuucccgaacaucaccaaccugugccccuucggcgagguguucaacgccacccgguucgccagcgucuacgccuggaaccgcaagcggaucuccaacugcguggcggacuacagcgugcuguacaacuccgccagcuucuccacguucaagugcuacggcgucagccccaccaagcucaacgaccugugcuucaccaacguguacgccgacuccuucgugauccgcggggacgagguccggcagaucgcccccggccagaccgggaagaucgccgacuacaacuacaagcugccggacgacuucacgggcugcgugaucgcguggaacagcaacaaccucgacuccaaggucgggggcaacuacaacuaccuguaccgccuguuccgcaagagcaaccucaagcccuucgagcgggacaucuccaccgagaucuaccaggccggcagcacccccugcaacgggguggagggcuucaacugcuacuucccccugcaguccuacggguuccagccgaccaacggcgugggguaccagcccuaccggguggucgugcugagcuucgagcuccugcacgcccccgccacggugugcggccccaagaaguccaccaaccuggucaagaacaagugcgugaacuucaacuucaacggccucaccgggaccggcgugcugaccgagagcaacaagaaguuccugccguuccagcaguucgggcgcgacaucgccgacacgaccgacgcgguccgcgacccccagacccuggagauccucgacaucacccccugcagcuucggcgggguguccgugaucacgccgggcaccaacaccagcaaccaggucgccgugcuguaccaggacgugaacugcaccgagguccccguggccauccacgccgaccagcugacgcccaccuggcggguguacuccaccggcagcaacgucuuccagacccgcgccgggugccucaucggcgcggagcacgugaacaacuccuacgagugcgacauccccaucggggccggcaucugcgccagcuaccagacgcagaccaacuccccgcggcgcgcccggagcguggcgucccagagcaucaucgccuacaccaugucccugggcgccgagaacagcgucgccuacuccaacaacagcaucgccauccccaccaacuucacgaucuccgugaccaccgagauccugcccgugagcaugaccaagacgagcgucgacugcaccauguacaucugcggggacuccaccgagugcagcaaccuccugcugcaguacggcuccuucugcacccagcucaaccgcgcgcugacggggaucgccguggagcaggacaagaacacccaggagguguucgcccaggucaagcagaucuacaagacgcccccgaucaaggacuucggcggguucaacuucagccagauccugcccgaccccuccaagcccagcaagcgguccuucaucgaggaccuccuguucaacaaggugacccuggccgacgccggcuucaucaagcaguacggcgacugccucggggacaucgcggcccgcgaccugaucugcgcccagaaguucaacggccugaccgugcucccgccccugcugaccgacgagaugaucgcccaguacaccagcgcccuccuggcggggaccaucacguccggcuggaccuucggggccggcgccgcccugcagauccccuucgcgaugcagauggccuaccgguucaacggcaucggggucacccagaacgugcucuacgagaaccagaagcugaucgccaaccaguucaacagcgccaucggcaagauccaggacucccugagcuccaccgccagcgcgcucgggaagcugcaggacguggucaaccagaacgcccaggcccugaacacgcucgugaagcagcuguccagcaacuucggcgccaucuccagcgugcugaacgacauccucucccgccuggacccgcccgaggccgaggugcagaucgaccggcugaucaccgggcgccuccagagccugcagaccuacgugacccagcagcugauccgggcggccgagauccgcgccagcgccaaccucgccgcgaccaagauguccgagugcguccugggccagagcaagcggguggacuucugcggcaagggguaccaccugauguccuucccccagagcgccccgcacggcguggucuuccuccacgugacguacguccccgcccaggagaagaacuucaccaccgcccccgcgaucugccacgacgggaaggcccacuucccccgcgagggcguguucguguccaacgggacccacugguucgucacgcagcggaacuucuacgagccgcagaucaucaccaccgacaacaccuucgugagcggcaacugcgacguggucaucggcaucgugaacaacacgguguacgacccccugcagcccgagcuggacuccggcggcgggagcgggggcgggcagaucuacgagggcaagcugaccgccgaggggcuccgcuucggcaucguggccagccgguucaaccacgcgcuggucgaccgccugguggagggggccaucgacgccaucgugcggcacggcgggcgcgaggaggacaucacccucguccgggugcccggcuccugggagaucccgguggccgccggcgagcuggcccgcaaggaggacaucgacgcggucaucgccaucggggugcugauccggggcgccacgccccacuucgacuacaucgccagcgagguguccaaggggcucgcggaccugagccuggagcuccgcaagcccaucaccuucggcgucaucaccgccgacacccuggagcaggccaucgagcgggccgggacgaagcacggcaacaagggcugggaggccgcgcuguccgccaucgagauggccaaccucuucaagagccugcgcugaggacuagucccuguucccagagcccacuuuuuuuucuuuuuuugaaauaaaauagccugucuuucagaucucaaaggcucuuuucagagccaccaaaaaaaaaaaaaaaaaaaaaaaaaaaaaaaaaaaaaaaaaaaaaaaaaaaaaaaaaaaaaaaaaaaaaaaaaaaaaaaaaaaaaaaaaaaaaaaaaaaaa

SEQ ID NO: 12415 - RNA, 4196 nt, Artificial Sequence
  SARS-CoV-2/Wuhan/WIV05/2019__EPI_ISL_402128 spike protein mRNA gc (1-1147)(K986P_V987P_T887WN_A1020W) LumSynth construct
aggagagucccgcagucggcguccagcggcucugcuuguucgugugugugucguugcaggccuuauucaagcuuaccauguucguguuccugguccuccugccccuggugagcucccagugcgugaaccucaccacccgcacgcagcugccgcccgccuacaccaacagcuucacccggggcgucuacuaccccgacaagguguuccgcuccagcgugcugcacuccacccaggaccucuuccugcccuucuucagcaacgucacgugguuccacgccauccacguguccgggaccaacggcaccaagcgguucgacaacccggugcugcccuucaacgacggggucuacuucgcgagcaccgagaaguccaacaucauccgcggcuggaucuucgggacgacccucgacagcaagacccagucccugcugaucgugaacaacgccaccaacguggucaucaaggugugcgaguuccaguucugcaacgaccccuuccucggcguguacuaccacaagaacaacaagagcuggauggaguccgaguuccgggucuacagcuccgccaacaacugcacguucgaguacgugagccagcccuuccugauggaccuggagggcaagcaggggaacuucaagaaccuccgcgaguucguguucaagaacaucgacggcuacuucaagaucuacuccaagcacaccccgaucaaccugguccgggaccugccccagggguucagcgcccucgagccccugguggaccugcccaucggcaucaacaucacccgcuuccagacccuccuggcccugcaccgguccuaccucacgccgggggacagcagcuccggcuggaccgcgggcgccgccgccuacuacgugggguaccugcagccccgcaccuuccugcucaaguacaacgagaacggcaccaucacggacgcggucgacugcgcccuggacccccugagcgagaccaagugcacccucaaguccuucaccguggagaaggggaucuaccagacgagcaacuuccgggugcagcccaccgaguccaucguccgcuucccgaacaucaccaaccugugccccuucggcgagguguucaacgccacccgguucgccagcgucuacgccuggaaccgcaagcggaucuccaacugcguggcggacuacagcgugcuguacaacuccgccagcuucuccacguucaagugcuacggcgucagccccaccaagcucaacgaccugugcuucaccaacguguacgccgacuccuucgugauccgcggggacgagguccggcagaucgcccccggccagaccgggaagaucgccgacuacaacuacaagcugccggacgacuucacgggcugcgugaucgcguggaacagcaacaaccucgacuccaaggucgggggcaacuacaacuaccuguaccgccuguuccgcaagagcaaccucaagcccuucgagcgggacaucuccaccgagaucuaccaggccggcagcacccccugcaacgggguggagggcuucaacugcuacuucccccugcaguccuacggguuccagccgaccaacggcgugggguaccagcccuaccggguggucgugcugagcuucgagcuccugcacgcccccgccacggugugcggccccaagaaguccaccaaccuggucaagaacaagugcgugaacuucaacuucaacggccucaccgggaccggcgugcugaccgagagcaacaagaaguuccugccguuccagcaguucgggcgcgacaucgccgacacgaccgacgcgguccgcgacccccagacccuggagauccucgacaucacccccugcagcuucggcgggguguccgugaucacgccgggcaccaacaccagcaaccaggucgccgugcuguaccaggacgugaacugcaccgagguccccguggccauccacgccgaccagcugacgcccaccuggcggguguacuccaccggcagcaacgucuuccagacccgcgccgggugccucaucggcgcggagcacgugaacaacuccuacgagugcgacauccccaucggggccggcaucugcgccagcuaccagacgcagaccaacuccccgcggcgcgcccggagcguggcgucccagagcaucaucgccuacaccaugucccugggcgccgagaacagcgucgccuacuccaacaacagcaucgccauccccaccaacuucacgaucuccgugaccaccgagauccugcccgugagcaugaccaagacgagcgucgacugcaccauguacaucugcggggacuccaccgagugcagcaaccuccugcugcaguacggcuccuucugcacccagcucaaccgcgcgcugacggggaucgccguggagcaggacaagaacacccaggagguguucgcccaggucaagcagaucuacaagacgcccccgaucaaggacuucggcggguucaacuucagccagauccugcccgaccccuccaagcccagcaagcgguccuucaucgaggaccuccuguucaacaaggugacccuggccgacgccggcuucaucaagcaguacggcgacugccucggggacaucgcggcccgcgaccugaucugcgcccagaaguucaacggccugaccgugcucccgccccugcugaccgacgagaugaucgcccaguacaccagcgcccuccuggcggggaccaucacguccggcuggugguucggggccggcgccgcccugcagauccccuucgcgaugcagauggccuaccgguucaacggcaucggggucacccagaacgugcucuacgagaaccagaagcugaucgccaaccaguucaacagcgccaucggcaagauccaggacucccugagcuccaccgccagcgcgcucgggaagcugcaggacguggucaaccagaacgcccaggcccugaacacgcucgugaagcagcuguccagcaacuucggcgccaucuccagcgugcugaacgacauccucucccgccuggacccgcccgaggccgaggugcagaucgaccggcugaucaccgggcgccuccagagccugcagaccuacgugacccagcagcugauccgggcggccgagauccgcuggagcgccaaccucgccgcgaccaagauguccgagugcguccugggccagagcaagcggguggacuucugcggcaagggguaccaccugauguccuucccccagagcgccccgcacggcguggucuuccuccacgugacguacguccccgcccaggagaagaacuucaccaccgcccccgcgaucugccacgacgggaaggcccacuucccccgcgagggcguguucguguccaacgggacccacugguucgucacgcagcggaacuucuacgagccgcagaucaucaccaccgacaacaccuucgugagcggcaacugcgacguggucaucggcaucgugaacaacacgguguacgacccccugcagcccgagcuggacuccggcggcgggagcgggggcgggcagaucuacgagggcaagcugaccgccgaggggcuccgcuucggcaucguggccagccgguucaaccacgcgcuggucgaccgccugguggagggggccaucgacgccaucgugcggcacggcgggcgcgaggaggacaucacccucguccgggugcccggcuccugggagaucccgguggccgccggcgagcuggcccgcaaggaggacaucgacgcggucaucgccaucggggugcugauccggggcgccacgccccacuucgacuacaucgccagcgagguguccaaggggcucgcggaccugagccuggagcuccgcaagcccaucaccuucggcgucaucaccgccgacacccuggagcaggccaucgagcgggccgggacgaagcacggcaacaagggcugggaggccgcgcuguccgccaucgagauggccaaccucuucaagagccugcgcugaggacuagucccuguucccagagcccacuuuuuuuucuuuuuuugaaauaaaauagccugucuuucagaucucaaaggcucuuuucagagccaccaaaaaaaaaaaaaaaaaaaaaaaaaaaaaaaaaaaaaaaaaaaaaaaaaaaaaaaaaaaaaaaaaaaaaaaaaaaaaaaaaaaaaaaaaaaaaaaaaaaaa

SEQ ID NO: 12416 - RNA, 4196 nt, Artificial Sequence
  SARS-CoV-2/Wuhan/WIV05/2019__EPI_ISL_402128 spike protein mRNA gc (1-1147)(K986P_V987P_P1069F) LumSynth construct
aggagagucccgcagucggcguccagcggcucugcuuguucgugugugugucguugcaggccuuauucaagcuuaccauguucguguuccugguccuccugccccuggugagcucccagugcgugaaccucaccacccgcacgcagcugccgcccgccuacaccaacagcuucacccggggcgucuacuaccccgacaagguguuccgcuccagcgugcugcacuccacccaggaccucuuccugcccuucuucagcaacgucacgugguuccacgccauccacguguccgggaccaacggcaccaagcgguucgacaacccggugcugcccuucaacgacggggucuacuucgcgagcaccgagaaguccaacaucauccgcggcuggaucuucgggacgacccucgacagcaagacccagucccugcugaucgugaacaacgccaccaacguggucaucaaggugugcgaguuccaguucugcaacgaccccuuccucggcguguacuaccacaagaacaacaagagcuggauggaguccgaguuccgggucuacagcuccgccaacaacugcacguucgaguacgugagccagcccuuccugauggaccuggagggcaagcaggggaacuucaagaaccuccgcgaguucguguucaagaacaucgacggcuacuucaagaucuacuccaagcacaccccgaucaaccugguccgggaccugccccagggguucagcgcccucgagccccugguggaccugcccaucggcaucaacaucacccgcuuccagacccuccuggcccugcaccgguccuaccucacgccgggggacagcagcuccggcuggaccgcgggcgccgccgccuacuacgugggguaccugcagccccgcaccuuccugcucaaguacaacgagaacggcaccaucacggacgcggucgacugcgcccuggacccccugagcgagaccaagugcacccucaaguccuucaccguggagaaggggaucuaccagacgagcaacuuccgggugcagcccaccgaguccaucguccgcuucccgaacaucaccaaccugugccccuucggcgagguguucaacgccacccgguucgccagcgucuacgccuggaaccgcaagcggaucuccaacugcguggcggacuacagcgugcuguacaacuccgccagcuucuccacguucaagugcuacggcgucagccccaccaagcucaacgaccugugcuucaccaacguguacgccgacuccuucgugauccgcggggacgagguccggcagaucgcccccggccagaccgggaagaucgccgacuacaacuacaagcugccggacgacuucacgggcugcgugaucgcguggaacagcaacaaccucgacuccaaggucgggggcaacuacaacuaccuguaccgccuguuccgcaagagcaaccucaagcccuucgagcgggacaucuccaccgagaucuaccaggccggcagcacccccugcaacgggguggagggcuucaacugcuacuucccccugcaguccuacggguuccagccgaccaacggcgugggguaccagcccuaccggguggucgugcugagcuucgagcuccugcacgcccccgccacggugugcggccccaagaaguccaccaaccuggucaagaacaagugcgugaacuucaacuucaacggccucaccgggaccggcgugcugaccgagagcaacaagaaguuccugccguuccagcaguucgggcgcgacaucgccgacacgaccgacgcgguccgcgacccccagacccuggagauccucgacaucacccccugcagcuucggcgggguguccgugaucacgccgggcaccaacaccagcaaccaggucgccgugcuguaccaggacgugaacugcaccgagguccccguggccauccacgccgaccagcugacgcccaccuggcggguguacuccaccggcagcaacgucuuccagacccgcgccgggugccucaucggcgcggagcacgugaacaacuccuacgagugcgacauccccaucggggccggcaucugcgccagcuaccagacgcagaccaacuccccgcggcgcgcccggagcguggcgucccagagcaucaucgccuacaccaugucccugggcgccgagaacagcgucgccuacuccaacaacagcaucgccauccccaccaacuucacgaucuccgugaccaccgagauccugcccgugagcaugaccaagacgagcgucgacugcaccauguacaucugcggggacuccaccgagugcagcaaccuccugcugcaguacggcuccuucugcacccagcucaaccgcgcgcugacggggaucgccguggagcaggacaagaacacccaggagguguucgcccaggucaagcagaucuacaagacgcccccgaucaaggacuucggcggguucaacuucagccagauccugcccgaccccuccaagcccagcaagcgguccuucaucgaggaccuccuguucaacaaggugacccuggccgacgccggcuucaucaagcaguacggcgacugccucggggacaucgcggcccgcgaccugaucugcgcccagaaguucaacggccugaccgugcucccgccccugcugaccgacgagaugaucgcccaguacaccagcgcccuccuggcggggaccaucacguccggcuggaccuucggggccggcgccgcccugcagauccccuucgcgaugcagauggccuaccgguucaacggcaucggggucacccagaacgugcucuacgagaaccagaagcugaucgccaaccaguucaacagcgccaucggcaagauccaggacucccugagcuccaccgccagcgcgcucgggaagcugcaggacguggucaaccagaacgcccaggcccugaacacgcucgugaagcagcuguccagcaacuucggcgccaucuccagcgugcugaacgacauccucucccgccuggacccgcccgaggccgaggugcagaucgaccggcugaucaccgggcgccuccagagccugcagaccuacgugacccagcagcugauccgggcggccgagauccgcgccagcgccaaccucgccgcgaccaagauguccgagugcguccugggccagagcaagcggguggacuucugcggcaagggguaccaccugauguccuucccccagagcgccccgcacggcguggucuuccuccacgugacguacgucuucgcccaggagaagaacuucaccaccgcccccgcgaucugccacgacgggaaggcccacuucccccgcgagggcguguucguguccaacgggacccacugguucgucacgcagcggaacuucuacgagccgcagaucaucaccaccgacaacaccuucgugagcggcaacugcgacguggucaucggcaucgugaacaacacgguguacgacccccugcagcccgagcuggacuccggcggcgggagcgggggcgggcagaucuacgagggcaagcugaccgccgaggggcuccgcuucggcaucguggccagccgguucaaccacgcgcuggucgaccgccugguggagggggccaucgacgccaucgugcggcacggcgggcgcgaggaggacaucacccucguccgggugcccggcuccugggagaucccgguggccgccggcgagcuggcccgcaaggaggacaucgacgcggucaucgccaucggggugcugauccggggcgccacgccccacuucgacuacaucgccagcgagguguccaaggggcucgcggaccugagccuggagcuccgcaagcccaucaccuucggcgucaucaccgccgacacccuggagcaggccaucgagcgggccgggacgaagcacggcaacaagggcugggaggccgcgcuguccgccaucgagauggccaaccucuucaagagccugcgcugaggacuagucccuguucccagagcccacuuuuuuuucuuuuuuugaaauaaaauagccugucuuucagaucucaaaggcucuuuucagagccaccaaaaaaaaaaaaaaaaaaaaaaaaaaaaaaaaaaaaaaaaaaaaaaaaaaaaaaaaaaaaaaaaaaaaaaaaaaaaaaaaaaaaaaaaaaaaaaaaaaaaa

SEQ ID NO: 12417 - RNA, 4196 nt, Artificial Sequence
  SARS-CoV-2/Wuhan/WIV05/2019__EPI_ISL_402128 spike protein mRNA gc (1-1147)(K986P_V987P_ H1048Q_H1064N_ H1083N_H1101N) LumSynth construct
aggagagucccgcagucggcguccagcggcucugcuuguucgugugugugucguugcaggccuuauucaagcuuaccauguucguguuccugguccuccugccccuggugagcucccagugcgugaaccucaccacccgcacgcagcugccgcccgccuacaccaacagcuucacccggggcgucuacuaccccgacaagguguuccgcuccagcgugcugcacuccacccaggaccucuuccugcccuucuucagcaacgucacgugguuccacgccauccacguguccgggaccaacggcaccaagcgguucgacaacccggugcugcccuucaacgacggggucuacuucgcgagcaccgagaaguccaacaucauccgcggcuggaucuucgggacgacccucgacagcaagacccagucccugcugaucgugaacaacgccaccaacguggucaucaaggugugcgaguuccaguucugcaacgaccccuuccucggcguguacuaccacaagaacaacaagagcuggauggaguccgaguuccgggucuacagcuccgccaacaacugcacguucgaguacgugagccagcccuuccugauggaccuggagggcaagcaggggaacuucaagaaccuccgcgaguucguguucaagaacaucgacggcuacuucaagaucuacuccaagcacaccccgaucaaccugguccgggaccugccccagggguucagcgcccucgagccccugguggaccugcccaucggcaucaacaucacccgcuuccagacccuccuggcccugcaccgguccuaccucacgccgggggacagcagcuccggcuggaccgcgggcgccgccgccuacuacgugggguaccugcagccccgcaccuuccugcucaaguacaacgagaacggcaccaucacggacgcggucgacugcgcccuggacccccugagcgagaccaagugcacccucaaguccuucaccguggagaaggggaucuaccagacgagcaacuuccgggugcagcccaccgaguccaucguccgcuucccgaacaucaccaaccugugccccuucggcgagguguucaacgccacccgguucgccagcgucuacgccuggaaccgcaagcggaucuccaacugcguggcggacuacagcgugcuguacaacuccgccagcuucuccacguucaagugcuacggcgucagccccaccaagcucaacgaccugugcuucaccaacguguacgccgacuccuucgugauccgcggggacgagguccggcagaucgcccccggccagaccgggaagaucgccgacuacaacuacaagcugccggacgacuucacgggcugcgugaucgcguggaacagcaacaaccucgacuccaaggucgggggcaacuacaacuaccuguaccgccuguuccgcaagagcaaccucaagcccuucgagcgggacaucuccaccgagaucuaccaggccggcagcacccccugcaacgggguggagggcuucaacugcuacuucccccugcaguccuacggguuccagccgaccaacggcgugggguaccagcccuaccggguggucgugcugagcuucgagcuccugcacgcccccgccacggugugcggccccaagaaguccaccaaccuggucaagaacaagugcgugaacuucaacuucaacggccucaccgggaccggcgugcugaccgagagcaacaagaaguuccugccguuccagcaguucgggcgcgacaucgccgacacgaccgacgcgguccgcgacccccagacccuggagauccucgacaucacccccugcagcuucggcgggguguccgugaucacgccgggcaccaacaccagcaaccaggucgccgugcuguaccaggacgugaacugcaccgagguccccguggccauccacgccgaccagcugacgcccaccuggcggguguacuccaccggcagcaacgucuuccagacccgcgccgggugccucaucggcgcggagcacgugaacaacuccuacgagugcgacauccccaucggggccggcaucugcgccagcuaccagacgcagaccaacuccccgcggcgcgcccggagcguggcgucccagagcaucaucgccuacaccaugucccugggcgccgagaacagcgucgccuacuccaacaacagcaucgccauccccaccaacuucacgaucuccgugaccaccgagauccugcccgugagcaugaccaagacgagcgucgacugcaccauguacaucugcggggacuccaccgagugcagcaaccuccugcugcaguacggcuccuucugcacccagcucaaccgcgcgcugacggggaucgccguggagcaggacaagaacacccaggagguguucgcccaggucaagcagaucuacaagacgcccccgaucaaggacuucggcggguucaacuucagccagauccugcccgaccccuccaagcccagcaagcgguccuucaucgaggaccuccuguucaacaaggugacccuggccgacgccggcuucaucaagcaguacggcgacugccucggggacaucgcggcccgcgaccugaucugcgcccagaaguucaacggccugaccgugcucccgccccugcugaccgacgagaugaucgcccaguacaccagcgcccuccuggcggggaccaucacguccggcuggaccuucggggccggcgccgcccugcagauccccuucgcgaugcagauggccuaccgguucaacggcaucggggucacccagaacgugcucuacgagaaccagaagcugaucgccaaccaguucaacagcgccaucggcaagauccaggacucccugagcuccaccgccagcgcgcucgggaagcugcaggacguggucaaccagaacgcccaggcccugaacacgcucgugaagcagcuguccagcaacuucggcgccaucuccagcgugcugaacgacauccucucccgccuggacccgcccgaggccgaggugcagaucgaccggcugaucaccgggcgccuccagagccugcagaccuacgugacccagcagcugauccgggcggccgagauccgcgccagcgccaaccucgccgcgaccaagauguccgagugcguccugggccagagcaagcggguggacuucugcggcaagggguaccagcugauguccuucccccagagcgccccgcacggcguggucuuccucaacgugacguacguccccgcccaggagaagaacuucaccaccgcccccgcgaucugcaacgacgggaaggcccacuucccccgcgagggcguguucguguccaacgggaccaacugguucgucacgcagcggaacuucuacgagccgcagaucaucaccaccgacaacaccuucgugagcggcaacugcgacguggucaucggcaucgugaacaacacgguguacgacccccugcagcccgagcuggacuccggcggcgggagcgggggcgggcagaucuacgagggcaagcugaccgccgaggggcuccgcuucggcaucguggccagccgguucaaccacgcgcuggucgaccgccugguggagggggccaucgacgccaucgugcggcacggcgggcgcgaggaggacaucacccucguccgggugcccggcuccugggagaucccgguggccgccggcgagcuggcccgcaaggaggacaucgacgcggucaucgccaucggggugcugauccggggcgccacgccccacuucgacuacaucgccagcgagguguccaaggggcucgcggaccugagccuggagcuccgcaagcccaucaccuucggcgucaucaccgccgacacccuggagcaggccaucgagcgggccgggacgaagcacggcaacaagggcugggaggccgcgcuguccgccaucgagauggccaaccucuucaagagccugcgcugaggacuagucccuguucccagagcccacuuuuuuuucuuuuuuugaaauaaaauagccugucuuucagaucucaaaggcucuuuucagagccaccaaaaaaaaaaaaaaaaaaaaaaaaaaaaaaaaaaaaaaaaaaaaaaaaaaaaaaaaaaaaaaaaaaaaaaaaaaaaaaaaaaaaaaaaaaaaaaaaaaaaa

SEQ ID NO: 12418 - RNA, 4196 nt, Artificial Sequence
  SARS-CoV-2/Wuhan/WIV05/2019__EPI_ISL_402128 spike protein mRNA gc (1-1147)(I712C_T1077C) LumSynth construct
aggagagucccgcagucggcguccagcggcucugcuuguucgugugugugucguugcaggccuuauucaagcuuaccauguucguguuccugguccuccugccccuggugagcucccagugcgugaaccucaccacccgcacgcagcugccgcccgccuacaccaacagcuucacccggggcgucuacuaccccgacaagguguuccgcuccagcgugcugcacuccacccaggaccucuuccugcccuucuucagcaacgucacgugguuccacgccauccacguguccgggaccaacggcaccaagcgguucgacaacccggugcugcccuucaacgacggggucuacuucgcgagcaccgagaaguccaacaucauccgcggcuggaucuucgggacgacccucgacagcaagacccagucccugcugaucgugaacaacgccaccaacguggucaucaaggugugcgaguuccaguucugcaacgaccccuuccucggcguguacuaccacaagaacaacaagagcuggauggaguccgaguuccgggucuacagcuccgccaacaacugcacguucgaguacgugagccagcccuuccugauggaccuggagggcaagcaggggaacuucaagaaccuccgcgaguucguguucaagaacaucgacggcuacuucaagaucuacuccaagcacaccccgaucaaccugguccgggaccugccccagggguucagcgcccucgagccccugguggaccugcccaucggcaucaacaucacccgcuuccagacccuccuggcccugcaccgguccuaccucacgccgggggacagcagcuccggcuggaccgcgggcgccgccgccuacuacgugggguaccugcagccccgcaccuuccugcucaaguacaacgagaacggcaccaucacggacgcggucgacugcgcccuggacccccugagcgagaccaagugcacccucaaguccuucaccguggagaaggggaucuaccagacgagcaacuuccgggugcagcccaccgaguccaucguccgcuucccgaacaucaccaaccugugccccuucggcgagguguucaacgccacccgguucgccagcgucuacgccuggaaccgcaagcggaucuccaacugcguggcggacuacagcgugcuguacaacuccgccagcuucuccacguucaagugcuacggcgucagccccaccaagcucaacgaccugugcuucaccaacguguacgccgacuccuucgugauccgcggggacgagguccggcagaucgcccccggccagaccgggaagaucgccgacuacaacuacaagcugccggacgacuucacgggcugcgugaucgcguggaacagcaacaaccucgacuccaaggucgggggcaacuacaacuaccuguaccgccuguuccgcaagagcaaccucaagcccuucgagcgggacaucuccaccgagaucuaccaggccggcagcacccccugcaacgggguggagggcuucaacugcuacuucccccugcaguccuacggguuccagccgaccaacggcgugggguaccagcccuaccggguggucgugcugagcuucgagcuccugcacgcccccgccacggugugcggccccaagaaguccaccaaccuggucaagaacaagugcgugaacuucaacuucaacggccucaccgggaccggcgugcugaccgagagcaacaagaaguuccugccguuccagcaguucgggcgcgacaucgccgacacgaccgacgcgguccgcgacccccagacccuggagauccucgacaucacccccugcagcuucggcgggguguccgugaucacgccgggcaccaacaccagcaaccaggucgccgugcuguaccaggacgugaacugcaccgagguccccguggccauccacgccgaccagcugacgcccaccuggcggguguacuccaccggcagcaacgucuuccagacccgcgccgggugccucaucggcgcggagcacgugaacaacuccuacgagugcgacauccccaucggggccggcaucugcgccagcuaccagacgcagaccaacuccccgcggcgcgcccggagcguggcgucccagagcaucaucgccuacaccaugucccugggcgccgagaacagcgucgccuacuccaacaacagcugcgccauccccaccaacuucacgaucuccgugaccaccgagauccugcccgugagcaugaccaagacgagcgucgacugcaccauguacaucugcggggacuccaccgagugcagcaaccuccugcugcaguacggcuccuucugcacccagcucaaccgcgcgcugacggggaucgccguggagcaggacaagaacacccaggagguguucgcccaggucaagcagaucuacaagacgcccccgaucaaggacuucggcggguucaacuucagccagauccugcccgaccccuccaagcccagcaagcgguccuucaucgaggaccuccuguucaacaaggugacccuggccgacgccggcuucaucaagcaguacggcgacugccucggggacaucgcggcccgcgaccugaucugcgcccagaaguucaacggccugaccgugcucccgccccugcugaccgacgagaugaucgcccaguacaccagcgcccuccuggcggggaccaucacguccggcuggaccuucggggccggcgccgcccugcagauccccuucgcgaugcagauggccuaccgguucaacggcaucggggucacccagaacgugcucuacgagaaccagaagcugaucgccaaccaguucaacagcgccaucggcaagauccaggacucccugagcuccaccgccagcgcgcucgggaagcugcaggacguggucaaccagaacgcccaggcccugaacacgcucgugaagcagcuguccagcaacuucggcgccaucuccagcgugcugaacgacauccucucccgccuggacaaggucgaggccgaggugcagaucgaccggcugaucaccgggcgccuccagagccugcagaccuacgugacccagcagcugauccgggcggccgagauccgcgccagcgccaaccucgccgcgaccaagauguccgagugcguccugggccagagcaagcggguggacuucugcggcaagggguaccaccugauguccuucccccagagcgccccgcacggcguggucuuccuccacgugacguacguccccgcccaggagaagaacuucaccugcgcccccgcgaucugccacgacgggaaggcccacuucccccgcgagggcguguucguguccaacgggacccacugguucgucacgcagcggaacuucuacgagccgcagaucaucaccaccgacaacaccuucgugagcggcaacugcgacguggucaucggcaucgugaacaacacgguguacgacccccugcagcccgagcuggacuccggcggcgggagcgggggcgggcagaucuacgagggcaagcugaccgccgaggggcuccgcuucggcaucguggccagccgguucaaccacgcgcuggucgaccgccugguggagggggccaucgacgccaucgugcggcacggcgggcgcgaggaggacaucacccucguccgggugcccggcuccugggagaucccgguggccgccggcgagcuggcccgcaaggaggacaucgacgcggucaucgccaucggggugcugauccggggcgccacgccccacuucgacuacaucgccagcgagguguccaaggggcucgcggaccugagccuggagcuccgcaagcccaucaccuucggcgucaucaccgccgacacccuggagcaggccaucgagcgggccgggacgaagcacggcaacaagggcugggaggccgcgcuguccgccaucgagauggccaaccucuucaagagccugcgcugaggacuagucccuguucccagagcccacuuuuuuuucuuuuuuugaaauaaaauagccugucuuucagaucucaaaggcucuuuucagagccaccaaaaaaaaaaaaaaaaaaaaaaaaaaaaaaaaaaaaaaaaaaaaaaaaaaaaaaaaaaaaaaaaaaaaaaaaaaaaaaaaaaaaaaaaaaaaaaaaaaaaa

SEQ ID NO: 12419 - RNA, 4196 nt, Artificial Sequence
  SARS-CoV-2/Wuhan/WIV05/2019__EPI_ISL_402128 spike protein mRNA gc (1-1147)(I714C_Y1110C) LumSynth construct
aggagagucccgcagucggcguccagcggcucugcuuguucgugugugugucguugcaggccuuauucaagcuuaccauguucguguuccugguccuccugccccuggugagcucccagugcgugaaccucaccacccgcacgcagcugccgcccgccuacaccaacagcuucacccggggcgucuacuaccccgacaagguguuccgcuccagcgugcugcacuccacccaggaccucuuccugcccuucuucagcaacgucacgugguuccacgccauccacguguccgggaccaacggcaccaagcgguucgacaacccggugcugcccuucaacgacggggucuacuucgcgagcaccgagaaguccaacaucauccgcggcuggaucuucgggacgacccucgacagcaagacccagucccugcugaucgugaacaacgccaccaacguggucaucaaggugugcgaguuccaguucugcaacgaccccuuccucggcguguacuaccacaagaacaacaagagcuggauggaguccgaguuccgggucuacagcuccgccaacaacugcacguucgaguacgugagccagcccuuccugauggaccuggagggcaagcaggggaacuucaagaaccuccgcgaguucguguucaagaacaucgacggcuacuucaagaucuacuccaagcacaccccgaucaaccugguccgggaccugccccagggguucagcgcccucgagccccugguggaccugcccaucggcaucaacaucacccgcuuccagacccuccuggcccugcaccgguccuaccucacgccgggggacagcagcuccggcuggaccgcgggcgccgccgccuacuacgugggguaccugcagccccgcaccuuccugcucaaguacaacgagaacggcaccaucacggacgcggucgacugcgcccuggacccccugagcgagaccaagugcacccucaaguccuucaccguggagaaggggaucuaccagacgagcaacuuccgggugcagcccaccgaguccaucguccgcuucccgaacaucaccaaccugugccccuucggcgagguguucaacgccacccgguucgccagcgucuacgccuggaaccgcaagcggaucuccaacugcguggcggacuacagcgugcuguacaacuccgccagcuucuccacguucaagugcuacggcgucagccccaccaagcucaacgaccugugcuucaccaacguguacgccgacuccuucgugauccgcggggacgagguccggcagaucgcccccggccagaccgggaagaucgccgacuacaacuacaagcugccggacgacuucacgggcugcgugaucgcguggaacagcaacaaccucgacuccaaggucgggggcaacuacaacuaccuguaccgccuguuccgcaagagcaaccucaagcccuucgagcgggacaucuccaccgagaucuaccaggccggcagcacccccugcaacgggguggagggcuucaacugcuacuucccccugcaguccuacggguuccagccgaccaacggcgugggguaccagcccuaccggguggucgugcugagcuucgagcuccugcacgcccccgccacggugugcggccccaagaaguccaccaaccuggucaagaacaagugcgugaacuucaacuucaacggccucaccgggaccggcgugcugaccgagagcaacaagaaguuccugccguuccagcaguucgggcgcgacaucgccgacacgaccgacgcgguccgcgacccccagacccuggagauccucgacaucacccccugcagcuucggcgggguguccgugaucacgccgggcaccaacaccagcaaccaggucgccgugcuguaccaggacgugaacugcaccgagguccccguggccauccacgccgaccagcugacgcccaccuggcggguguacuccaccggcagcaacgucuuccagacccgcgccgggugccucaucggcgcggagcacgugaacaacuccuacgagugcgacauccccaucggggccggcaucugcgccagcuaccagacgcagaccaacuccccgcggcgcgcccggagcguggcgucccagagcaucaucgccuacaccaugucccugggcgccgagaacagcgucgccuacuccaacaacagcaucgccugccccaccaacuucacgaucuccgugaccaccgagauccugcccgugagcaugaccaagacgagcgucgacugcaccauguacaucugcggggacuccaccgagugcagcaaccuccugcugcaguacggcuccuucugcacccagcucaaccgcgcgcugacggggaucgccguggagcaggacaagaacacccaggagguguucgcccaggucaagcagaucuacaagacgcccccgaucaaggacuucggcggguucaacuucagccagauccugcccgaccccuccaagcccagcaagcgguccuucaucgaggaccuccuguucaacaaggugacccuggccgacgccggcuucaucaagcaguacggcgacugccucggggacaucgcggcccgcgaccugaucugcgcccagaaguucaacggccugaccgugcucccgccccugcugaccgacgagaugaucgcccaguacaccagcgcccuccuggcggggaccaucacguccggcuggaccuucggggccggcgccgcccugcagauccccuucgcgaugcagauggccuaccgguucaacggcaucggggucacccagaacgugcucuacgagaaccagaagcugaucgccaaccaguucaacagcgccaucggcaagauccaggacucccugagcuccaccgccagcgcgcucgggaagcugcaggacguggucaaccagaacgcccaggcccugaacacgcucgugaagcagcuguccagcaacuucggcgccaucuccagcgugcugaacgacauccucucccgccuggacaaggucgaggccgaggugcagaucgaccggcugaucaccgggcgccuccagagccugcagaccuacgugacccagcagcugauccgggcggccgagauccgcgccagcgccaaccucgccgcgaccaagauguccgagugcguccugggccagagcaagcggguggacuucugcggcaagggguaccaccugauguccuucccccagagcgccccgcacggcguggucuuccuccacgugacguacguccccgcccaggagaagaacuucaccaccgcccccgcgaucugccacgacgggaaggcccacuucccccgcgagggcguguucguguccaacgggacccacugguucgucacgcagcggaacuucugcgagccgcagaucaucaccaccgacaacaccuucgugagcggcaacugcgacguggucaucggcaucgugaacaacacgguguacgacccccugcagcccgagcuggacuccggcggcgggagcgggggcgggcagaucuacgagggcaagcugaccgccgaggggcuccgcuucggcaucguggccagccgguucaaccacgcgcuggucgaccgccugguggagggggccaucgacgccaucgugcggcacggcgggcgcgaggaggacaucacccucguccgggugcccggcuccugggagaucccgguggccgccggcgagcuggcccgcaaggaggacaucgacgcggucaucgccaucggggugcugauccggggcgccacgccccacuucgacuacaucgccagcgagguguccaaggggcucgcggaccugagccuggagcuccgcaagcccaucaccuucggcgucaucaccgccgacacccuggagcaggccaucgagcgggccgggacgaagcacggcaacaagggcugggaggccgcgcuguccgccaucgagauggccaaccucuucaagagccugcgcugaggacuagucccuguucccagagcccacuuuuuuuucuuuuuuugaaauaaaauagccugucuuucagaucucaaaggcucuuuucagagccaccaaaaaaaaaaaaaaaaaaaaaaaaaaaaaaaaaaaaaaaaaaaaaaaaaaaaaaaaaaaaaaaaaaaaaaaaaaaaaaaaaaaaaaaaaaaaaaaaaaaaa

SEQ ID NO: 12420 - RNA, 4196 nt, Artificial Sequence
  SARS-CoV-2/Wuhan/WIV05/2019__EPI_ISL_402128 spike protein mRNA gc (1-1147)(P715C_P1069C) LumSynth construct
aggagagucccgcagucggcguccagcggcucugcuuguucgugugugugucguugcaggccuuauucaagcuuaccauguucguguuccugguccuccugccccuggugagcucccagugcgugaaccucaccacccgcacgcagcugccgcccgccuacaccaacagcuucacccggggcgucuacuaccccgacaagguguuccgcuccagcgugcugcacuccacccaggaccucuuccugcccuucuucagcaacgucacgugguuccacgccauccacguguccgggaccaacggcaccaagcgguucgacaacccggugcugcccuucaacgacggggucuacuucgcgagcaccgagaaguccaacaucauccgcggcuggaucuucgggacgacccucgacagcaagacccagucccugcugaucgugaacaacgccaccaacguggucaucaaggugugcgaguuccaguucugcaacgaccccuuccucggcguguacuaccacaagaacaacaagagcuggauggaguccgaguuccgggucuacagcuccgccaacaacugcacguucgaguacgugagccagcccuuccugauggaccuggagggcaagcaggggaacuucaagaaccuccgcgaguucguguucaagaacaucgacggcuacuucaagaucuacuccaagcacaccccgaucaaccugguccgggaccugccccagggguucagcgcccucgagccccugguggaccugcccaucggcaucaacaucacccgcuuccagacccuccuggcccugcaccgguccuaccucacgccgggggacagcagcuccggcuggaccgcgggcgccgccgccuacuacgugggguaccugcagccccgcaccuuccugcucaaguacaacgagaacggcaccaucacggacgcggucgacugcgcccuggacccccugagcgagaccaagugcacccucaaguccuucaccguggagaaggggaucuaccagacgagcaacuuccgggugcagcccaccgaguccaucguccgcuucccgaacaucaccaaccugugccccuucggcgagguguucaacgccacccgguucgccagcgucuacgccuggaaccgcaagcggaucuccaacugcguggcggacuacagcgugcuguacaacuccgccagcuucuccacguucaagugcuacggcgucagccccaccaagcucaacgaccugugcuucaccaacguguacgccgacuccuucgugauccgcggggacgagguccggcagaucgcccccggccagaccgggaagaucgccgacuacaacuacaagcugccggacgacuucacgggcugcgugaucgcguggaacagcaacaaccucgacuccaaggucgggggcaacuacaacuaccuguaccgccuguuccgcaagagcaaccucaagcccuucgagcgggacaucuccaccgagaucuaccaggccggcagcacccccugcaacgggguggagggcuucaacugcuacuucccccugcaguccuacggguuccagccgaccaacggcgugggguaccagcccuaccggguggucgugcugagcuucgagcuccugcacgcccccgccacggugugcggccccaagaaguccaccaaccuggucaagaacaagugcgugaacuucaacuucaacggccucaccgggaccggcgugcugaccgagagcaacaagaaguuccugccguuccagcaguucgggcgcgacaucgccgacacgaccgacgcgguccgcgacccccagacccuggagauccucgacaucacccccugcagcuucggcgggguguccgugaucacgccgggcaccaacaccagcaaccaggucgccgugcuguaccaggacgugaacugcaccgagguccccguggccauccacgccgaccagcugacgcccaccuggcggguguacuccaccggcagcaacgucuuccagacccgcgccgggugccucaucggcgcggagcacgugaacaacuccuacgagugcgacauccccaucggggccggcaucugcgccagcuaccagacgcagaccaacuccccgcggcgcgcccggagcguggcgucccagagcaucaucgccuacaccaugucccugggcgccgagaacagcgucgccuacuccaacaacagcaucgccaucugcaccaacuucacgaucuccgugaccaccgagauccugcccgugagcaugaccaagacgagcgucgacugcaccauguacaucugcggggacuccaccgagugcagcaaccuccugcugcaguacggcuccuucugcacccagcucaaccgcgcgcugacggggaucgccguggagcaggacaagaacacccaggagguguucgcccaggucaagcagaucuacaagacgcccccgaucaaggacuucggcggguucaacuucagccagauccugcccgaccccuccaagcccagcaagcgguccuucaucgaggaccuccuguucaacaaggugacccuggccgacgccggcuucaucaagcaguacggcgacugccucggggacaucgcggcccgcgaccugaucugcgcccagaaguucaacggccugaccgugcucccgccccugcugaccgacgagaugaucgcccaguacaccagcgcccuccuggcggggaccaucacguccggcuggaccuucggggccggcgccgcccugcagauccccuucgcgaugcagauggccuaccgguucaacggcaucggggucacccagaacgugcucuacgagaaccagaagcugaucgccaaccaguucaacagcgccaucggcaagauccaggacucccugagcuccaccgccagcgcgcucgggaagcugcaggacguggucaaccagaacgcccaggcccugaacacgcucgugaagcagcuguccagcaacuucggcgccaucuccagcgugcugaacgacauccucucccgccuggacaaggucgaggccgaggugcagaucgaccggcugaucaccgggcgccuccagagccugcagaccuacgugacccagcagcugauccgggcggccgagauccgcgccagcgccaaccucgccgcgaccaagauguccgagugcguccugggccagagcaagcggguggacuucugcggcaagggguaccaccugauguccuucccccagagcgccccgcacggcguggucuuccuccacgugacguacgucugcgcccaggagaagaacuucaccaccgcccccgcgaucugccacgacgggaaggcccacuucccccgcgagggcguguucguguccaacgggacccacugguucgucacgcagcggaacuucuacgagccgcagaucaucaccaccgacaacaccuucgugagcggcaacugcgacguggucaucggcaucgugaacaacacgguguacgacccccugcagcccgagcuggacuccggcggcgggagcgggggcgggcagaucuacgagggcaagcugaccgccgaggggcuccgcuucggcaucguggccagccgguucaaccacgcgcuggucgaccgccugguggagggggccaucgacgccaucgugcggcacggcgggcgcgaggaggacaucacccucguccgggugcccggcuccugggagaucccgguggccgccggcgagcuggcccgcaaggaggacaucgacgcggucaucgccaucggggugcugauccggggcgccacgccccacuucgacuacaucgccagcgagguguccaaggggcucgcggaccugagccuggagcuccgcaagcccaucaccuucggcgucaucaccgccgacacccuggagcaggccaucgagcgggccgggacgaagcacggcaacaagggcugggaggccgcgcuguccgccaucgagauggccaaccucuucaagagccugcgcugaggacuagucccuguucccagagcccacuuuuuuuucuuuuuuugaaauaaaauagccugucuuucagaucucaaaggcucuuuucagagccaccaaaaaaaaaaaaaaaaaaaaaaaaaaaaaaaaaaaaaaaaaaaaaaaaaaaaaaaaaaaaaaaaaaaaaaaaaaaaaaaaaaaaaaaaaaaaaaaaaaaaa

SEQ ID NO: 12421 - RNA, 4196 nt, Artificial Sequence
  SARS-CoV-2/Wuhan/WIV05/2019__EPI_ISL_402128 spike protein mRNA gc (1-1147)(G889C_L1034C) LumSynth construct
aggagagucccgcagucggcguccagcggcucugcuuguucgugugugugucguugcaggccuuauucaagcuuaccauguucguguuccugguccuccugccccuggugagcucccagugcgugaaccucaccacccgcacgcagcugccgcccgccuacaccaacagcuucacccggggcgucuacuaccccgacaagguguuccgcuccagcgugcugcacuccacccaggaccucuuccugcccuucuucagcaacgucacgugguuccacgccauccacguguccgggaccaacggcaccaagcgguucgacaacccggugcugcccuucaacgacggggucuacuucgcgagcaccgagaaguccaacaucauccgcggcuggaucuucgggacgacccucgacagcaagacccagucccugcugaucgugaacaacgccaccaacguggucaucaaggugugcgaguuccaguucugcaacgaccccuuccucggcguguacuaccacaagaacaacaagagcuggauggaguccgaguuccgggucuacagcuccgccaacaacugcacguucgaguacgugagccagcccuuccugauggaccuggagggcaagcaggggaacuucaagaaccuccgcgaguucguguucaagaacaucgacggcuacuucaagaucuacuccaagcacaccccgaucaaccugguccgggaccugccccagggguucagcgcccucgagccccugguggaccugcccaucggcaucaacaucacccgcuuccagacccuccuggcccugcaccgguccuaccucacgccgggggacagcagcuccggcuggaccgcgggcgccgccgccuacuacgugggguaccugcagccccgcaccuuccugcucaaguacaacgagaacggcaccaucacggacgcggucgacugcgcccuggacccccugagcgagaccaagugcacccucaaguccuucaccguggagaaggggaucuaccagacgagcaacuuccgggugcagcccaccgaguccaucguccgcuucccgaacaucaccaaccugugccccuucggcgagguguucaacgccacccgguucgccagcgucuacgccuggaaccgcaagcggaucuccaacugcguggcggacuacagcgugcuguacaacuccgccagcuucuccacguucaagugcuacggcgucagccccaccaagcucaacgaccugugcuucaccaacguguacgccgacuccuucgugauccgcggggacgagguccggcagaucgcccccggccagaccgggaagaucgccgacuacaacuacaagcugccggacgacuucacgggcugcgugaucgcguggaacagcaacaaccucgacuccaaggucgggggcaacuacaacuaccuguaccgccuguuccgcaagagcaaccucaagcccuucgagcgggacaucuccaccgagaucuaccaggccggcagcacccccugcaacgggguggagggcuucaacugcuacuucccccugcaguccuacggguuccagccgaccaacggcgugggguaccagcccuaccggguggucgugcugagcuucgagcuccugcacgcccccgccacggugugcggccccaagaaguccaccaaccuggucaagaacaagugcgugaacuucaacuucaacggccucaccgggaccggcgugcugaccgagagcaacaagaaguuccugccguuccagcaguucgggcgcgacaucgccgacacgaccgacgcgguccgcgacccccagacccuggagauccucgacaucacccccugcagcuucggcgggguguccgugaucacgccgggcaccaacaccagcaaccaggucgccgugcuguaccaggacgugaacugcaccgagguccccguggccauccacgccgaccagcugacgcccaccuggcggguguacuccaccggcagcaacgucuuccagacccgcgccgggugccucaucggcgcggagcacgugaacaacuccuacgagugcgacauccccaucggggccggcaucugcgccagcuaccagacgcagaccaacuccccgcggcgcgcccggagcguggcgucccagagcaucaucgccuacaccaugucccugggcgccgagaacagcgucgccuacuccaacaacagcaucgccauccccaccaacuucacgaucuccgugaccaccgagauccugcccgugagcaugaccaagacgagcgucgacugcaccauguacaucugcggggacuccaccgagugcagcaaccuccugcugcaguacggcuccuucugcacccagcucaaccgcgcgcugacggggaucgccguggagcaggacaagaacacccaggagguguucgcccaggucaagcagaucuacaagacgcccccgaucaaggacuucggcggguucaacuucagccagauccugcccgaccccuccaagcccagcaagcgguccuucaucgaggaccuccuguucaacaaggugacccuggccgacgccggcuucaucaagcaguacggcgacugccucggggacaucgcggcccgcgaccugaucugcgcccagaaguucaacggccugaccgugcucccgccccugcugaccgacgagaugaucgcccaguacaccagcgcccuccuggcggggaccaucacguccggcuggaccuucugcgccggcgccgcccugcagauccccuucgcgaugcagauggccuaccgguucaacggcaucggggucacccagaacgugcucuacgagaaccagaagcugaucgccaaccaguucaacagcgccaucggcaagauccaggacucccugagcuccaccgccagcgcgcucgggaagcugcaggacguggucaaccagaacgcccaggcccugaacacgcucgugaagcagcuguccagcaacuucggcgccaucuccagcgugcugaacgacauccucucccgccuggacaaggucgaggccgaggugcagaucgaccggcugaucaccgggcgccuccagagccugcagaccuacgugacccagcagcugauccgggcggccgagauccgcgccagcgccaaccucgccgcgaccaagauguccgagugcgucugcggccagagcaagcggguggacuucugcggcaagggguaccaccugauguccuucccccagagcgccccgcacggcguggucuuccuccacgugacguacguccccgcccaggagaagaacuucaccaccgcccccgcgaucugccacgacgggaaggcccacuucccccgcgagggcguguucguguccaacgggacccacugguucgucacgcagcggaacuucuacgagccgcagaucaucaccaccgacaacaccuucgugagcggcaacugcgacguggucaucggcaucgugaacaacacgguguacgacccccugcagcccgagcuggacuccggcggcgggagcgggggcgggcagaucuacgagggcaagcugaccgccgaggggcuccgcuucggcaucguggccagccgguucaaccacgcgcuggucgaccgccugguggagggggccaucgacgccaucgugcggcacggcgggcgcgaggaggacaucacccucguccgggugcccggcuccugggagaucccgguggccgccggcgagcuggcccgcaaggaggacaucgacgcggucaucgccaucggggugcugauccggggcgccacgccccacuucgacuacaucgccagcgagguguccaaggggcucgcggaccugagccuggagcuccgcaagcccaucaccuucggcgucaucaccgccgacacccuggagcaggccaucgagcgggccgggacgaagcacggcaacaagggcugggaggccgcgcuguccgccaucgagauggccaaccucuucaagagccugcgcugaggacuagucccuguucccagagcccacuuuuuuuucuuuuuuugaaauaaaauagccugucuuucagaucucaaaggcucuuuucagagccaccaaaaaaaaaaaaaaaaaaaaaaaaaaaaaaaaaaaaaaaaaaaaaaaaaaaaaaaaaaaaaaaaaaaaaaaaaaaaaaaaaaaaaaaaaaaaaaaaaaaaa

SEQ ID NO: 12422 - RNA, 4196 nt, Artificial Sequence
  SARS-CoV-2/Wuhan/WIV05/2019__EPI_ISL_402128 spike protein mRNA gc (1-1147)(I909C_Y1047C) LumSynth construct
aggagagucccgcagucggcguccagcggcucugcuuguucgugugugugucguugcaggccuuauucaagcuuaccauguucguguuccugguccuccugccccuggugagcucccagugcgugaaccucaccacccgcacgcagcugccgcccgccuacaccaacagcuucacccggggcgucuacuaccccgacaagguguuccgcuccagcgugcugcacuccacccaggaccucuuccugcccuucuucagcaacgucacgugguuccacgccauccacguguccgggaccaacggcaccaagcgguucgacaacccggugcugcccuucaacgacggggucuacuucgcgagcaccgagaaguccaacaucauccgcggcuggaucuucgggacgacccucgacagcaagacccagucccugcugaucgugaacaacgccaccaacguggucaucaaggugugcgaguuccaguucugcaacgaccccuuccucggcguguacuaccacaagaacaacaagagcuggauggaguccgaguuccgggucuacagcuccgccaacaacugcacguucgaguacgugagccagcccuuccugauggaccuggagggcaagcaggggaacuucaagaaccuccgcgaguucguguucaagaacaucgacggcuacuucaagaucuacuccaagcacaccccgaucaaccugguccgggaccugccccagggguucagcgcccucgagccccugguggaccugcccaucggcaucaacaucacccgcuuccagacccuccuggcccugcaccgguccuaccucacgccgggggacagcagcuccggcuggaccgcgggcgccgccgccuacuacgugggguaccugcagccccgcaccuuccugcucaaguacaacgagaacggcaccaucacggacgcggucgacugcgcccuggacccccugagcgagaccaagugcacccucaaguccuucaccguggagaaggggaucuaccagacgagcaacuuccgggugcagcccaccgaguccaucguccgcuucccgaacaucaccaaccugugccccuucggcgagguguucaacgccacccgguucgccagcgucuacgccuggaaccgcaagcggaucuccaacugcguggcggacuacagcgugcuguacaacuccgccagcuucuccacguucaagugcuacggcgucagccccaccaagcucaacgaccugugcuucaccaacguguacgccgacuccuucgugauccgcggggacgagguccggcagaucgcccccggccagaccgggaagaucgccgacuacaacuacaagcugccggacgacuucacgggcugcgugaucgcguggaacagcaacaaccucgacuccaaggucgggggcaacuacaacuaccuguaccgccuguuccgcaagagcaaccucaagcccuucgagcgggacaucuccaccgagaucuaccaggccggcagcacccccugcaacgggguggagggcuucaacugcuacuucccccugcaguccuacggguuccagccgaccaacggcgugggguaccagcccuaccggguggucgugcugagcuucgagcuccugcacgcccccgccacggugugcggccccaagaaguccaccaaccuggucaagaacaagugcgugaacuucaacuucaacggccucaccgggaccggcgugcugaccgagagcaacaagaaguuccugccguuccagcaguucgggcgcgacaucgccgacacgaccgacgcgguccgcgacccccagacccuggagauccucgacaucacccccugcagcuucggcgggguguccgugaucacgccgggcaccaacaccagcaaccaggucgccgugcuguaccaggacgugaacugcaccgagguccccguggccauccacgccgaccagcugacgcccaccuggcggguguacuccaccggcagcaacgucuuccagacccgcgccgggugccucaucggcgcggagcacgugaacaacuccuacgagugcgacauccccaucggggccggcaucugcgccagcuaccagacgcagaccaacuccccgcggcgcgcccggagcguggcgucccagagcaucaucgccuacaccaugucccugggcgccgagaacagcgucgccuacuccaacaacagcaucgccauccccaccaacuucacgaucuccgugaccaccgagauccugcccgugagcaugaccaagacgagcgucgacugcaccauguacaucugcggggacuccaccgagugcagcaaccuccugcugcaguacggcuccuucugcacccagcucaaccgcgcgcugacggggaucgccguggagcaggacaagaacacccaggagguguucgcccaggucaagcagaucuacaagacgcccccgaucaaggacuucggcggguucaacuucagccagauccugcccgaccccuccaagcccagcaagcgguccuucaucgaggaccuccuguucaacaaggugacccuggccgacgccggcuucaucaagcaguacggcgacugccucggggacaucgcggcccgcgaccugaucugcgcccagaaguucaacggccugaccgugcucccgccccugcugaccgacgagaugaucgcccaguacaccagcgcccuccuggcggggaccaucacguccggcuggaccuucggggccggcgccgcccugcagauccccuucgcgaugcagauggccuaccgguucaacggcugcggggucacccagaacgugcucuacgagaaccagaagcugaucgccaaccaguucaacagcgccaucggcaagauccaggacucccugagcuccaccgccagcgcgcucgggaagcugcaggacguggucaaccagaacgcccaggcccugaacacgcucgugaagcagcuguccagcaacuucggcgccaucuccagcgugcugaacgacauccucucccgccuggacaaggucgaggccgaggugcagaucgaccggcugaucaccgggcgccuccagagccugcagaccuacgugacccagcagcugauccgggcggccgagauccgcgccagcgccaaccucgccgcgaccaagauguccgagugcguccugggccagagcaagcggguggacuucugcggcaaggggugccaccugauguccuucccccagagcgccccgcacggcguggucuuccuccacgugacguacguccccgcccaggagaagaacuucaccaccgcccccgcgaucugccacgacgggaaggcccacuucccccgcgagggcguguucguguccaacgggacccacugguucgucacgcagcggaacuucuacgagccgcagaucaucaccaccgacaacaccuucgugagcggcaacugcgacguggucaucggcaucgugaacaacacgguguacgacccccugcagcccgagcuggacuccggcggcgggagcgggggcgggcagaucuacgagggcaagcugaccgccgaggggcuccgcuucggcaucguggccagccgguucaaccacgcgcuggucgaccgccugguggagggggccaucgacgccaucgugcggcacggcgggcgcgaggaggacaucacccucguccgggugcccggcuccugggagaucccgguggccgccggcgagcuggcccgcaaggaggacaucgacgcggucaucgccaucggggugcugauccggggcgccacgccccacuucgacuacaucgccagcgagguguccaaggggcucgcggaccugagccuggagcuccgcaagcccaucaccuucggcgucaucaccgccgacacccuggagcaggccaucgagcgggccgggacgaagcacggcaacaagggcugggaggccgcgcuguccgccaucgagauggccaaccucuucaagagccugcgcugaggacuagucccuguucccagagcccacuuuuuuuucuuuuuuugaaauaaaauagccugucuuucagaucucaaaggcucuuuucagagccaccaaaaaaaaaaaaaaaaaaaaaaaaaaaaaaaaaaaaaaaaaaaaaaaaaaaaaaaaaaaaaaaaaaaaaaaaaaaaaaaaaaaaaaaaaaaaaaaaaaaaa

SEQ ID NO: 12423 - RNA, 4196 nt, Artificial Sequence
  SARS-CoV-2/Wuhan/WIV05/2019__EPI_ISL_402128 spike protein mRNA gc (1-1147)(Q965C_S1003C) LumSynth construct
aggagagucccgcagucggcguccagcggcucugcuuguucgugugugugucguugcaggccuuauucaagcuuaccauguucguguuccugguccuccugccccuggugagcucccagugcgugaaccucaccacccgcacgcagcugccgcccgccuacaccaacagcuucacccggggcgucuacuaccccgacaagguguuccgcuccagcgugcugcacuccacccaggaccucuuccugcccuucuucagcaacgucacgugguuccacgccauccacguguccgggaccaacggcaccaagcgguucgacaacccggugcugcccuucaacgacggggucuacuucgcgagcaccgagaaguccaacaucauccgcggcuggaucuucgggacgacccucgacagcaagacccagucccugcugaucgugaacaacgccaccaacguggucaucaaggugugcgaguuccaguucugcaacgaccccuuccucggcguguacuaccacaagaacaacaagagcuggauggaguccgaguuccgggucuacagcuccgccaacaacugcacguucgaguacgugagccagcccuuccugauggaccuggagggcaagcaggggaacuucaagaaccuccgcgaguucguguucaagaacaucgacggcuacuucaagaucuacuccaagcacaccccgaucaaccugguccgggaccugccccagggguucagcgcccucgagccccugguggaccugcccaucggcaucaacaucacccgcuuccagacccuccuggcccugcaccgguccuaccucacgccgggggacagcagcuccggcuggaccgcgggcgccgccgccuacuacgugggguaccugcagccccgcaccuuccugcucaaguacaacgagaacggcaccaucacggacgcggucgacugcgcccuggacccccugagcgagaccaagugcacccucaaguccuucaccguggagaaggggaucuaccagacgagcaacuuccgggugcagcccaccgaguccaucguccgcuucccgaacaucaccaaccugugccccuucggcgagguguucaacgccacccgguucgccagcgucuacgccuggaaccgcaagcggaucuccaacugcguggcggacuacagcgugcuguacaacuccgccagcuucuccacguucaagugcuacggcgucagccccaccaagcucaacgaccugugcuucaccaacguguacgccgacuccuucgugauccgcggggacgagguccggcagaucgcccccggccagaccgggaagaucgccgacuacaacuacaagcugccggacgacuucacgggcugcgugaucgcguggaacagcaacaaccucgacuccaaggucgggggcaacuacaacuaccuguaccgccuguuccgcaagagcaaccucaagcccuucgagcgggacaucuccaccgagaucuaccaggccggcagcacccccugcaacgggguggagggcuucaacugcuacuucccccugcaguccuacggguuccagccgaccaacggcgugggguaccagcccuaccggguggucgugcugagcuucgagcuccugcacgcccccgccacggugugcggccccaagaaguccaccaaccuggucaagaacaagugcgugaacuucaacuucaacggccucaccgggaccggcgugcugaccgagagcaacaagaaguuccugccguuccagcaguucgggcgcgacaucgccgacacgaccgacgcgguccgcgacccccagacccuggagauccucgacaucacccccugcagcuucggcgggguguccgugaucacgccgggcaccaacaccagcaaccaggucgccgugcuguaccaggacgugaacugcaccgagguccccguggccauccacgccgaccagcugacgcccaccuggcggguguacuccaccggcagcaacgucuuccagacccgcgccgggugccucaucggcgcggagcacgugaacaacuccuacgagugcgacauccccaucggggccggcaucugcgccagcuaccagacgcagaccaacuccccgcggcgcgcccggagcguggcgucccagagcaucaucgccuacaccaugucccugggcgccgagaacagcgucgccuacuccaacaacagcaucgccauccccaccaacuucacgaucuccgugaccaccgagauccugcccgugagcaugaccaagacgagcgucgacugcaccauguacaucugcggggacuccaccgagugcagcaaccuccugcugcaguacggcuccuucugcacccagcucaaccgcgcgcugacggggaucgccguggagcaggacaagaacacccaggagguguucgcccaggucaagcagaucuacaagacgcccccgaucaaggacuucggcggguucaacuucagccagauccugcccgaccccuccaagcccagcaagcgguccuucaucgaggaccuccuguucaacaaggugacccuggccgacgccggcuucaucaagcaguacggcgacugccucggggacaucgcggcccgcgaccugaucugcgcccagaaguucaacggccugaccgugcucccgccccugcugaccgacgagaugaucgcccaguacaccagcgcccuccuggcggggaccaucacguccggcuggaccuucggggccggcgccgcccugcagauccccuucgcgaugcagauggccuaccgguucaacggcaucggggucacccagaacgugcucuacgagaaccagaagcugaucgccaaccaguucaacagcgccaucggcaagauccaggacucccugagcuccaccgccagcgcgcucgggaagcugcaggacguggucaaccagaacgcccaggcccugaacacgcucgugaagugccuguccagcaacuucggcgccaucuccagcgugcugaacgacauccucucccgccuggacaaggucgaggccgaggugcagaucgaccggcugaucaccgggcgccuccagugccugcagaccuacgugacccagcagcugauccgggcggccgagauccgcgccagcgccaaccucgccgcgaccaagauguccgagugcguccugggccagagcaagcggguggacuucugcggcaagggguaccaccugauguccuucccccagagcgccccgcacggcguggucuuccuccacgugacguacguccccgcccaggagaagaacuucaccaccgcccccgcgaucugccacgacgggaaggcccacuucccccgcgagggcguguucguguccaacgggacccacugguucgucacgcagcggaacuucuacgagccgcagaucaucaccaccgacaacaccuucgugagcggcaacugcgacguggucaucggcaucgugaacaacacgguguacgacccccugcagcccgagcuggacuccggcggcgggagcgggggcgggcagaucuacgagggcaagcugaccgccgaggggcuccgcuucggcaucguggccagccgguucaaccacgcgcuggucgaccgccugguggagggggccaucgacgccaucgugcggcacggcgggcgcgaggaggacaucacccucguccgggugcccggcuccugggagaucccgguggccgccggcgagcuggcccgcaaggaggacaucgacgcggucaucgccaucggggugcugauccggggcgccacgccccacuucgacuacaucgccagcgagguguccaaggggcucgcggaccugagccuggagcuccgcaagcccaucaccuucggcgucaucaccgccgacacccuggagcaggccaucgagcgggccgggacgaagcacggcaacaagggcugggaggccgcgcuguccgccaucgagauggccaaccucuucaagagccugcgcugaggacuagucccuguucccagagcccacuuuuuuuucuuuuuuugaaauaaaauagccugucuuucagaucucaaaggcucuuuucagagccaccaaaaaaaaaaaaaaaaaaaaaaaaaaaaaaaaaaaaaaaaaaaaaaaaaaaaaaaaaaaaaaaaaaaaaaaaaaaaaaaaaaaaaaaaaaaaaaaaaaaaa

SEQ ID NO: 12424 - RNA, 4196 nt, Artificial Sequence
  SARS-CoV-2/Wuhan/WIV05/2019__EPI_ISL_402128 spike protein mRNA gc (1-1147)(F970C_G999C) LumSynth construct
aggagagucccgcagucggcguccagcggcucugcuuguucgugugugugucguugcaggccuuauucaagcuuaccauguucguguuccugguccuccugccccuggugagcucccagugcgugaaccucaccacccgcacgcagcugccgcccgccuacaccaacagcuucacccggggcgucuacuaccccgacaagguguuccgcuccagcgugcugcacuccacccaggaccucuuccugcccuucuucagcaacgucacgugguuccacgccauccacguguccgggaccaacggcaccaagcgguucgacaacccggugcugcccuucaacgacggggucuacuucgcgagcaccgagaaguccaacaucauccgcggcuggaucuucgggacgacccucgacagcaagacccagucccugcugaucgugaacaacgccaccaacguggucaucaaggugugcgaguuccaguucugcaacgaccccuuccucggcguguacuaccacaagaacaacaagagcuggauggaguccgaguuccgggucuacagcuccgccaacaacugcacguucgaguacgugagccagcccuuccugauggaccuggagggcaagcaggggaacuucaagaaccuccgcgaguucguguucaagaacaucgacggcuacuucaagaucuacuccaagcacaccccgaucaaccugguccgggaccugccccagggguucagcgcccucgagccccugguggaccugcccaucggcaucaacaucacccgcuuccagacccuccuggcccugcaccgguccuaccucacgccgggggacagcagcuccggcuggaccgcgggcgccgccgccuacuacgugggguaccugcagccccgcaccuuccugcucaaguacaacgagaacggcaccaucacggacgcggucgacugcgcccuggacccccugagcgagaccaagugcacccucaaguccuucaccguggagaaggggaucuaccagacgagcaacuuccgggugcagcccaccgaguccaucguccgcuucccgaacaucaccaaccugugccccuucggcgagguguucaacgccacccgguucgccagcgucuacgccuggaaccgcaagcggaucuccaacugcguggcggacuacagcgugcuguacaacuccgccagcuucuccacguucaagugcuacggcgucagccccaccaagcucaacgaccugugcuucaccaacguguacgccgacuccuucgugauccgcggggacgagguccggcagaucgcccccggccagaccgggaagaucgccgacuacaacuacaagcugccggacgacuucacgggcugcgugaucgcguggaacagcaacaaccucgacuccaaggucgggggcaacuacaacuaccuguaccgccuguuccgcaagagcaaccucaagcccuucgagcgggacaucuccaccgagaucuaccaggccggcagcacccccugcaacgggguggagggcuucaacugcuacuucccccugcaguccuacggguuccagccgaccaacggcgugggguaccagcccuaccggguggucgugcugagcuucgagcuccugcacgcccccgccacggugugcggccccaagaaguccaccaaccuggucaagaacaagugcgugaacuucaacuucaacggccucaccgggaccggcgugcugaccgagagcaacaagaaguuccugccguuccagcaguucgggcgcgacaucgccgacacgaccgacgcgguccgcgacccccagacccuggagauccucgacaucacccccugcagcuucggcgggguguccgugaucacgccgggcaccaacaccagcaaccaggucgccgugcuguaccaggacgugaacugcaccgagguccccguggccauccacgccgaccagcugacgcccaccuggcggguguacuccaccggcagcaacgucuuccagacccgcgccgggugccucaucggcgcggagcacgugaacaacuccuacgagugcgacauccccaucggggccggcaucugcgccagcuaccagacgcagaccaacuccccgcggcgcgcccggagcguggcgucccagagcaucaucgccuacaccaugucccugggcgccgagaacagcgucgccuacuccaacaacagcaucgccauccccaccaacuucacgaucuccgugaccaccgagauccugcccgugagcaugaccaagacgagcgucgacugcaccauguacaucugcggggacuccaccgagugcagcaaccuccugcugcaguacggcuccuucugcacccagcucaaccgcgcgcugacggggaucgccguggagcaggacaagaacacccaggagguguucgcccaggucaagcagaucuacaagacgcccccgaucaaggacuucggcggguucaacuucagccagauccugcccgaccccuccaagcccagcaagcgguccuucaucgaggaccuccuguucaacaaggugacccuggccgacgccggcuucaucaagcaguacggcgacugccucggggacaucgcggcccgcgaccugaucugcgcccagaaguucaacggccugaccgugcucccgccccugcugaccgacgagaugaucgcccaguacaccagcgcccuccuggcggggaccaucacguccggcuggaccuucggggccggcgccgcccugcagauccccuucgcgaugcagauggccuaccgguucaacggcaucggggucacccagaacgugcucuacgagaaccagaagcugaucgccaaccaguucaacagcgccaucggcaagauccaggacucccugagcuccaccgccagcgcgcucgggaagcugcaggacguggucaaccagaacgcccaggcccugaacacgcucgugaagcagcuguccagcaacugcggcgccaucuccagcgugcugaacgacauccucucccgccuggacaaggucgaggccgaggugcagaucgaccggcugaucaccugucgccuccagagccugcagaccuacgugacccagcagcugauccgggcggccgagauccgcgccagcgccaaccucgccgcgaccaagauguccgagugcguccugggccagagcaagcggguggacuucugcggcaagggguaccaccugauguccuucccccagagcgccccgcacggcguggucuuccuccacgugacguacguccccgcccaggagaagaacuucaccaccgcccccgcgaucugccacgacgggaaggcccacuucccccgcgagggcguguucguguccaacgggacccacugguucgucacgcagcggaacuucuacgagccgcagaucaucaccaccgacaacaccuucgugagcggcaacugcgacguggucaucggcaucgugaacaacacgguguacgacccccugcagcccgagcuggacuccggcggcgggagcgggggcgggcagaucuacgagggcaagcugaccgccgaggggcuccgcuucggcaucguggccagccgguucaaccacgcgcuggucgaccgccugguggagggggccaucgacgccaucgugcggcacggcgggcgcgaggaggacaucacccucguccgggugcccggcuccugggagaucccgguggccgccggcgagcuggcccgcaaggaggacaucgacgcggucaucgccaucggggugcugauccggggcgccacgccccacuucgacuacaucgccagcgagguguccaaggggcucgcggaccugagccuggagcuccgcaagcccaucaccuucggcgucaucaccgccgacacccuggagcaggccaucgagcgggccgggacgaagcacggcaacaagggcugggaggccgcgcuguccgccaucgagauggccaaccucuucaagagccugcgcugaggacuagucccuguucccagagcccacuuuuuuuucuuuuuuugaaauaaaauagccugucuuucagaucucaaaggcucuuuucagagccaccaaaaaaaaaaaaaaaaaaaaaaaaaaaaaaaaaaaaaaaaaaaaaaaaaaaaaaaaaaaaaaaaaaaaaaaaaaaaaaaaaaaaaaaaaaaaaaaaaaaaa

SEQ ID NO: 12425 - RNA, 4196 nt, Artificial Sequence
  SARS-CoV-2/Wuhan/WIV05/2019__EPI_ISL_402128 spike protein mRNA gc (1-1147)(A972C_R995C) LumSynth construct
aggagagucccgcagucggcguccagcggcucugcuuguucgugugugugucguugcaggccuuauucaagcuuaccauguucguguuccugguccuccugccccuggugagcucccagugcgugaaccucaccacccgcacgcagcugccgcccgccuacaccaacagcuucacccggggcgucuacuaccccgacaagguguuccgcuccagcgugcugcacuccacccaggaccucuuccugcccuucuucagcaacgucacgugguuccacgccauccacguguccgggaccaacggcaccaagcgguucgacaacccggugcugcccuucaacgacggggucuacuucgcgagcaccgagaaguccaacaucauccgcggcuggaucuucgggacgacccucgacagcaagacccagucccugcugaucgugaacaacgccaccaacguggucaucaaggugugcgaguuccaguucugcaacgaccccuuccucggcguguacuaccacaagaacaacaagagcuggauggaguccgaguuccgggucuacagcuccgccaacaacugcacguucgaguacgugagccagcccuuccugauggaccuggagggcaagcaggggaacuucaagaaccuccgcgaguucguguucaagaacaucgacggcuacuucaagaucuacuccaagcacaccccgaucaaccugguccgggaccugccccagggguucagcgcccucgagccccugguggaccugcccaucggcaucaacaucacccgcuuccagacccuccuggcccugcaccgguccuaccucacgccgggggacagcagcuccggcuggaccgcgggcgccgccgccuacuacgugggguaccugcagccccgcaccuuccugcucaaguacaacgagaacggcaccaucacggacgcggucgacugcgcccuggacccccugagcgagaccaagugcacccucaaguccuucaccguggagaaggggaucuaccagacgagcaacuuccgggugcagcccaccgaguccaucguccgcuucccgaacaucaccaaccugugccccuucggcgagguguucaacgccacccgguucgccagcgucuacgccuggaaccgcaagcggaucuccaacugcguggcggacuacagcgugcuguacaacuccgccagcuucuccacguucaagugcuacggcgucagccccaccaagcucaacgaccugugcuucaccaacguguacgccgacuccuucgugauccgcggggacgagguccggcagaucgcccccggccagaccgggaagaucgccgacuacaacuacaagcugccggacgacuucacgggcugcgugaucgcguggaacagcaacaaccucgacuccaaggucgggggcaacuacaacuaccuguaccgccuguuccgcaagagcaaccucaagcccuucgagcgggacaucuccaccgagaucuaccaggccggcagcacccccugcaacgggguggagggcuucaacugcuacuucccccugcaguccuacggguuccagccgaccaacggcgugggguaccagcccuaccggguggucgugcugagcuucgagcuccugcacgcccccgccacggugugcggccccaagaaguccaccaaccuggucaagaacaagugcgugaacuucaacuucaacggccucaccgggaccggcgugcugaccgagagcaacaagaaguuccugccguuccagcaguucgggcgcgacaucgccgacacgaccgacgcgguccgcgacccccagacccuggagauccucgacaucacccccugcagcuucggcgggguguccgugaucacgccgggcaccaacaccagcaaccaggucgccgugcuguaccaggacgugaacugcaccgagguccccguggccauccacgccgaccagcugacgcccaccuggcggguguacuccaccggcagcaacgucuuccagacccgcgccgggugccucaucggcgcggagcacgugaacaacuccuacgagugcgacauccccaucggggccggcaucugcgccagcuaccagacgcagaccaacuccccgcggcgcgcccggagcguggcgucccagagcaucaucgccuacaccaugucccugggcgccgagaacagcgucgccuacuccaacaacagcaucgccauccccaccaacuucacgaucuccgugaccaccgagauccugcccgugagcaugaccaagacgagcgucgacugcaccauguacaucugcggggacuccaccgagugcagcaaccuccugcugcaguacggcuccuucugcacccagcucaaccgcgcgcugacggggaucgccguggagcaggacaagaacacccaggagguguucgcccaggucaagcagaucuacaagacgcccccgaucaaggacuucggcggguucaacuucagccagauccugcccgaccccuccaagcccagcaagcgguccuucaucgaggaccuccuguucaacaaggugacccuggccgacgccggcuucaucaagcaguacggcgacugccucggggacaucgcggcccgcgaccugaucugcgcccagaaguucaacggccugaccgugcucccgccccugcugaccgacgagaugaucgcccaguacaccagcgcccuccuggcggggaccaucacguccggcuggaccuucggggccggcgccgcccugcagauccccuucgcgaugcagauggccuaccgguucaacggcaucggggucacccagaacgugcucuacgagaaccagaagcugaucgccaaccaguucaacagcgccaucggcaagauccaggacucccugagcuccaccgccagcgcgcucgggaagcugcaggacguggucaaccagaacgcccaggcccugaacacgcucgugaagcagcuguccagcaacuucggcugcaucuccagcgugcugaacgacauccucucccgccuggacaaggucgaggccgaggugcagaucgacugccugaucaccgggcgccuccagagccugcagaccuacgugacccagcagcugauccgggcggccgagauccgcgccagcgccaaccucgccgcgaccaagauguccgagugcguccugggccagagcaagcggguggacuucugcggcaagggguaccaccugauguccuucccccagagcgccccgcacggcguggucuuccuccacgugacguacguccccgcccaggagaagaacuucaccaccgcccccgcgaucugccacgacgggaaggcccacuucccccgcgagggcguguucguguccaacgggacccacugguucgucacgcagcggaacuucuacgagccgcagaucaucaccaccgacaacaccuucgugagcggcaacugcgacguggucaucggcaucgugaacaacacgguguacgacccccugcagcccgagcuggacuccggcggcgggagcgggggcgggcagaucuacgagggcaagcugaccgccgaggggcuccgcuucggcaucguggccagccgguucaaccacgcgcuggucgaccgccugguggagggggccaucgacgccaucgugcggcacggcgggcgcgaggaggacaucacccucguccgggugcccggcuccugggagaucccgguggccgccggcgagcuggcccgcaaggaggacaucgacgcggucaucgccaucggggugcugauccggggcgccacgccccacuucgacuacaucgccagcgagguguccaaggggcucgcggaccugagccuggagcuccgcaagcccaucaccuucggcgucaucaccgccgacacccuggagcaggccaucgagcgggccgggacgaagcacggcaacaagggcugggaggccgcgcuguccgccaucgagauggccaaccucuucaagagccugcgcugaggacuagucccuguucccagagcccacuuuuuuuucuuuuuuugaaauaaaauagccugucuuucagaucucaaaggcucuuuucagagccaccaaaaaaaaaaaaaaaaaaaaaaaaaaaaaaaaaaaaaaaaaaaaaaaaaaaaaaaaaaaaaaaaaaaaaaaaaaaaaaaaaaaaaaaaaaaaaaaaaaaaa

SEQ ID NO: 12426 - RNA, 4196 nt, Artificial Sequence
  SARS-CoV-2/Wuhan/WIV05/2019__EPI_ISL_402128 spike protein mRNA gc (1-1147)(A890C_V1040C) LumSynth construct
aggagagucccgcagucggcguccagcggcucugcuuguucgugugugugucguugcaggccuuauucaagcuuaccauguucguguuccugguccuccugccccuggugagcucccagugcgugaaccucaccacccgcacgcagcugccgcccgccuacaccaacagcuucacccggggcgucuacuaccccgacaagguguuccgcuccagcgugcugcacuccacccaggaccucuuccugcccuucuucagcaacgucacgugguuccacgccauccacguguccgggaccaacggcaccaagcgguucgacaacccggugcugcccuucaacgacggggucuacuucgcgagcaccgagaaguccaacaucauccgcggcuggaucuucgggacgacccucgacagcaagacccagucccugcugaucgugaacaacgccaccaacguggucaucaaggugugcgaguuccaguucugcaacgaccccuuccucggcguguacuaccacaagaacaacaagagcuggauggaguccgaguuccgggucuacagcuccgccaacaacugcacguucgaguacgugagccagcccuuccugauggaccuggagggcaagcaggggaacuucaagaaccuccgcgaguucguguucaagaacaucgacggcuacuucaagaucuacuccaagcacaccccgaucaaccugguccgggaccugccccagggguucagcgcccucgagccccugguggaccugcccaucggcaucaacaucacccgcuuccagacccuccuggcccugcaccgguccuaccucacgccgggggacagcagcuccggcuggaccgcgggcgccgccgccuacuacgugggguaccugcagccccgcaccuuccugcucaaguacaacgagaacggcaccaucacggacgcggucgacugcgcccuggacccccugagcgagaccaagugcacccucaaguccuucaccguggagaaggggaucuaccagacgagcaacuuccgggugcagcccaccgaguccaucguccgcuucccgaacaucaccaaccugugccccuucggcgagguguucaacgccacccgguucgccagcgucuacgccuggaaccgcaagcggaucuccaacugcguggcggacuacagcgugcuguacaacuccgccagcuucuccacguucaagugcuacggcgucagccccaccaagcucaacgaccugugcuucaccaacguguacgccgacuccuucgugauccgcggggacgagguccggcagaucgcccccggccagaccgggaagaucgccgacuacaacuacaagcugccggacgacuucacgggcugcgugaucgcguggaacagcaacaaccucgacuccaaggucgggggcaacuacaacuaccuguaccgccuguuccgcaagagcaaccucaagcccuucgagcgggacaucuccaccgagaucuaccaggccggcagcacccccugcaacgggguggagggcuucaacugcuacuucccccugcaguccuacggguuccagccgaccaacggcgugggguaccagcccuaccggguggucgugcugagcuucgagcuccugcacgcccccgccacggugugcggccccaagaaguccaccaaccuggucaagaacaagugcgugaacuucaacuucaacggccucaccgggaccggcgugcugaccgagagcaacaagaaguuccugccguuccagcaguucgggcgcgacaucgccgacacgaccgacgcgguccgcgacccccagacccuggagauccucgacaucacccccugcagcuucggcgggguguccgugaucacgccgggcaccaacaccagcaaccaggucgccgugcuguaccaggacgugaacugcaccgagguccccguggccauccacgccgaccagcugacgcccaccuggcggguguacuccaccggcagcaacgucuuccagacccgcgccgggugccucaucggcgcggagcacgugaacaacuccuacgagugcgacauccccaucggggccggcaucugcgccagcuaccagacgcagaccaacuccccgcggcgcgcccggagcguggcgucccagagcaucaucgccuacaccaugucccugggcgccgagaacagcgucgccuacuccaacaacagcaucgccauccccaccaacuucacgaucuccgugaccaccgagauccugcccgugagcaugaccaagacgagcgucgacugcaccauguacaucugcggggacuccaccgagugcagcaaccuccugcugcaguacggcuccuucugcacccagcucaaccgcgcgcugacggggaucgccguggagcaggacaagaacacccaggagguguucgcccaggucaagcagaucuacaagacgcccccgaucaaggacuucggcggguucaacuucagccagauccugcccgaccccuccaagcccagcaagcgguccuucaucgaggaccuccuguucaacaaggugacccuggccgacgccggcuucaucaagcaguacggcgacugccucggggacaucgcggcccgcgaccugaucugcgcccagaaguucaacggccugaccgugcucccgccccugcugaccgacgagaugaucgcccaguacaccagcgcccuccuggcggggaccaucacguccggcuggaccuucgggugcggcgccgcccugcagauccccuucgcgaugcagauggccuaccgguucaacggcaucggggucacccagaacgugcucuacgagaaccagaagcugaucgccaaccaguucaacagcgccaucggcaagauccaggacucccugagcuccaccgccagcgcgcucgggaagcugcaggacguggucaaccagaacgcccaggcccugaacacgcucgugaagcagcuguccagcaacuucggcgccaucuccagcgugcugaacgacauccucucccgccuggacaaggucgaggccgaggugcagaucgaccggcugaucaccgggcgccuccagagccugcagaccuacgugacccagcagcugauccgggcggccgagauccgcgccagcgccaaccucgccgcgaccaagauguccgagugcguccugggccagagcaagcggugcgacuucugcggcaagggguaccaccugauguccuucccccagagcgccccgcacggcguggucuuccuccacgugacguacguccccgcccaggagaagaacuucaccaccgcccccgcgaucugccacgacgggaaggcccacuucccccgcgagggcguguucguguccaacgggacccacugguucgucacgcagcggaacuucuacgagccgcagaucaucaccaccgacaacaccuucgugagcggcaacugcgacguggucaucggcaucgugaacaacacgguguacgacccccugcagcccgagcuggacuccggcggcgggagcgggggcgggcagaucuacgagggcaagcugaccgccgaggggcuccgcuucggcaucguggccagccgguucaaccacgcgcuggucgaccgccugguggagggggccaucgacgccaucgugcggcacggcgggcgcgaggaggacaucacccucguccgggugcccggcuccugggagaucccgguggccgccggcgagcuggcccgcaaggaggacaucgacgcggucaucgccaucggggugcugauccggggcgccacgccccacuucgacuacaucgccagcgagguguccaaggggcucgcggaccugagccuggagcuccgcaagcccaucaccuucggcgucaucaccgccgacacccuggagcaggccaucgagcgggccgggacgaagcacggcaacaagggcugggaggccgcgcuguccgccaucgagauggccaaccucuucaagagccugcgcugaggacuagucccuguucccagagcccacuuuuuuuucuuuuuuugaaauaaaauagccugucuuucagaucucaaaggcucuuuucagagccaccaaaaaaaaaaaaaaaaaaaaaaaaaaaaaaaaaaaaaaaaaaaaaaaaaaaaaaaaaaaaaaaaaaaaaaaaaaaaaaaaaaaaaaaaaaaaaaaaaaaaa

SEQ ID NO: 12427 - RNA, 4196 nt, Artificial Sequence
  SARS-CoV-2/Wuhan/WIV05/2019__EPI_ISL_402128 spike protein mRNA gc (1-1147)(T874C_S1055C) LumSynth construct
aggagagucccgcagucggcguccagcggcucugcuuguucgugugugugucguugcaggccuuauucaagcuuaccauguucguguuccugguccuccugccccuggugagcucccagugcgugaaccucaccacccgcacgcagcugccgcccgccuacaccaacagcuucacccggggcgucuacuaccccgacaagguguuccgcuccagcgugcugcacuccacccaggaccucuuccugcccuucuucagcaacgucacgugguuccacgccauccacguguccgggaccaacggcaccaagcgguucgacaacccggugcugcccuucaacgacggggucuacuucgcgagcaccgagaaguccaacaucauccgcggcuggaucuucgggacgacccucgacagcaagacccagucccugcugaucgugaacaacgccaccaacguggucaucaaggugugcgaguuccaguucugcaacgaccccuuccucggcguguacuaccacaagaacaacaagagcuggauggaguccgaguuccgggucuacagcuccgccaacaacugcacguucgaguacgugagccagcccuuccugauggaccuggagggcaagcaggggaacuucaagaaccuccgcgaguucguguucaagaacaucgacggcuacuucaagaucuacuccaagcacaccccgaucaaccugguccgggaccugccccagggguucagcgcccucgagccccugguggaccugcccaucggcaucaacaucacccgcuuccagacccuccuggcccugcaccgguccuaccucacgccgggggacagcagcuccggcuggaccgcgggcgccgccgccuacuacgugggguaccugcagccccgcaccuuccugcucaaguacaacgagaacggcaccaucacggacgcggucgacugcgcccuggacccccugagcgagaccaagugcacccucaaguccuucaccguggagaaggggaucuaccagacgagcaacuuccgggugcagcccaccgaguccaucguccgcuucccgaacaucaccaaccugugccccuucggcgagguguucaacgccacccgguucgccagcgucuacgccuggaaccgcaagcggaucuccaacugcguggcggacuacagcgugcuguacaacuccgccagcuucuccacguucaagugcuacggcgucagccccaccaagcucaacgaccugugcuucaccaacguguacgccgacuccuucgugauccgcggggacgagguccggcagaucgcccccggccagaccgggaagaucgccgacuacaacuacaagcugccggacgacuucacgggcugcgugaucgcguggaacagcaacaaccucgacuccaaggucgggggcaacuacaacuaccuguaccgccuguuccgcaagagcaaccucaagcccuucgagcgggacaucuccaccgagaucuaccaggccggcagcacccccugcaacgggguggagggcuucaacugcuacuucccccugcaguccuacggguuccagccgaccaacggcgugggguaccagcccuaccggguggucgugcugagcuucgagcuccugcacgcccccgccacggugugcggccccaagaaguccaccaaccuggucaagaacaagugcgugaacuucaacuucaacggccucaccgggaccggcgugcugaccgagagcaacaagaaguuccugccguuccagcaguucgggcgcgacaucgccgacacgaccgacgcgguccgcgacccccagacccuggagauccucgacaucacccccugcagcuucggcgggguguccgugaucacgccgggcaccaacaccagcaaccaggucgccgugcuguaccaggacgugaacugcaccgagguccccguggccauccacgccgaccagcugacgcccaccuggcggguguacuccaccggcagcaacgucuuccagacccgcgccgggugccucaucggcgcggagcacgugaacaacuccuacgagugcgacauccccaucggggccggcaucugcgccagcuaccagacgcagaccaacuccccgcggcgcgcccggagcguggcgucccagagcaucaucgccuacaccaugucccugggcgccgagaacagcgucgccuacuccaacaacagcaucgccauccccaccaacuucacgaucuccgugaccaccgagauccugcccgugagcaugaccaagacgagcgucgacugcaccauguacaucugcggggacuccaccgagugcagcaaccuccugcugcaguacggcuccuucugcacccagcucaaccgcgcgcugacggggaucgccguggagcaggacaagaacacccaggagguguucgcccaggucaagcagaucuacaagacgcccccgaucaaggacuucggcggguucaacuucagccagauccugcccgaccccuccaagcccagcaagcgguccuucaucgaggaccuccuguucaacaaggugacccuggccgacgccggcuucaucaagcaguacggcgacugccucggggacaucgcggcccgcgaccugaucugcgcccagaaguucaacggccugaccgugcucccgccccugcugaccgacgagaugaucgcccaguacugcagcgcccuccuggcggggaccaucacguccggcuggaccuucggggccggcgccgcccugcagauccccuucgcgaugcagauggccuaccgguucaacggcaucggggucacccagaacgugcucuacgagaaccagaagcugaucgccaaccaguucaacagcgccaucggcaagauccaggacucccugagcuccaccgccagcgcgcucgggaagcugcaggacguggucaaccagaacgcccaggcccugaacacgcucgugaagcagcuguccagcaacuucggcgccaucuccagcgugcugaacgacauccucucccgccuggacaaggucgaggccgaggugcagaucgaccggcugaucaccgggcgccuccagagccugcagaccuacgugacccagcagcugauccgggcggccgagauccgcgccagcgccaaccucgccgcgaccaagauguccgagugcguccugggccagagcaagcggguggacuucugcggcaagggguaccaccugauguccuucccccagugcgccccgcacggcguggucuuccuccacgugacguacguccccgcccaggagaagaacuucaccaccgcccccgcgaucugccacgacgggaaggcccacuucccccgcgagggcguguucguguccaacgggacccacugguucgucacgcagcggaacuucuacgagccgcagaucaucaccaccgacaacaccuucgugagcggcaacugcgacguggucaucggcaucgugaacaacacgguguacgacccccugcagcccgagcuggacuccggcggcgggagcgggggcgggcagaucuacgagggcaagcugaccgccgaggggcuccgcuucggcaucguggccagccgguucaaccacgcgcuggucgaccgccugguggagggggccaucgacgccaucgugcggcacggcgggcgcgaggaggacaucacccucguccgggugcccggcuccugggagaucccgguggccgccggcgagcuggcccgcaaggaggacaucgacgcggucaucgccaucggggugcugauccggggcgccacgccccacuucgacuacaucgccagcgagguguccaaggggcucgcggaccugagccuggagcuccgcaagcccaucaccuucggcgucaucaccgccgacacccuggagcaggccaucgagcgggccgggacgaagcacggcaacaagggcugggaggccgcgcuguccgccaucgagauggccaaccucuucaagagccugcgcugaggacuagucccuguucccagagcccacuuuuuuuucuuuuuuugaaauaaaauagccugucuuucagaucucaaaggcucuuuucagagccaccaaaaaaaaaaaaaaaaaaaaaaaaaaaaaaaaaaaaaaaaaaaaaaaaaaaaaaaaaaaaaaaaaaaaaaaaaaaaaaaaaaaaaaaaaaaaaaaaaaaaa

SEQ ID NO: 12428 - RNA, 4220 nt, Artificial Sequence
  SARS-CoV-2/Wuhan/WIV05/2019__EPI_ISL_402128 spike protein mRNA gc (1-1147) Ferritin construct
aggagagucccgcagucggcguccagcggcucugcuuguucgugugugugucguugcaggccuuauucaagcuuaccauguucguguuccugguccuccugccccuggugagcucccagugcgugaaccucaccacccgcacgcagcugccgcccgccuacaccaacagcuucacccggggcgucuacuaccccgacaagguguuccgcuccagcgugcugcacuccacccaggaccucuuccugcccuucuucagcaacgucacgugguuccacgccauccacguguccgggaccaacggcaccaagcgguucgacaacccggugcugcccuucaacgacggggucuacuucgcgagcaccgagaaguccaacaucauccgcggcuggaucuucgggacgacccucgacagcaagacccagucccugcugaucgugaacaacgccaccaacguggucaucaaggugugcgaguuccaguucugcaacgaccccuuccucggcguguacuaccacaagaacaacaagagcuggauggaguccgaguuccgggucuacagcuccgccaacaacugcacguucgaguacgugagccagcccuuccugauggaccuggagggcaagcaggggaacuucaagaaccuccgcgaguucguguucaagaacaucgacggcuacuucaagaucuacuccaagcacaccccgaucaaccugguccgggaccugccccagggguucagcgcccucgagccccugguggaccugcccaucggcaucaacaucacccgcuuccagacccuccuggcccugcaccgguccuaccucacgccgggggacagcagcuccggcuggaccgcgggcgccgccgccuacuacgugggguaccugcagccccgcaccuuccugcucaaguacaacgagaacggcaccaucacggacgcggucgacugcgcccuggacccccugagcgagaccaagugcacccucaaguccuucaccguggagaaggggaucuaccagacgagcaacuuccgggugcagcccaccgaguccaucguccgcuucccgaacaucaccaaccugugccccuucggcgagguguucaacgccacccgguucgccagcgucuacgccuggaaccgcaagcggaucuccaacugcguggcggacuacagcgugcuguacaacuccgccagcuucuccacguucaagugcuacggcgucagccccaccaagcucaacgaccugugcuucaccaacguguacgccgacuccuucgugauccgcggggacgagguccggcagaucgcccccggccagaccgggaagaucgccgacuacaacuacaagcugccggacgacuucacgggcugcgugaucgcguggaacagcaacaaccucgacuccaaggucgggggcaacuacaacuaccuguaccgccuguuccgcaagagcaaccucaagcccuucgagcgggacaucuccaccgagaucuaccaggccggcagcacccccugcaacgggguggagggcuucaacugcuacuucccccugcaguccuacggguuccagccgaccaacggcgugggguaccagcccuaccggguggucgugcugagcuucgagcuccugcacgcccccgccacggugugcggccccaagaaguccaccaaccuggucaagaacaagugcgugaacuucaacuucaacggccucaccgggaccggcgugcugaccgagagcaacaagaaguuccugccguuccagcaguucgggcgcgacaucgccgacacgaccgacgcgguccgcgacccccagacccuggagauccucgacaucacccccugcagcuucggcgggguguccgugaucacgccgggcaccaacaccagcaaccaggucgccgugcuguaccaggacgugaacugcaccgagguccccguggccauccacgccgaccagcugacgcccaccuggcggguguacuccaccggcagcaacgucuuccagacccgcgccgggugccucaucggcgcggagcacgugaacaacuccuacgagugcgacauccccaucggggccggcaucugcgccagcuaccagacgcagaccaacuccccgcggcgcgcccggagcguggcgucccagagcaucaucgccuacaccaugucccugggcgccgagaacagcgucgccuacuccaacaacagcaucgccauccccaccaacuucacgaucuccgugaccaccgagauccugcccgugagcaugaccaagacgagcgucgacugcaccauguacaucugcggggacuccaccgagugcagcaaccuccugcugcaguacggcuccuucugcacccagcucaaccgcgcgcugacggggaucgccguggagcaggacaagaacacccaggagguguucgcccaggucaagcagaucuacaagacgcccccgaucaaggacuucggcggguucaacuucagccagauccugcccgaccccuccaagcccagcaagcgguccuucaucgaggaccuccuguucaacaaggugacccuggccgacgccggcuucaucaagcaguacggcgacugccucggggacaucgcggcccgcgaccugaucugcgcccagaaguucaacggccugaccgugcucccgccccugcugaccgacgagaugaucgcccaguacaccagcgcccuccuggcggggaccaucacguccggcuggaccuucggggccggcgccgcccugcagauccccuucgcgaugcagauggccuaccgguucaacggcaucggggucacccagaacgugcucuacgagaaccagaagcugaucgccaaccaguucaacagcgccaucggcaagauccaggacucccugagcuccaccgccagcgcgcucgggaagcugcaggacguggucaaccagaacgcccaggcccugaacacgcucgugaagcagcuguccagcaacuucggcgccaucuccagcgugcugaacgacauccucucccgccuggacaaggucgaggccgaggugcagaucgaccggcugaucaccgggcgccuccagagccugcagaccuacgugacccagcagcugauccgggcggccgagauccgcgccagcgccaaccucgccgcgaccaagauguccgagugcguccugggccagagcaagcggguggacuucugcggcaagggguaccaccugauguccuucccccagagcgccccgcacggcguggucuuccuccacgugacguacguccccgcccaggagaagaacuucaccaccgcccccgcgaucugccacgacgggaaggcccacuucccccgcgagggcguguucguguccaacgggacccacugguucgucacgcagcggaacuucuacgagccgcagaucaucaccaccgacaacaccuucgugagcggcaacugcgacguggucaucggcaucgugaacaacacgguguacgacccccugcagcccgagcuggacuccggcgggggcgggagcgacaucaucaagcuccugaacgagcaggucaacaaggagaugcaguccagcaaccuguacauguccaugagcuccuggugcuacacccacagccucgacggcgccgggcuguuccuguucgaccacgccgcggaggaguacgagcacgccaagaagcucaucaucuuccugaacgagaacaacgugcccgugcagcugaccuccaucagcgccccggagcacaaguucgagggccucacgcagaucuuccagaaggccuacgagcacgagcagcacaucuccgagagcaucaacaacaucguggaccacgccaucaaguccaaggaccacgcgaccuucaacuuccugcagugguacgucgccgagcagcacgaggaggaggugcuguucaaggacauccucgacaagaucgagcugaucgggaacgagaaccacggccuguaccucgccgaccaguacgugaaggggaucgccaagagccgcaaguccugaggacuagucccuguucccagagcccacuuuuuuuucuuuuuuugaaauaaaauagccugucuuucagaucucaaaggcucuuuucagagccaccaaaaaaaaaaaaaaaaaaaaaaaaaaaaaaaaaaaaaaaaaaaaaaaaaaaaaaaaaaaaaaaaaaaaaaaaaaaaaaaaaaaaaaaaaaaaaaaaaaaaa

SEQ ID NO: 12429 - RNA, 4220 nt, Artificial Sequence
  SARS-CoV-2/Wuhan/WIV05/2019__EPI_ISL_402128 spike protein mRNA gc (1-1147)(K986P_V987P) Ferritin construct
aggagagucccgcagucggcguccagcggcucugcuuguucgugugugugucguugcaggccuuauucaagcuuaccauguucguguuccugguccuccugccccuggugagcucccagugcgugaaccucaccacccgcacgcagcugccgcccgccuacaccaacagcuucacccggggcgucuacuaccccgacaagguguuccgcuccagcgugcugcacuccacccaggaccucuuccugcccuucuucagcaacgucacgugguuccacgccauccacguguccgggaccaacggcaccaagcgguucgacaacccggugcugcccuucaacgacggggucuacuucgcgagcaccgagaaguccaacaucauccgcggcuggaucuucgggacgacccucgacagcaagacccagucccugcugaucgugaacaacgccaccaacguggucaucaaggugugcgaguuccaguucugcaacgaccccuuccucggcguguacuaccacaagaacaacaagagcuggauggaguccgaguuccgggucuacagcuccgccaacaacugcacguucgaguacgugagccagcccuuccugauggaccuggagggcaagcaggggaacuucaagaaccuccgcgaguucguguucaagaacaucgacggcuacuucaagaucuacuccaagcacaccccgaucaaccugguccgggaccugccccagggguucagcgcccucgagccccugguggaccugcccaucggcaucaacaucacccgcuuccagacccuccuggcccugcaccgguccuaccucacgccgggggacagcagcuccggcuggaccgcgggcgccgccgccuacuacgugggguaccugcagccccgcaccuuccugcucaaguacaacgagaacggcaccaucacggacgcggucgacugcgcccuggacccccugagcgagaccaagugcacccucaaguccuucaccguggagaaggggaucuaccagacgagcaacuuccgggugcagcccaccgaguccaucguccgcuucccgaacaucaccaaccugugccccuucggcgagguguucaacgccacccgguucgccagcgucuacgccuggaaccgcaagcggaucuccaacugcguggcggacuacagcgugcuguacaacuccgccagcuucuccacguucaagugcuacggcgucagccccaccaagcucaacgaccugugcuucaccaacguguacgccgacuccuucgugauccgcggggacgagguccggcagaucgcccccggccagaccgggaagaucgccgacuacaacuacaagcugccggacgacuucacgggcugcgugaucgcguggaacagcaacaaccucgacuccaaggucgggggcaacuacaacuaccuguaccgccuguuccgcaagagcaaccucaagcccuucgagcgggacaucuccaccgagaucuaccaggccggcagcacccccugcaacgggguggagggcuucaacugcuacuucccccugcaguccuacggguuccagccgaccaacggcgugggguaccagcccuaccggguggucgugcugagcuucgagcuccugcacgcccccgccacggugugcggccccaagaaguccaccaaccuggucaagaacaagugcgugaacuucaacuucaacggccucaccgggaccggcgugcugaccgagagcaacaagaaguuccugccguuccagcaguucgggcgcgacaucgccgacacgaccgacgcgguccgcgacccccagacccuggagauccucgacaucacccccugcagcuucggcgggguguccgugaucacgccgggcaccaacaccagcaaccaggucgccgugcuguaccaggacgugaacugcaccgagguccccguggccauccacgccgaccagcugacgcccaccuggcggguguacuccaccggcagcaacgucuuccagacccgcgccgggugccucaucggcgcggagcacgugaacaacuccuacgagugcgacauccccaucggggccggcaucugcgccagcuaccagacgcagaccaacuccccgcggcgcgcccggagcguggcgucccagagcaucaucgccuacaccaugucccugggcgccgagaacagcgucgccuacuccaacaacagcaucgccauccccaccaacuucacgaucuccgugaccaccgagauccugcccgugagcaugaccaagacgagcgucgacugcaccauguacaucugcggggacuccaccgagugcagcaaccuccugcugcaguacggcuccuucugcacccagcucaaccgcgcgcugacggggaucgccguggagcaggacaagaacacccaggagguguucgcccaggucaagcagaucuacaagacgcccccgaucaaggacuucggcggguucaacuucagccagauccugcccgaccccuccaagcccagcaagcgguccuucaucgaggaccuccuguucaacaaggugacccuggccgacgccggcuucaucaagcaguacggcgacugccucggggacaucgcggcccgcgaccugaucugcgcccagaaguucaacggccugaccgugcucccgccccugcugaccgacgagaugaucgcccaguacaccagcgcccuccuggcggggaccaucacguccggcuggaccuucggggccggcgccgcccugcagauccccuucgcgaugcagauggccuaccgguucaacggcaucggggucacccagaacgugcucuacgagaaccagaagcugaucgccaaccaguucaacagcgccaucggcaagauccaggacucccugagcuccaccgccagcgcgcucgggaagcugcaggacguggucaaccagaacgcccaggcccugaacacgcucgugaagcagcuguccagcaacuucggcgccaucuccagcgugcugaacgacauccucucccgccuggacccgcccgaggccgaggugcagaucgaccggcugaucaccgggcgccuccagagccugcagaccuacgugacccagcagcugauccgggcggccgagauccgcgccagcgccaaccucgccgcgaccaagauguccgagugcguccugggccagagcaagcggguggacuucugcggcaagggguaccaccugauguccuucccccagagcgccccgcacggcguggucuuccuccacgugacguacguccccgcccaggagaagaacuucaccaccgcccccgcgaucugccacgacgggaaggcccacuucccccgcgagggcguguucguguccaacgggacccacugguucgucacgcagcggaacuucuacgagccgcagaucaucaccaccgacaacaccuucgugagcggcaacugcgacguggucaucggcaucgugaacaacacgguguacgacccccugcagcccgagcuggacuccggcgggggcgggagcgacaucaucaagcuccugaacgagcaggucaacaaggagaugcaguccagcaaccuguacauguccaugagcuccuggugcuacacccacagccucgacggcgccgggcuguuccuguucgaccacgccgcggaggaguacgagcacgccaagaagcucaucaucuuccugaacgagaacaacgugcccgugcagcugaccuccaucagcgccccggagcacaaguucgagggccucacgcagaucuuccagaaggccuacgagcacgagcagcacaucuccgagagcaucaacaacaucguggaccacgccaucaaguccaaggaccacgcgaccuucaacuuccugcagugguacgucgccgagcagcacgaggaggaggugcuguucaaggacauccucgacaagaucgagcugaucgggaacgagaaccacggccuguaccucgccgaccaguacgugaaggggaucgccaagagccgcaaguccugaggacuagucccuguucccagagcccacuuuuuuuucuuuuuuugaaauaaaauagccugucuuucagaucucaaaggcucuuuucagagccaccaaaaaaaaaaaaaaaaaaaaaaaaaaaaaaaaaaaaaaaaaaaaaaaaaaaaaaaaaaaaaaaaaaaaaaaaaaaaaaaaaaaaaaaaaaaaaaaaaaaaa

SEQ ID NO: 12430 - RNA, 4220 nt, Artificial Sequence
  SARS-CoV-2/Wuhan/WIV05/2019__EPI_ISL_402128 spike protein mRNA gc (1-1147)(K986P_V987P_T887WN_A1020W) Ferritin construct
aggagagucccgcagucggcguccagcggcucugcuuguucgugugugugucguugcaggccuuauucaagcuuaccauguucguguuccugguccuccugccccuggugagcucccagugcgugaaccucaccacccgcacgcagcugccgcccgccuacaccaacagcuucacccggggcgucuacuaccccgacaagguguuccgcuccagcgugcugcacuccacccaggaccucuuccugcccuucuucagcaacgucacgugguuccacgccauccacguguccgggaccaacggcaccaagcgguucgacaacccggugcugcccuucaacgacggggucuacuucgcgagcaccgagaaguccaacaucauccgcggcuggaucuucgggacgacccucgacagcaagacccagucccugcugaucgugaacaacgccaccaacguggucaucaaggugugcgaguuccaguucugcaacgaccccuuccucggcguguacuaccacaagaacaacaagagcuggauggaguccgaguuccgggucuacagcuccgccaacaacugcacguucgaguacgugagccagcccuuccugauggaccuggagggcaagcaggggaacuucaagaaccuccgcgaguucguguucaagaacaucgacggcuacuucaagaucuacuccaagcacaccccgaucaaccugguccgggaccugccccagggguucagcgcccucgagccccugguggaccugcccaucggcaucaacaucacccgcuuccagacccuccuggcccugcaccgguccuaccucacgccgggggacagcagcuccggcuggaccgcgggcgccgccgccuacuacgugggguaccugcagccccgcaccuuccugcucaaguacaacgagaacggcaccaucacggacgcggucgacugcgcccuggacccccugagcgagaccaagugcacccucaaguccuucaccguggagaaggggaucuaccagacgagcaacuuccgggugcagcccaccgaguccaucguccgcuucccgaacaucaccaaccugugccccuucggcgagguguucaacgccacccgguucgccagcgucuacgccuggaaccgcaagcggaucuccaacugcguggcggacuacagcgugcuguacaacuccgccagcuucuccacguucaagugcuacggcgucagccccaccaagcucaacgaccugugcuucaccaacguguacgccgacuccuucgugauccgcggggacgagguccggcagaucgcccccggccagaccgggaagaucgccgacuacaacuacaagcugccggacgacuucacgggcugcgugaucgcguggaacagcaacaaccucgacuccaaggucgggggcaacuacaacuaccuguaccgccuguuccgcaagagcaaccucaagcccuucgagcgggacaucuccaccgagaucuaccaggccggcagcacccccugcaacgggguggagggcuucaacugcuacuucccccugcaguccuacggguuccagccgaccaacggcgugggguaccagcccuaccggguggucgugcugagcuucgagcuccugcacgcccccgccacggugugcggccccaagaaguccaccaaccuggucaagaacaagugcgugaacuucaacuucaacggccucaccgggaccggcgugcugaccgagagcaacaagaaguuccugccguuccagcaguucgggcgcgacaucgccgacacgaccgacgcgguccgcgacccccagacccuggagauccucgacaucacccccugcagcuucggcgggguguccgugaucacgccgggcaccaacaccagcaaccaggucgccgugcuguaccaggacgugaacugcaccgagguccccguggccauccacgccgaccagcugacgcccaccuggcggguguacuccaccggcagcaacgucuuccagacccgcgccgggugccucaucggcgcggagcacgugaacaacuccuacgagugcgacauccccaucggggccggcaucugcgccagcuaccagacgcagaccaacuccccgcggcgcgcccggagcguggcgucccagagcaucaucgccuacaccaugucccugggcgccgagaacagcgucgccuacuccaacaacagcaucgccauccccaccaacuucacgaucuccgugaccaccgagauccugcccgugagcaugaccaagacgagcgucgacugcaccauguacaucugcggggacuccaccgagugcagcaaccuccugcugcaguacggcuccuucugcacccagcucaaccgcgcgcugacggggaucgccguggagcaggacaagaacacccaggagguguucgcccaggucaagcagaucuacaagacgcccccgaucaaggacuucggcggguucaacuucagccagauccugcccgaccccuccaagcccagcaagcgguccuucaucgaggaccuccuguucaacaaggugacccuggccgacgccggcuucaucaagcaguacggcgacugccucggggacaucgcggcccgcgaccugaucugcgcccagaaguucaacggccugaccgugcucccgccccugcugaccgacgagaugaucgcccaguacaccagcgcccuccuggcggggaccaucacguccggcuggugguucggggccggcgccgcccugcagauccccuucgcgaugcagauggccuaccgguucaacggcaucggggucacccagaacgugcucuacgagaaccagaagcugaucgccaaccaguucaacagcgccaucggcaagauccaggacucccugagcuccaccgccagcgcgcucgggaagcugcaggacguggucaaccagaacgcccaggcccugaacacgcucgugaagcagcuguccagcaacuucggcgccaucuccagcgugcugaacgacauccucucccgccuggacccgcccgaggccgaggugcagaucgaccggcugaucaccgggcgccuccagagccugcagaccuacgugacccagcagcugauccgggcggccgagauccgcuggagcgccaaccucgccgcgaccaagauguccgagugcguccugggccagagcaagcggguggacuucugcggcaagggguaccaccugauguccuucccccagagcgccccgcacggcguggucuuccuccacgugacguacguccccgcccaggagaagaacuucaccaccgcccccgcgaucugccacgacgggaaggcccacuucccccgcgagggcguguucguguccaacgggacccacugguucgucacgcagcggaacuucuacgagccgcagaucaucaccaccgacaacaccuucgugagcggcaacugcgacguggucaucggcaucgugaacaacacgguguacgacccccugcagcccgagcuggacuccggcgggggcgggagcgacaucaucaagcuccugaacgagcaggucaacaaggagaugcaguccagcaaccuguacauguccaugagcuccuggugcuacacccacagccucgacggcgccgggcuguuccuguucgaccacgccgcggaggaguacgagcacgccaagaagcucaucaucuuccugaacgagaacaacgugcccgugcagcugaccuccaucagcgccccggagcacaaguucgagggccucacgcagaucuuccagaaggccuacgagcacgagcagcacaucuccgagagcaucaacaacaucguggaccacgccaucaaguccaaggaccacgcgaccuucaacuuccugcagugguacgucgccgagcagcacgaggaggaggugcuguucaaggacauccucgacaagaucgagcugaucgggaacgagaaccacggccuguaccucgccgaccaguacgugaaggggaucgccaagagccgcaaguccugaggacuagucccuguucccagagcccacuuuuuuuucuuuuuuugaaauaaaauagccugucuuucagaucucaaaggcucuuuucagagccaccaaaaaaaaaaaaaaaaaaaaaaaaaaaaaaaaaaaaaaaaaaaaaaaaaaaaaaaaaaaaaaaaaaaaaaaaaaaaaaaaaaaaaaaaaaaaaaaaaaaaa

SEQ ID NO: 12431 - RNA, 4220 nt, Artificial Sequence
  SARS-CoV-2/Wuhan/WIV05/2019__EPI_ISL_402128 spike protein mRNA gc (1-1147)(K986P_V987P_P1069F) Ferritin construct
aggagagucccgcagucggcguccagcggcucugcuuguucgugugugugucguugcaggccuuauucaagcuuaccauguucguguuccugguccuccugccccuggugagcucccagugcgugaaccucaccacccgcacgcagcugccgcccgccuacaccaacagcuucacccggggcgucuacuaccccgacaagguguuccgcuccagcgugcugcacuccacccaggaccucuuccugcccuucuucagcaacgucacgugguuccacgccauccacguguccgggaccaacggcaccaagcgguucgacaacccggugcugcccuucaacgacggggucuacuucgcgagcaccgagaaguccaacaucauccgcggcuggaucuucgggacgacccucgacagcaagacccagucccugcugaucgugaacaacgccaccaacguggucaucaaggugugcgaguuccaguucugcaacgaccccuuccucggcguguacuaccacaagaacaacaagagcuggauggaguccgaguuccgggucuacagcuccgccaacaacugcacguucgaguacgugagccagcccuuccugauggaccuggagggcaagcaggggaacuucaagaaccuccgcgaguucguguucaagaacaucgacggcuacuucaagaucuacuccaagcacaccccgaucaaccugguccgggaccugccccagggguucagcgcccucgagccccugguggaccugcccaucggcaucaacaucacccgcuuccagacccuccuggcccugcaccgguccuaccucacgccgggggacagcagcuccggcuggaccgcgggcgccgccgccuacuacgugggguaccugcagccccgcaccuuccugcucaaguacaacgagaacggcaccaucacggacgcggucgacugcgcccuggacccccugagcgagaccaagugcacccucaaguccuucaccguggagaaggggaucuaccagacgagcaacuuccgggugcagcccaccgaguccaucguccgcuucccgaacaucaccaaccugugccccuucggcgagguguucaacgccacccgguucgccagcgucuacgccuggaaccgcaagcggaucuccaacugcguggcggacuacagcgugcuguacaacuccgccagcuucuccacguucaagugcuacggcgucagccccaccaagcucaacgaccugugcuucaccaacguguacgccgacuccuucgugauccgcggggacgagguccggcagaucgcccccggccagaccgggaagaucgccgacuacaacuacaagcugccggacgacuucacgggcugcgugaucgcguggaacagcaacaaccucgacuccaaggucgggggcaacuacaacuaccuguaccgccuguuccgcaagagcaaccucaagcccuucgagcgggacaucuccaccgagaucuaccaggccggcagcacccccugcaacgggguggagggcuucaacugcuacuucccccugcaguccuacggguuccagccgaccaacggcgugggguaccagcccuaccggguggucgugcugagcuucgagcuccugcacgcccccgccacggugugcggccccaagaaguccaccaaccuggucaagaacaagugcgugaacuucaacuucaacggccucaccgggaccggcgugcugaccgagagcaacaagaaguuccugccguuccagcaguucgggcgcgacaucgccgacacgaccgacgcgguccgcgacccccagacccuggagauccucgacaucacccccugcagcuucggcgggguguccgugaucacgccgggcaccaacaccagcaaccaggucgccgugcuguaccaggacgugaacugcaccgagguccccguggccauccacgccgaccagcugacgcccaccuggcggguguacuccaccggcagcaacgucuuccagacccgcgccgggugccucaucggcgcggagcacgugaacaacuccuacgagugcgacauccccaucggggccggcaucugcgccagcuaccagacgcagaccaacuccccgcggcgcgcccggagcguggcgucccagagcaucaucgccuacaccaugucccugggcgccgagaacagcgucgccuacuccaacaacagcaucgccauccccaccaacuucacgaucuccgugaccaccgagauccugcccgugagcaugaccaagacgagcgucgacugcaccauguacaucugcggggacuccaccgagugcagcaaccuccugcugcaguacggcuccuucugcacccagcucaaccgcgcgcugacggggaucgccguggagcaggacaagaacacccaggagguguucgcccaggucaagcagaucuacaagacgcccccgaucaaggacuucggcggguucaacuucagccagauccugcccgaccccuccaagcccagcaagcgguccuucaucgaggaccuccuguucaacaaggugacccuggccgacgccggcuucaucaagcaguacggcgacugccucggggacaucgcggcccgcgaccugaucugcgcccagaaguucaacggccugaccgugcucccgccccugcugaccgacgagaugaucgcccaguacaccagcgcccuccuggcggggaccaucacguccggcuggaccuucggggccggcgccgcccugcagauccccuucgcgaugcagauggccuaccgguucaacggcaucggggucacccagaacgugcucuacgagaaccagaagcugaucgccaaccaguucaacagcgccaucggcaagauccaggacucccugagcuccaccgccagcgcgcucgggaagcugcaggacguggucaaccagaacgcccaggcccugaacacgcucgugaagcagcuguccagcaacuucggcgccaucuccagcgugcugaacgacauccucucccgccuggacccgcccgaggccgaggugcagaucgaccggcugaucaccgggcgccuccagagccugcagaccuacgugacccagcagcugauccgggcggccgagauccgcgccagcgccaaccucgccgcgaccaagauguccgagugcguccugggccagagcaagcggguggacuucugcggcaagggguaccaccugauguccuucccccagagcgccccgcacggcguggucuuccuccacgugacguacgucuucgcccaggagaagaacuucaccaccgcccccgcgaucugccacgacgggaaggcccacuucccccgcgagggcguguucguguccaacgggacccacugguucgucacgcagcggaacuucuacgagccgcagaucaucaccaccgacaacaccuucgugagcggcaacugcgacguggucaucggcaucgugaacaacacgguguacgacccccugcagcccgagcuggacuccggcgggggcgggagcgacaucaucaagcuccugaacgagcaggucaacaaggagaugcaguccagcaaccuguacauguccaugagcuccuggugcuacacccacagccucgacggcgccgggcuguuccuguucgaccacgccgcggaggaguacgagcacgccaagaagcucaucaucuuccugaacgagaacaacgugcccgugcagcugaccuccaucagcgccccggagcacaaguucgagggccucacgcagaucuuccagaaggccuacgagcacgagcagcacaucuccgagagcaucaacaacaucguggaccacgccaucaaguccaaggaccacgcgaccuucaacuuccugcagugguacgucgccgagcagcacgaggaggaggugcuguucaaggacauccucgacaagaucgagcugaucgggaacgagaaccacggccuguaccucgccgaccaguacgugaaggggaucgccaagagccgcaaguccugaggacuagucccuguucccagagcccacuuuuuuuucuuuuuuugaaauaaaauagccugucuuucagaucucaaaggcucuuuucagagccaccaaaaaaaaaaaaaaaaaaaaaaaaaaaaaaaaaaaaaaaaaaaaaaaaaaaaaaaaaaaaaaaaaaaaaaaaaaaaaaaaaaaaaaaaaaaaaaaaaaaaa

SEQ ID NO: 12432 - RNA, 4220 nt, Artificial Sequence
  SARS-CoV-2/Wuhan/WIV05/2019__EPI_ISL_402128 spike protein mRNA gc (1-1147)(K986P_V987P_ H1048Q_H1064N_ H1083N_H1101N) Ferritin construct
aggagagucccgcagucggcguccagcggcucugcuuguucgugugugugucguugcaggccuuauucaagcuuaccauguucguguuccugguccuccugccccuggugagcucccagugcgugaaccucaccacccgcacgcagcugccgcccgccuacaccaacagcuucacccggggcgucuacuaccccgacaagguguuccgcuccagcgugcugcacuccacccaggaccucuuccugcccuucuucagcaacgucacgugguuccacgccauccacguguccgggaccaacggcaccaagcgguucgacaacccggugcugcccuucaacgacggggucuacuucgcgagcaccgagaaguccaacaucauccgcggcuggaucuucgggacgacccucgacagcaagacccagucccugcugaucgugaacaacgccaccaacguggucaucaaggugugcgaguuccaguucugcaacgaccccuuccucggcguguacuaccacaagaacaacaagagcuggauggaguccgaguuccgggucuacagcuccgccaacaacugcacguucgaguacgugagccagcccuuccugauggaccuggagggcaagcaggggaacuucaagaaccuccgcgaguucguguucaagaacaucgacggcuacuucaagaucuacuccaagcacaccccgaucaaccugguccgggaccugccccagggguucagcgcccucgagccccugguggaccugcccaucggcaucaacaucacccgcuuccagacccuccuggcccugcaccgguccuaccucacgccgggggacagcagcuccggcuggaccgcgggcgccgccgccuacuacgugggguaccugcagccccgcaccuuccugcucaaguacaacgagaacggcaccaucacggacgcggucgacugcgcccuggacccccugagcgagaccaagugcacccucaaguccuucaccguggagaaggggaucuaccagacgagcaacuuccgggugcagcccaccgaguccaucguccgcuucccgaacaucaccaaccugugccccuucggcgagguguucaacgccacccgguucgccagcgucuacgccuggaaccgcaagcggaucuccaacugcguggcggacuacagcgugcuguacaacuccgccagcuucuccacguucaagugcuacggcgucagccccaccaagcucaacgaccugugcuucaccaacguguacgccgacuccuucgugauccgcggggacgagguccggcagaucgcccccggccagaccgggaagaucgccgacuacaacuacaagcugccggacgacuucacgggcugcgugaucgcguggaacagcaacaaccucgacuccaaggucgggggcaacuacaacuaccuguaccgccuguuccgcaagagcaaccucaagcccuucgagcgggacaucuccaccgagaucuaccaggccggcagcacccccugcaacgggguggagggcuucaacugcuacuucccccugcaguccuacggguuccagccgaccaacggcgugggguaccagcccuaccggguggucgugcugagcuucgagcuccugcacgcccccgccacggugugcggccccaagaaguccaccaaccuggucaagaacaagugcgugaacuucaacuucaacggccucaccgggaccggcgugcugaccgagagcaacaagaaguuccugccguuccagcaguucgggcgcgacaucgccgacacgaccgacgcgguccgcgacccccagacccuggagauccucgacaucacccccugcagcuucggcgggguguccgugaucacgccgggcaccaacaccagcaaccaggucgccgugcuguaccaggacgugaacugcaccgagguccccguggccauccacgccgaccagcugacgcccaccuggcggguguacuccaccggcagcaacgucuuccagacccgcgccgggugccucaucggcgcggagcacgugaacaacuccuacgagugcgacauccccaucggggccggcaucugcgccagcuaccagacgcagaccaacuccccgcggcgcgcccggagcguggcgucccagagcaucaucgccuacaccaugucccugggcgccgagaacagcgucgccuacuccaacaacagcaucgccauccccaccaacuucacgaucuccgugaccaccgagauccugcccgugagcaugaccaagacgagcgucgacugcaccauguacaucugcggggacuccaccgagugcagcaaccuccugcugcaguacggcuccuucugcacccagcucaaccgcgcgcugacggggaucgccguggagcaggacaagaacacccaggagguguucgcccaggucaagcagaucuacaagacgcccccgaucaaggacuucggcggguucaacuucagccagauccugcccgaccccuccaagcccagcaagcgguccuucaucgaggaccuccuguucaacaaggugacccuggccgacgccggcuucaucaagcaguacggcgacugccucggggacaucgcggcccgcgaccugaucugcgcccagaaguucaacggccugaccgugcucccgccccugcugaccgacgagaugaucgcccaguacaccagcgcccuccuggcggggaccaucacguccggcuggaccuucggggccggcgccgcccugcagauccccuucgcgaugcagauggccuaccgguucaacggcaucggggucacccagaacgugcucuacgagaaccagaagcugaucgccaaccaguucaacagcgccaucggcaagauccaggacucccugagcuccaccgccagcgcgcucgggaagcugcaggacguggucaaccagaacgcccaggcccugaacacgcucgugaagcagcuguccagcaacuucggcgccaucuccagcgugcugaacgacauccucucccgccuggacccgcccgaggccgaggugcagaucgaccggcugaucaccgggcgccuccagagccugcagaccuacgugacccagcagcugauccgggcggccgagauccgcgccagcgccaaccucgccgcgaccaagauguccgagugcguccugggccagagcaagcggguggacuucugcggcaagggguaccagcugauguccuucccccagagcgccccgcacggcguggucuuccucaacgugacguacguccccgcccaggagaagaacuucaccaccgcccccgcgaucugcaacgacgggaaggcccacuucccccgcgagggcguguucguguccaacgggaccaacugguucgucacgcagcggaacuucuacgagccgcagaucaucaccaccgacaacaccuucgugagcggcaacugcgacguggucaucggcaucgugaacaacacgguguacgacccccugcagcccgagcuggacuccggcgggggcgggagcgacaucaucaagcuccugaacgagcaggucaacaaggagaugcaguccagcaaccuguacauguccaugagcuccuggugcuacacccacagccucgacggcgccgggcuguuccuguucgaccacgccgcggaggaguacgagcacgccaagaagcucaucaucuuccugaacgagaacaacgugcccgugcagcugaccuccaucagcgccccggagcacaaguucgagggccucacgcagaucuuccagaaggccuacgagcacgagcagcacaucuccgagagcaucaacaacaucguggaccacgccaucaaguccaaggaccacgcgaccuucaacuuccugcagugguacgucgccgagcagcacgaggaggaggugcuguucaaggacauccucgacaagaucgagcugaucgggaacgagaaccacggccuguaccucgccgaccaguacgugaaggggaucgccaagagccgcaaguccugaggacuagucccuguucccagagcccacuuuuuuuucuuuuuuugaaauaaaauagccugucuuucagaucucaaaggcucuuuucagagccaccaaaaaaaaaaaaaaaaaaaaaaaaaaaaaaaaaaaaaaaaaaaaaaaaaaaaaaaaaaaaaaaaaaaaaaaaaaaaaaaaaaaaaaaaaaaaaaaaaaaaa

SEQ ID NO: 12433 - RNA, 4220 nt, Artificial Sequence
  SARS-CoV-2/Wuhan/WIV05/2019__EPI_ISL_402128 spike protein mRNA gc (1-1147)(I712C_T1077C) Ferritin construct
aggagagucccgcagucggcguccagcggcucugcuuguucgugugugugucguugcaggccuuauucaagcuuaccauguucguguuccugguccuccugccccuggugagcucccagugcgugaaccucaccacccgcacgcagcugccgcccgccuacaccaacagcuucacccggggcgucuacuaccccgacaagguguuccgcuccagcgugcugcacuccacccaggaccucuuccugcccuucuucagcaacgucacgugguuccacgccauccacguguccgggaccaacggcaccaagcgguucgacaacccggugcugcccuucaacgacggggucuacuucgcgagcaccgagaaguccaacaucauccgcggcuggaucuucgggacgacccucgacagcaagacccagucccugcugaucgugaacaacgccaccaacguggucaucaaggugugcgaguuccaguucugcaacgaccccuuccucggcguguacuaccacaagaacaacaagagcuggauggaguccgaguuccgggucuacagcuccgccaacaacugcacguucgaguacgugagccagcccuuccugauggaccuggagggcaagcaggggaacuucaagaaccuccgcgaguucguguucaagaacaucgacggcuacuucaagaucuacuccaagcacaccccgaucaaccugguccgggaccugccccagggguucagcgcccucgagccccugguggaccugcccaucggcaucaacaucacccgcuuccagacccuccuggcccugcaccgguccuaccucacgccgggggacagcagcuccggcuggaccgcgggcgccgccgccuacuacgugggguaccugcagccccgcaccuuccugcucaaguacaacgagaacggcaccaucacggacgcggucgacugcgcccuggacccccugagcgagaccaagugcacccucaaguccuucaccguggagaaggggaucuaccagacgagcaacuuccgggugcagcccaccgaguccaucguccgcuucccgaacaucaccaaccugugccccuucggcgagguguucaacgccacccgguucgccagcgucuacgccuggaaccgcaagcggaucuccaacugcguggcggacuacagcgugcuguacaacuccgccagcuucuccacguucaagugcuacggcgucagccccaccaagcucaacgaccugugcuucaccaacguguacgccgacuccuucgugauccgcggggacgagguccggcagaucgcccccggccagaccgggaagaucgccgacuacaacuacaagcugccggacgacuucacgggcugcgugaucgcguggaacagcaacaaccucgacuccaaggucgggggcaacuacaacuaccuguaccgccuguuccgcaagagcaaccucaagcccuucgagcgggacaucuccaccgagaucuaccaggccggcagcacccccugcaacgggguggagggcuucaacugcuacuucccccugcaguccuacggguuccagccgaccaacggcgugggguaccagcccuaccggguggucgugcugagcuucgagcuccugcacgcccccgccacggugugcggccccaagaaguccaccaaccuggucaagaacaagugcgugaacuucaacuucaacggccucaccgggaccggcgugcugaccgagagcaacaagaaguuccugccguuccagcaguucgggcgcgacaucgccgacacgaccgacgcgguccgcgacccccagacccuggagauccucgacaucacccccugcagcuucggcgggguguccgugaucacgccgggcaccaacaccagcaaccaggucgccgugcuguaccaggacgugaacugcaccgagguccccguggccauccacgccgaccagcugacgcccaccuggcggguguacuccaccggcagcaacgucuuccagacccgcgccgggugccucaucggcgcggagcacgugaacaacuccuacgagugcgacauccccaucggggccggcaucugcgccagcuaccagacgcagaccaacuccccgcggcgcgcccggagcguggcgucccagagcaucaucgccuacaccaugucccugggcgccgagaacagcgucgccuacuccaacaacagcugcgccauccccaccaacuucacgaucuccgugaccaccgagauccugcccgugagcaugaccaagacgagcgucgacugcaccauguacaucugcggggacuccaccgagugcagcaaccuccugcugcaguacggcuccuucugcacccagcucaaccgcgcgcugacggggaucgccguggagcaggacaagaacacccaggagguguucgcccaggucaagcagaucuacaagacgcccccgaucaaggacuucggcggguucaacuucagccagauccugcccgaccccuccaagcccagcaagcgguccuucaucgaggaccuccuguucaacaaggugacccuggccgacgccggcuucaucaagcaguacggcgacugccucggggacaucgcggcccgcgaccugaucugcgcccagaaguucaacggccugaccgugcucccgccccugcugaccgacgagaugaucgcccaguacaccagcgcccuccuggcggggaccaucacguccggcuggaccuucggggccggcgccgcccugcagauccccuucgcgaugcagauggccuaccgguucaacggcaucggggucacccagaacgugcucuacgagaaccagaagcugaucgccaaccaguucaacagcgccaucggcaagauccaggacucccugagcuccaccgccagcgcgcucgggaagcugcaggacguggucaaccagaacgcccaggcccugaacacgcucgugaagcagcuguccagcaacuucggcgccaucuccagcgugcugaacgacauccucucccgccuggacaaggucgaggccgaggugcagaucgaccggcugaucaccgggcgccuccagagccugcagaccuacgugacccagcagcugauccgggcggccgagauccgcgccagcgccaaccucgccgcgaccaagauguccgagugcguccugggccagagcaagcggguggacuucugcggcaagggguaccaccugauguccuucccccagagcgccccgcacggcguggucuuccuccacgugacguacguccccgcccaggagaagaacuucaccugcgcccccgcgaucugccacgacgggaaggcccacuucccccgcgagggcguguucguguccaacgggacccacugguucgucacgcagcggaacuucuacgagccgcagaucaucaccaccgacaacaccuucgugagcggcaacugcgacguggucaucggcaucgugaacaacacgguguacgacccccugcagcccgagcuggacuccggcgggggcgggagcgacaucaucaagcuccugaacgagcaggucaacaaggagaugcaguccagcaaccuguacauguccaugagcuccuggugcuacacccacagccucgacggcgccgggcuguuccuguucgaccacgccgcggaggaguacgagcacgccaagaagcucaucaucuuccugaacgagaacaacgugcccgugcagcugaccuccaucagcgccccggagcacaaguucgagggccucacgcagaucuuccagaaggccuacgagcacgagcagcacaucuccgagagcaucaacaacaucguggaccacgccaucaaguccaaggaccacgcgaccuucaacuuccugcagugguacgucgccgagcagcacgaggaggaggugcuguucaaggacauccucgacaagaucgagcugaucgggaacgagaaccacggccuguaccucgccgaccaguacgugaaggggaucgccaagagccgcaaguccugaggacuagucccuguucccagagcccacuuuuuuuucuuuuuuugaaauaaaauagccugucuuucagaucucaaaggcucuuuucagagccaccaaaaaaaaaaaaaaaaaaaaaaaaaaaaaaaaaaaaaaaaaaaaaaaaaaaaaaaaaaaaaaaaaaaaaaaaaaaaaaaaaaaaaaaaaaaaaaaaaaaaa

SEQ ID NO: 12434 - RNA, 4220 nt, Artificial Sequence
  SARS-CoV-2/Wuhan/WIV05/2019__EPI_ISL_402128 spike protein mRNA gc (1-1147)(I714C_Y1110C) Ferritin construct
aggagagucccgcagucggcguccagcggcucugcuuguucgugugugugucguugcaggccuuauucaagcuuaccauguucguguuccugguccuccugccccuggugagcucccagugcgugaaccucaccacccgcacgcagcugccgcccgccuacaccaacagcuucacccggggcgucuacuaccccgacaagguguuccgcuccagcgugcugcacuccacccaggaccucuuccugcccuucuucagcaacgucacgugguuccacgccauccacguguccgggaccaacggcaccaagcgguucgacaacccggugcugcccuucaacgacggggucuacuucgcgagcaccgagaaguccaacaucauccgcggcuggaucuucgggacgacccucgacagcaagacccagucccugcugaucgugaacaacgccaccaacguggucaucaaggugugcgaguuccaguucugcaacgaccccuuccucggcguguacuaccacaagaacaacaagagcuggauggaguccgaguuccgggucuacagcuccgccaacaacugcacguucgaguacgugagccagcccuuccugauggaccuggagggcaagcaggggaacuucaagaaccuccgcgaguucguguucaagaacaucgacggcuacuucaagaucuacuccaagcacaccccgaucaaccugguccgggaccugccccagggguucagcgcccucgagccccugguggaccugcccaucggcaucaacaucacccgcuuccagacccuccuggcccugcaccgguccuaccucacgccgggggacagcagcuccggcuggaccgcgggcgccgccgccuacuacgugggguaccugcagccccgcaccuuccugcucaaguacaacgagaacggcaccaucacggacgcggucgacugcgcccuggacccccugagcgagaccaagugcacccucaaguccuucaccguggagaaggggaucuaccagacgagcaacuuccgggugcagcccaccgaguccaucguccgcuucccgaacaucaccaaccugugccccuucggcgagguguucaacgccacccgguucgccagcgucuacgccuggaaccgcaagcggaucuccaacugcguggcggacuacagcgugcuguacaacuccgccagcuucuccacguucaagugcuacggcgucagccccaccaagcucaacgaccugugcuucaccaacguguacgccgacuccuucgugauccgcggggacgagguccggcagaucgcccccggccagaccgggaagaucgccgacuacaacuacaagcugccggacgacuucacgggcugcgugaucgcguggaacagcaacaaccucgacuccaaggucgggggcaacuacaacuaccuguaccgccuguuccgcaagagcaaccucaagcccuucgagcgggacaucuccaccgagaucuaccaggccggcagcacccccugcaacgggguggagggcuucaacugcuacuucccccugcaguccuacggguuccagccgaccaacggcgugggguaccagcccuaccggguggucgugcugagcuucgagcuccugcacgcccccgccacggugugcggccccaagaaguccaccaaccuggucaagaacaagugcgugaacuucaacuucaacggccucaccgggaccggcgugcugaccgagagcaacaagaaguuccugccguuccagcaguucgggcgcgacaucgccgacacgaccgacgcgguccgcgacccccagacccuggagauccucgacaucacccccugcagcuucggcgggguguccgugaucacgccgggcaccaacaccagcaaccaggucgccgugcuguaccaggacgugaacugcaccgagguccccguggccauccacgccgaccagcugacgcccaccuggcggguguacuccaccggcagcaacgucuuccagacccgcgccgggugccucaucggcgcggagcacgugaacaacuccuacgagugcgacauccccaucggggccggcaucugcgccagcuaccagacgcagaccaacuccccgcggcgcgcccggagcguggcgucccagagcaucaucgccuacaccaugucccugggcgccgagaacagcgucgccuacuccaacaacagcaucgccugccccaccaacuucacgaucuccgugaccaccgagauccugcccgugagcaugaccaagacgagcgucgacugcaccauguacaucugcggggacuccaccgagugcagcaaccuccugcugcaguacggcuccuucugcacccagcucaaccgcgcgcugacggggaucgccguggagcaggacaagaacacccaggagguguucgcccaggucaagcagaucuacaagacgcccccgaucaaggacuucggcggguucaacuucagccagauccugcccgaccccuccaagcccagcaagcgguccuucaucgaggaccuccuguucaacaaggugacccuggccgacgccggcuucaucaagcaguacggcgacugccucggggacaucgcggcccgcgaccugaucugcgcccagaaguucaacggccugaccgugcucccgccccugcugaccgacgagaugaucgcccaguacaccagcgcccuccuggcggggaccaucacguccggcuggaccuucggggccggcgccgcccugcagauccccuucgcgaugcagauggccuaccgguucaacggcaucggggucacccagaacgugcucuacgagaaccagaagcugaucgccaaccaguucaacagcgccaucggcaagauccaggacucccugagcuccaccgccagcgcgcucgggaagcugcaggacguggucaaccagaacgcccaggcccugaacacgcucgugaagcagcuguccagcaacuucggcgccaucuccagcgugcugaacgacauccucucccgccuggacaaggucgaggccgaggugcagaucgaccggcugaucaccgggcgccuccagagccugcagaccuacgugacccagcagcugauccgggcggccgagauccgcgccagcgccaaccucgccgcgaccaagauguccgagugcguccugggccagagcaagcggguggacuucugcggcaagggguaccaccugauguccuucccccagagcgccccgcacggcguggucuuccuccacgugacguacguccccgcccaggagaagaacuucaccaccgcccccgcgaucugccacgacgggaaggcccacuucccccgcgagggcguguucguguccaacgggacccacugguucgucacgcagcggaacuucugcgagccgcagaucaucaccaccgacaacaccuucgugagcggcaacugcgacguggucaucggcaucgugaacaacacgguguacgacccccugcagcccgagcuggacuccggcgggggcgggagcgacaucaucaagcuccugaacgagcaggucaacaaggagaugcaguccagcaaccuguacauguccaugagcuccuggugcuacacccacagccucgacggcgccgggcuguuccuguucgaccacgccgcggaggaguacgagcacgccaagaagcucaucaucuuccugaacgagaacaacgugcccgugcagcugaccuccaucagcgccccggagcacaaguucgagggccucacgcagaucuuccagaaggccuacgagcacgagcagcacaucuccgagagcaucaacaacaucguggaccacgccaucaaguccaaggaccacgcgaccuucaacuuccugcagugguacgucgccgagcagcacgaggaggaggugcuguucaaggacauccucgacaagaucgagcugaucgggaacgagaaccacggccuguaccucgccgaccaguacgugaaggggaucgccaagagccgcaaguccugaggacuagucccuguucccagagcccacuuuuuuuucuuuuuuugaaauaaaauagccugucuuucagaucucaaaggcucuuuucagagccaccaaaaaaaaaaaaaaaaaaaaaaaaaaaaaaaaaaaaaaaaaaaaaaaaaaaaaaaaaaaaaaaaaaaaaaaaaaaaaaaaaaaaaaaaaaaaaaaaaaaaa

SEQ ID NO: 12435 - RNA, 4220 nt, Artificial Sequence
  SARS-CoV-2/Wuhan/WIV05/2019__EPI_ISL_402128 spike protein mRNA gc (1-1147)(P715C_P1069C) Ferritin construct
aggagagucccgcagucggcguccagcggcucugcuuguucgugugugugucguugcaggccuuauucaagcuuaccauguucguguuccugguccuccugccccuggugagcucccagugcgugaaccucaccacccgcacgcagcugccgcccgccuacaccaacagcuucacccggggcgucuacuaccccgacaagguguuccgcuccagcgugcugcacuccacccaggaccucuuccugcccuucuucagcaacgucacgugguuccacgccauccacguguccgggaccaacggcaccaagcgguucgacaacccggugcugcccuucaacgacggggucuacuucgcgagcaccgagaaguccaacaucauccgcggcuggaucuucgggacgacccucgacagcaagacccagucccugcugaucgugaacaacgccaccaacguggucaucaaggugugcgaguuccaguucugcaacgaccccuuccucggcguguacuaccacaagaacaacaagagcuggauggaguccgaguuccgggucuacagcuccgccaacaacugcacguucgaguacgugagccagcccuuccugauggaccuggagggcaagcaggggaacuucaagaaccuccgcgaguucguguucaagaacaucgacggcuacuucaagaucuacuccaagcacaccccgaucaaccugguccgggaccugccccagggguucagcgcccucgagccccugguggaccugcccaucggcaucaacaucacccgcuuccagacccuccuggcccugcaccgguccuaccucacgccgggggacagcagcuccggcuggaccgcgggcgccgccgccuacuacgugggguaccugcagccccgcaccuuccugcucaaguacaacgagaacggcaccaucacggacgcggucgacugcgcccuggacccccugagcgagaccaagugcacccucaaguccuucaccguggagaaggggaucuaccagacgagcaacuuccgggugcagcccaccgaguccaucguccgcuucccgaacaucaccaaccugugccccuucggcgagguguucaacgccacccgguucgccagcgucuacgccuggaaccgcaagcggaucuccaacugcguggcggacuacagcgugcuguacaacuccgccagcuucuccacguucaagugcuacggcgucagccccaccaagcucaacgaccugugcuucaccaacguguacgccgacuccuucgugauccgcggggacgagguccggcagaucgcccccggccagaccgggaagaucgccgacuacaacuacaagcugccggacgacuucacgggcugcgugaucgcguggaacagcaacaaccucgacuccaaggucgggggcaacuacaacuaccuguaccgccuguuccgcaagagcaaccucaagcccuucgagcgggacaucuccaccgagaucuaccaggccggcagcacccccugcaacgggguggagggcuucaacugcuacuucccccugcaguccuacggguuccagccgaccaacggcgugggguaccagcccuaccggguggucgugcugagcuucgagcuccugcacgcccccgccacggugugcggccccaagaaguccaccaaccuggucaagaacaagugcgugaacuucaacuucaacggccucaccgggaccggcgugcugaccgagagcaacaagaaguuccugccguuccagcaguucgggcgcgacaucgccgacacgaccgacgcgguccgcgacccccagacccuggagauccucgacaucacccccugcagcuucggcgggguguccgugaucacgccgggcaccaacaccagcaaccaggucgccgugcuguaccaggacgugaacugcaccgagguccccguggccauccacgccgaccagcugacgcccaccuggcggguguacuccaccggcagcaacgucuuccagacccgcgccgggugccucaucggcgcggagcacgugaacaacuccuacgagugcgacauccccaucggggccggcaucugcgccagcuaccagacgcagaccaacuccccgcggcgcgcccggagcguggcgucccagagcaucaucgccuacaccaugucccugggcgccgagaacagcgucgccuacuccaacaacagcaucgccaucugcaccaacuucacgaucuccgugaccaccgagauccugcccgugagcaugaccaagacgagcgucgacugcaccauguacaucugcggggacuccaccgagugcagcaaccuccugcugcaguacggcuccuucugcacccagcucaaccgcgcgcugacggggaucgccguggagcaggacaagaacacccaggagguguucgcccaggucaagcagaucuacaagacgcccccgaucaaggacuucggcggguucaacuucagccagauccugcccgaccccuccaagcccagcaagcgguccuucaucgaggaccuccuguucaacaaggugacccuggccgacgccggcuucaucaagcaguacggcgacugccucggggacaucgcggcccgcgaccugaucugcgcccagaaguucaacggccugaccgugcucccgccccugcugaccgacgagaugaucgcccaguacaccagcgcccuccuggcggggaccaucacguccggcuggaccuucggggccggcgccgcccugcagauccccuucgcgaugcagauggccuaccgguucaacggcaucggggucacccagaacgugcucuacgagaaccagaagcugaucgccaaccaguucaacagcgccaucggcaagauccaggacucccugagcuccaccgccagcgcgcucgggaagcugcaggacguggucaaccagaacgcccaggcccugaacacgcucgugaagcagcuguccagcaacuucggcgccaucuccagcgugcugaacgacauccucucccgccuggacaaggucgaggccgaggugcagaucgaccggcugaucaccgggcgccuccagagccugcagaccuacgugacccagcagcugauccgggcggccgagauccgcgccagcgccaaccucgccgcgaccaagauguccgagugcguccugggccagagcaagcggguggacuucugcggcaagggguaccaccugauguccuucccccagagcgccccgcacggcguggucuuccuccacgugacguacgucugcgcccaggagaagaacuucaccaccgcccccgcgaucugccacgacgggaaggcccacuucccccgcgagggcguguucguguccaacgggacccacugguucgucacgcagcggaacuucuacgagccgcagaucaucaccaccgacaacaccuucgugagcggcaacugcgacguggucaucggcaucgugaacaacacgguguacgacccccugcagcccgagcuggacuccggcgggggcgggagcgacaucaucaagcuccugaacgagcaggucaacaaggagaugcaguccagcaaccuguacauguccaugagcuccuggugcuacacccacagccucgacggcgccgggcuguuccuguucgaccacgccgcggaggaguacgagcacgccaagaagcucaucaucuuccugaacgagaacaacgugcccgugcagcugaccuccaucagcgccccggagcacaaguucgagggccucacgcagaucuuccagaaggccuacgagcacgagcagcacaucuccgagagcaucaacaacaucguggaccacgccaucaaguccaaggaccacgcgaccuucaacuuccugcagugguacgucgccgagcagcacgaggaggaggugcuguucaaggacauccucgacaagaucgagcugaucgggaacgagaaccacggccuguaccucgccgaccaguacgugaaggggaucgccaagagccgcaaguccugaggacuagucccuguucccagagcccacuuuuuuuucuuuuuuugaaauaaaauagccugucuuucagaucucaaaggcucuuuucagagccaccaaaaaaaaaaaaaaaaaaaaaaaaaaaaaaaaaaaaaaaaaaaaaaaaaaaaaaaaaaaaaaaaaaaaaaaaaaaaaaaaaaaaaaaaaaaaaaaaaaaaa

SEQ ID NO: 12436 - RNA, 4220 nt, Artificial Sequence
  SARS-CoV-2/Wuhan/WIV05/2019__EPI_ISL_402128 spike protein mRNA gc (1-1147)(G889C_L1034C) Ferritin construct
aggagagucccgcagucggcguccagcggcucugcuuguucgugugugugucguugcaggccuuauucaagcuuaccauguucguguuccugguccuccugccccuggugagcucccagugcgugaaccucaccacccgcacgcagcugccgcccgccuacaccaacagcuucacccggggcgucuacuaccccgacaagguguuccgcuccagcgugcugcacuccacccaggaccucuuccugcccuucuucagcaacgucacgugguuccacgccauccacguguccgggaccaacggcaccaagcgguucgacaacccggugcugcccuucaacgacggggucuacuucgcgagcaccgagaaguccaacaucauccgcggcuggaucuucgggacgacccucgacagcaagacccagucccugcugaucgugaacaacgccaccaacguggucaucaaggugugcgaguuccaguucugcaacgaccccuuccucggcguguacuaccacaagaacaacaagagcuggauggaguccgaguuccgggucuacagcuccgccaacaacugcacguucgaguacgugagccagcccuuccugauggaccuggagggcaagcaggggaacuucaagaaccuccgcgaguucguguucaagaacaucgacggcuacuucaagaucuacuccaagcacaccccgaucaaccugguccgggaccugccccagggguucagcgcccucgagccccugguggaccugcccaucggcaucaacaucacccgcuuccagacccuccuggcccugcaccgguccuaccucacgccgggggacagcagcuccggcuggaccgcgggcgccgccgccuacuacgugggguaccugcagccccgcaccuuccugcucaaguacaacgagaacggcaccaucacggacgcggucgacugcgcccuggacccccugagcgagaccaagugcacccucaaguccuucaccguggagaaggggaucuaccagacgagcaacuuccgggugcagcccaccgaguccaucguccgcuucccgaacaucaccaaccugugccccuucggcgagguguucaacgccacccgguucgccagcgucuacgccuggaaccgcaagcggaucuccaacugcguggcggacuacagcgugcuguacaacuccgccagcuucuccacguucaagugcuacggcgucagccccaccaagcucaacgaccugugcuucaccaacguguacgccgacuccuucgugauccgcggggacgagguccggcagaucgcccccggccagaccgggaagaucgccgacuacaacuacaagcugccggacgacuucacgggcugcgugaucgcguggaacagcaacaaccucgacuccaaggucgggggcaacuacaacuaccuguaccgccuguuccgcaagagcaaccucaagcccuucgagcgggacaucuccaccgagaucuaccaggccggcagcacccccugcaacgggguggagggcuucaacugcuacuucccccugcaguccuacggguuccagccgaccaacggcgugggguaccagcccuaccggguggucgugcugagcuucgagcuccugcacgcccccgccacggugugcggccccaagaaguccaccaaccuggucaagaacaagugcgugaacuucaacuucaacggccucaccgggaccggcgugcugaccgagagcaacaagaaguuccugccguuccagcaguucgggcgcgacaucgccgacacgaccgacgcgguccgcgacccccagacccuggagauccucgacaucacccccugcagcuucggcgggguguccgugaucacgccgggcaccaacaccagcaaccaggucgccgugcuguaccaggacgugaacugcaccgagguccccguggccauccacgccgaccagcugacgcccaccuggcggguguacuccaccggcagcaacgucuuccagacccgcgccgggugccucaucggcgcggagcacgugaacaacuccuacgagugcgacauccccaucggggccggcaucugcgccagcuaccagacgcagaccaacuccccgcggcgcgcccggagcguggcgucccagagcaucaucgccuacaccaugucccugggcgccgagaacagcgucgccuacuccaacaacagcaucgccauccccaccaacuucacgaucuccgugaccaccgagauccugcccgugagcaugaccaagacgagcgucgacugcaccauguacaucugcggggacuccaccgagugcagcaaccuccugcugcaguacggcuccuucugcacccagcucaaccgcgcgcugacggggaucgccguggagcaggacaagaacacccaggagguguucgcccaggucaagcagaucuacaagacgcccccgaucaaggacuucggcggguucaacuucagccagauccugcccgaccccuccaagcccagcaagcgguccuucaucgaggaccuccuguucaacaaggugacccuggccgacgccggcuucaucaagcaguacggcgacugccucggggacaucgcggcccgcgaccugaucugcgcccagaaguucaacggccugaccgugcucccgccccugcugaccgacgagaugaucgcccaguacaccagcgcccuccuggcggggaccaucacguccggcuggaccuucugcgccggcgccgcccugcagauccccuucgcgaugcagauggccuaccgguucaacggcaucggggucacccagaacgugcucuacgagaaccagaagcugaucgccaaccaguucaacagcgccaucggcaagauccaggacucccugagcuccaccgccagcgcgcucgggaagcugcaggacguggucaaccagaacgcccaggcccugaacacgcucgugaagcagcuguccagcaacuucggcgccaucuccagcgugcugaacgacauccucucccgccuggacaaggucgaggccgaggugcagaucgaccggcugaucaccgggcgccuccagagccugcagaccuacgugacccagcagcugauccgggcggccgagauccgcgccagcgccaaccucgccgcgaccaagauguccgagugcgucugcggccagagcaagcggguggacuucugcggcaagggguaccaccugauguccuucccccagagcgccccgcacggcguggucuuccuccacgugacguacguccccgcccaggagaagaacuucaccaccgcccccgcgaucugccacgacgggaaggcccacuucccccgcgagggcguguucguguccaacgggacccacugguucgucacgcagcggaacuucuacgagccgcagaucaucaccaccgacaacaccuucgugagcggcaacugcgacguggucaucggcaucgugaacaacacgguguacgacccccugcagcccgagcuggacuccggcgggggcgggagcgacaucaucaagcuccugaacgagcaggucaacaaggagaugcaguccagcaaccuguacauguccaugagcuccuggugcuacacccacagccucgacggcgccgggcuguuccuguucgaccacgccgcggaggaguacgagcacgccaagaagcucaucaucuuccugaacgagaacaacgugcccgugcagcugaccuccaucagcgccccggagcacaaguucgagggccucacgcagaucuuccagaaggccuacgagcacgagcagcacaucuccgagagcaucaacaacaucguggaccacgccaucaaguccaaggaccacgcgaccuucaacuuccugcagugguacgucgccgagcagcacgaggaggaggugcuguucaaggacauccucgacaagaucgagcugaucgggaacgagaaccacggccuguaccucgccgaccaguacgugaaggggaucgccaagagccgcaaguccugaggacuagucccuguucccagagcccacuuuuuuuucuuuuuuugaaauaaaauagccugucuuucagaucucaaaggcucuuuucagagccaccaaaaaaaaaaaaaaaaaaaaaaaaaaaaaaaaaaaaaaaaaaaaaaaaaaaaaaaaaaaaaaaaaaaaaaaaaaaaaaaaaaaaaaaaaaaaaaaaaaaaa

SEQ ID NO: 12437 - RNA, 4220 nt, Artificial Sequence
  SARS-CoV-2/Wuhan/WIV05/2019__EPI_ISL_402128 spike protein mRNA gc (1-1147)(I909C_Y1047C) Ferritin construct
aggagagucccgcagucggcguccagcggcucugcuuguucgugugugugucguugcaggccuuauucaagcuuaccauguucguguuccugguccuccugccccuggugagcucccagugcgugaaccucaccacccgcacgcagcugccgcccgccuacaccaacagcuucacccggggcgucuacuaccccgacaagguguuccgcuccagcgugcugcacuccacccaggaccucuuccugcccuucuucagcaacgucacgugguuccacgccauccacguguccgggaccaacggcaccaagcgguucgacaacccggugcugcccuucaacgacggggucuacuucgcgagcaccgagaaguccaacaucauccgcggcuggaucuucgggacgacccucgacagcaagacccagucccugcugaucgugaacaacgccaccaacguggucaucaaggugugcgaguuccaguucugcaacgaccccuuccucggcguguacuaccacaagaacaacaagagcuggauggaguccgaguuccgggucuacagcuccgccaacaacugcacguucgaguacgugagccagcccuuccugauggaccuggagggcaagcaggggaacuucaagaaccuccgcgaguucguguucaagaacaucgacggcuacuucaagaucuacuccaagcacaccccgaucaaccugguccgggaccugccccagggguucagcgcccucgagccccugguggaccugcccaucggcaucaacaucacccgcuuccagacccuccuggcccugcaccgguccuaccucacgccgggggacagcagcuccggcuggaccgcgggcgccgccgccuacuacgugggguaccugcagccccgcaccuuccugcucaaguacaacgagaacggcaccaucacggacgcggucgacugcgcccuggacccccugagcgagaccaagugcacccucaaguccuucaccguggagaaggggaucuaccagacgagcaacuuccgggugcagcccaccgaguccaucguccgcuucccgaacaucaccaaccugugccccuucggcgagguguucaacgccacccgguucgccagcgucuacgccuggaaccgcaagcggaucuccaacugcguggcggacuacagcgugcuguacaacuccgccagcuucuccacguucaagugcuacggcgucagccccaccaagcucaacgaccugugcuucaccaacguguacgccgacuccuucgugauccgcggggacgagguccggcagaucgcccccggccagaccgggaagaucgccgacuacaacuacaagcugccggacgacuucacgggcugcgugaucgcguggaacagcaacaaccucgacuccaaggucgggggcaacuacaacuaccuguaccgccuguuccgcaagagcaaccucaagcccuucgagcgggacaucuccaccgagaucuaccaggccggcagcacccccugcaacgggguggagggcuucaacugcuacuucccccugcaguccuacggguuccagccgaccaacggcgugggguaccagcccuaccggguggucgugcugagcuucgagcuccugcacgcccccgccacggugugcggccccaagaaguccaccaaccuggucaagaacaagugcgugaacuucaacuucaacggccucaccgggaccggcgugcugaccgagagcaacaagaaguuccugccguuccagcaguucgggcgcgacaucgccgacacgaccgacgcgguccgcgacccccagacccuggagauccucgacaucacccccugcagcuucggcgggguguccgugaucacgccgggcaccaacaccagcaaccaggucgccgugcuguaccaggacgugaacugcaccgagguccccguggccauccacgccgaccagcugacgcccaccuggcggguguacuccaccggcagcaacgucuuccagacccgcgccgggugccucaucggcgcggagcacgugaacaacuccuacgagugcgacauccccaucggggccggcaucugcgccagcuaccagacgcagaccaacuccccgcggcgcgcccggagcguggcgucccagagcaucaucgccuacaccaugucccugggcgccgagaacagcgucgccuacuccaacaacagcaucgccauccccaccaacuucacgaucuccgugaccaccgagauccugcccgugagcaugaccaagacgagcgucgacugcaccauguacaucugcggggacuccaccgagugcagcaaccuccugcugcaguacggcuccuucugcacccagcucaaccgcgcgcugacggggaucgccguggagcaggacaagaacacccaggagguguucgcccaggucaagcagaucuacaagacgcccccgaucaaggacuucggcggguucaacuucagccagauccugcccgaccccuccaagcccagcaagcgguccuucaucgaggaccuccuguucaacaaggugacccuggccgacgccggcuucaucaagcaguacggcgacugccucggggacaucgcggcccgcgaccugaucugcgcccagaaguucaacggccugaccgugcucccgccccugcugaccgacgagaugaucgcccaguacaccagcgcccuccuggcggggaccaucacguccggcuggaccuucggggccggcgccgcccugcagauccccuucgcgaugcagauggccuaccgguucaacggcugcggggucacccagaacgugcucuacgagaaccagaagcugaucgccaaccaguucaacagcgccaucggcaagauccaggacucccugagcuccaccgccagcgcgcucgggaagcugcaggacguggucaaccagaacgcccaggcccugaacacgcucgugaagcagcuguccagcaacuucggcgccaucuccagcgugcugaacgacauccucucccgccuggacaaggucgaggccgaggugcagaucgaccggcugaucaccgggcgccuccagagccugcagaccuacgugacccagcagcugauccgggcggccgagauccgcgccagcgccaaccucgccgcgaccaagauguccgagugcguccugggccagagcaagcggguggacuucugcggcaaggggugccaccugauguccuucccccagagcgccccgcacggcguggucuuccuccacgugacguacguccccgcccaggagaagaacuucaccaccgcccccgcgaucugccacgacgggaaggcccacuucccccgcgagggcguguucguguccaacgggacccacugguucgucacgcagcggaacuucuacgagccgcagaucaucaccaccgacaacaccuucgugagcggcaacugcgacguggucaucggcaucgugaacaacacgguguacgacccccugcagcccgagcuggacuccggcgggggcgggagcgacaucaucaagcuccugaacgagcaggucaacaaggagaugcaguccagcaaccuguacauguccaugagcuccuggugcuacacccacagccucgacggcgccgggcuguuccuguucgaccacgccgcggaggaguacgagcacgccaagaagcucaucaucuuccugaacgagaacaacgugcccgugcagcugaccuccaucagcgccccggagcacaaguucgagggccucacgcagaucuuccagaaggccuacgagcacgagcagcacaucuccgagagcaucaacaacaucguggaccacgccaucaaguccaaggaccacgcgaccuucaacuuccugcagugguacgucgccgagcagcacgaggaggaggugcuguucaaggacauccucgacaagaucgagcugaucgggaacgagaaccacggccuguaccucgccgaccaguacgugaaggggaucgccaagagccgcaaguccugaggacuagucccuguucccagagcccacuuuuuuuucuuuuuuugaaauaaaauagccugucuuucagaucucaaaggcucuuuucagagccaccaaaaaaaaaaaaaaaaaaaaaaaaaaaaaaaaaaaaaaaaaaaaaaaaaaaaaaaaaaaaaaaaaaaaaaaaaaaaaaaaaaaaaaaaaaaaaaaaaaaaa

SEQ ID NO: 12438 - RNA, 4220 nt, Artificial Sequence
  SARS-CoV-2/Wuhan/WIV05/2019__EPI_ISL_402128 spike protein mRNA gc (1-1147)(Q965C_S1003C) Ferritin construct
aggagagucccgcagucggcguccagcggcucugcuuguucgugugugugucguugcaggccuuauucaagcuuaccauguucguguuccugguccuccugccccuggugagcucccagugcgugaaccucaccacccgcacgcagcugccgcccgccuacaccaacagcuucacccggggcgucuacuaccccgacaagguguuccgcuccagcgugcugcacuccacccaggaccucuuccugcccuucuucagcaacgucacgugguuccacgccauccacguguccgggaccaacggcaccaagcgguucgacaacccggugcugcccuucaacgacggggucuacuucgcgagcaccgagaaguccaacaucauccgcggcuggaucuucgggacgacccucgacagcaagacccagucccugcugaucgugaacaacgccaccaacguggucaucaaggugugcgaguuccaguucugcaacgaccccuuccucggcguguacuaccacaagaacaacaagagcuggauggaguccgaguuccgggucuacagcuccgccaacaacugcacguucgaguacgugagccagcccuuccugauggaccuggagggcaagcaggggaacuucaagaaccuccgcgaguucguguucaagaacaucgacggcuacuucaagaucuacuccaagcacaccccgaucaaccugguccgggaccugccccagggguucagcgcccucgagccccugguggaccugcccaucggcaucaacaucacccgcuuccagacccuccuggcccugcaccgguccuaccucacgccgggggacagcagcuccggcuggaccgcgggcgccgccgccuacuacgugggguaccugcagccccgcaccuuccugcucaaguacaacgagaacggcaccaucacggacgcggucgacugcgcccuggacccccugagcgagaccaagugcacccucaaguccuucaccguggagaaggggaucuaccagacgagcaacuuccgggugcagcccaccgaguccaucguccgcuucccgaacaucaccaaccugugccccuucggcgagguguucaacgccacccgguucgccagcgucuacgccuggaaccgcaagcggaucuccaacugcguggcggacuacagcgugcuguacaacuccgccagcuucuccacguucaagugcuacggcgucagccccaccaagcucaacgaccugugcuucaccaacguguacgccgacuccuucgugauccgcggggacgagguccggcagaucgcccccggccagaccgggaagaucgccgacuacaacuacaagcugccggacgacuucacgggcugcgugaucgcguggaacagcaacaaccucgacuccaaggucgggggcaacuacaacuaccuguaccgccuguuccgcaagagcaaccucaagcccuucgagcgggacaucuccaccgagaucuaccaggccggcagcacccccugcaacgggguggagggcuucaacugcuacuucccccugcaguccuacggguuccagccgaccaacggcgugggguaccagcccuaccggguggucgugcugagcuucgagcuccugcacgcccccgccacggugugcggccccaagaaguccaccaaccuggucaagaacaagugcgugaacuucaacuucaacggccucaccgggaccggcgugcugaccgagagcaacaagaaguuccugccguuccagcaguucgggcgcgacaucgccgacacgaccgacgcgguccgcgacccccagacccuggagauccucgacaucacccccugcagcuucggcgggguguccgugaucacgccgggcaccaacaccagcaaccaggucgccgugcuguaccaggacgugaacugcaccgagguccccguggccauccacgccgaccagcugacgcccaccuggcggguguacuccaccggcagcaacgucuuccagacccgcgccgggugccucaucggcgcggagcacgugaacaacuccuacgagugcgacauccccaucggggccggcaucugcgccagcuaccagacgcagaccaacuccccgcggcgcgcccggagcguggcgucccagagcaucaucgccuacaccaugucccugggcgccgagaacagcgucgccuacuccaacaacagcaucgccauccccaccaacuucacgaucuccgugaccaccgagauccugcccgugagcaugaccaagacgagcgucgacugcaccauguacaucugcggggacuccaccgagugcagcaaccuccugcugcaguacggcuccuucugcacccagcucaaccgcgcgcugacggggaucgccguggagcaggacaagaacacccaggagguguucgcccaggucaagcagaucuacaagacgcccccgaucaaggacuucggcggguucaacuucagccagauccugcccgaccccuccaagcccagcaagcgguccuucaucgaggaccuccuguucaacaaggugacccuggccgacgccggcuucaucaagcaguacggcgacugccucggggacaucgcggcccgcgaccugaucugcgcccagaaguucaacggccugaccgugcucccgccccugcugaccgacgagaugaucgcccaguacaccagcgcccuccuggcggggaccaucacguccggcuggaccuucggggccggcgccgcccugcagauccccuucgcgaugcagauggccuaccgguucaacggcaucggggucacccagaacgugcucuacgagaaccagaagcugaucgccaaccaguucaacagcgccaucggcaagauccaggacucccugagcuccaccgccagcgcgcucgggaagcugcaggacguggucaaccagaacgcccaggcccugaacacgcucgugaagugccuguccagcaacuucggcgccaucuccagcgugcugaacgacauccucucccgccuggacaaggucgaggccgaggugcagaucgaccggcugaucaccgggcgccuccagugccugcagaccuacgugacccagcagcugauccgggcggccgagauccgcgccagcgccaaccucgccgcgaccaagauguccgagugcguccugggccagagcaagcggguggacuucugcggcaagggguaccaccugauguccuucccccagagcgccccgcacggcguggucuuccuccacgugacguacguccccgcccaggagaagaacuucaccaccgcccccgcgaucugccacgacgggaaggcccacuucccccgcgagggcguguucguguccaacgggacccacugguucgucacgcagcggaacuucuacgagccgcagaucaucaccaccgacaacaccuucgugagcggcaacugcgacguggucaucggcaucgugaacaacacgguguacgacccccugcagcccgagcuggacuccggcgggggcgggagcgacaucaucaagcuccugaacgagcaggucaacaaggagaugcaguccagcaaccuguacauguccaugagcuccuggugcuacacccacagccucgacggcgccgggcuguuccuguucgaccacgccgcggaggaguacgagcacgccaagaagcucaucaucuuccugaacgagaacaacgugcccgugcagcugaccuccaucagcgccccggagcacaaguucgagggccucacgcagaucuuccagaaggccuacgagcacgagcagcacaucuccgagagcaucaacaacaucguggaccacgccaucaaguccaaggaccacgcgaccuucaacuuccugcagugguacgucgccgagcagcacgaggaggaggugcuguucaaggacauccucgacaagaucgagcugaucgggaacgagaaccacggccuguaccucgccgaccaguacgugaaggggaucgccaagagccgcaaguccugaggacuagucccuguucccagagcccacuuuuuuuucuuuuuuugaaauaaaauagccugucuuucagaucucaaaggcucuuuucagagccaccaaaaaaaaaaaaaaaaaaaaaaaaaaaaaaaaaaaaaaaaaaaaaaaaaaaaaaaaaaaaaaaaaaaaaaaaaaaaaaaaaaaaaaaaaaaaaaaaaaaaa

SEQ ID NO: 12439 - RNA, 4220 nt, Artificial Sequence
  SARS-CoV-2/Wuhan/WIV05/2019__EPI_ISL_402128 spike protein mRNA gc (1-1147)(F970C_G999C) Ferritin construct
aggagagucccgcagucggcguccagcggcucugcuuguucgugugugugucguugcaggccuuauucaagcuuaccauguucguguuccugguccuccugccccuggugagcucccagugcgugaaccucaccacccgcacgcagcugccgcccgccuacaccaacagcuucacccggggcgucuacuaccccgacaagguguuccgcuccagcgugcugcacuccacccaggaccucuuccugcccuucuucagcaacgucacgugguuccacgccauccacguguccgggaccaacggcaccaagcgguucgacaacccggugcugcccuucaacgacggggucuacuucgcgagcaccgagaaguccaacaucauccgcggcuggaucuucgggacgacccucgacagcaagacccagucccugcugaucgugaacaacgccaccaacguggucaucaaggugugcgaguuccaguucugcaacgaccccuuccucggcguguacuaccacaagaacaacaagagcuggauggaguccgaguuccgggucuacagcuccgccaacaacugcacguucgaguacgugagccagcccuuccugauggaccuggagggcaagcaggggaacuucaagaaccuccgcgaguucguguucaagaacaucgacggcuacuucaagaucuacuccaagcacaccccgaucaaccugguccgggaccugccccagggguucagcgcccucgagccccugguggaccugcccaucggcaucaacaucacccgcuuccagacccuccuggcccugcaccgguccuaccucacgccgggggacagcagcuccggcuggaccgcgggcgccgccgccuacuacgugggguaccugcagccccgcaccuuccugcucaaguacaacgagaacggcaccaucacggacgcggucgacugcgcccuggacccccugagcgagaccaagugcacccucaaguccuucaccguggagaaggggaucuaccagacgagcaacuuccgggugcagcccaccgaguccaucguccgcuucccgaacaucaccaaccugugccccuucggcgagguguucaacgccacccgguucgccagcgucuacgccuggaaccgcaagcggaucuccaacugcguggcggacuacagcgugcuguacaacuccgccagcuucuccacguucaagugcuacggcgucagccccaccaagcucaacgaccugugcuucaccaacguguacgccgacuccuucgugauccgcggggacgagguccggcagaucgcccccggccagaccgggaagaucgccgacuacaacuacaagcugccggacgacuucacgggcugcgugaucgcguggaacagcaacaaccucgacuccaaggucgggggcaacuacaacuaccuguaccgccuguuccgcaagagcaaccucaagcccuucgagcgggacaucuccaccgagaucuaccaggccggcagcacccccugcaacgggguggagggcuucaacugcuacuucccccugcaguccuacggguuccagccgaccaacggcgugggguaccagcccuaccggguggucgugcugagcuucgagcuccugcacgcccccgccacggugugcggccccaagaaguccaccaaccuggucaagaacaagugcgugaacuucaacuucaacggccucaccgggaccggcgugcugaccgagagcaacaagaaguuccugccguuccagcaguucgggcgcgacaucgccgacacgaccgacgcgguccgcgacccccagacccuggagauccucgacaucacccccugcagcuucggcgggguguccgugaucacgccgggcaccaacaccagcaaccaggucgccgugcuguaccaggacgugaacugcaccgagguccccguggccauccacgccgaccagcugacgcccaccuggcggguguacuccaccggcagcaacgucuuccagacccgcgccgggugccucaucggcgcggagcacgugaacaacuccuacgagugcgacauccccaucggggccggcaucugcgccagcuaccagacgcagaccaacuccccgcggcgcgcccggagcguggcgucccagagcaucaucgccuacaccaugucccugggcgccgagaacagcgucgccuacuccaacaacagcaucgccauccccaccaacuucacgaucuccgugaccaccgagauccugcccgugagcaugaccaagacgagcgucgacugcaccauguacaucugcggggacuccaccgagugcagcaaccuccugcugcaguacggcuccuucugcacccagcucaaccgcgcgcugacggggaucgccguggagcaggacaagaacacccaggagguguucgcccaggucaagcagaucuacaagacgcccccgaucaaggacuucggcggguucaacuucagccagauccugcccgaccccuccaagcccagcaagcgguccuucaucgaggaccuccuguucaacaaggugacccuggccgacgccggcuucaucaagcaguacggcgacugccucggggacaucgcggcccgcgaccugaucugcgcccagaaguucaacggccugaccgugcucccgccccugcugaccgacgagaugaucgcccaguacaccagcgcccuccuggcggggaccaucacguccggcuggaccuucggggccggcgccgcccugcagauccccuucgcgaugcagauggccuaccgguucaacggcaucggggucacccagaacgugcucuacgagaaccagaagcugaucgccaaccaguucaacagcgccaucggcaagauccaggacucccugagcuccaccgccagcgcgcucgggaagcugcaggacguggucaaccagaacgcccaggcccugaacacgcucgugaagcagcuguccagcaacugcggcgccaucuccagcgugcugaacgacauccucucccgccuggacaaggucgaggccgaggugcagaucgaccggcugaucaccugucgccuccagagccugcagaccuacgugacccagcagcugauccgggcggccgagauccgcgccagcgccaaccucgccgcgaccaagauguccgagugcguccugggccagagcaagcggguggacuucugcggcaagggguaccaccugauguccuucccccagagcgccccgcacggcguggucuuccuccacgugacguacguccccgcccaggagaagaacuucaccaccgcccccgcgaucugccacgacgggaaggcccacuucccccgcgagggcguguucguguccaacgggacccacugguucgucacgcagcggaacuucuacgagccgcagaucaucaccaccgacaacaccuucgugagcggcaacugcgacguggucaucggcaucgugaacaacacgguguacgacccccugcagcccgagcuggacuccggcgggggcgggagcgacaucaucaagcuccugaacgagcaggucaacaaggagaugcaguccagcaaccuguacauguccaugagcuccuggugcuacacccacagccucgacggcgccgggcuguuccuguucgaccacgccgcggaggaguacgagcacgccaagaagcucaucaucuuccugaacgagaacaacgugcccgugcagcugaccuccaucagcgccccggagcacaaguucgagggccucacgcagaucuuccagaaggccuacgagcacgagcagcacaucuccgagagcaucaacaacaucguggaccacgccaucaaguccaaggaccacgcgaccuucaacuuccugcagugguacgucgccgagcagcacgaggaggaggugcuguucaaggacauccucgacaagaucgagcugaucgggaacgagaaccacggccuguaccucgccgaccaguacgugaaggggaucgccaagagccgcaaguccugaggacuagucccuguucccagagcccacuuuuuuuucuuuuuuugaaauaaaauagccugucuuucagaucucaaaggcucuuuucagagccaccaaaaaaaaaaaaaaaaaaaaaaaaaaaaaaaaaaaaaaaaaaaaaaaaaaaaaaaaaaaaaaaaaaaaaaaaaaaaaaaaaaaaaaaaaaaaaaaaaaaaa

SEQ ID NO: 12440 - RNA, 4220 nt, Artificial Sequence
  SARS-CoV-2/Wuhan/WIV05/2019__EPI_ISL_402128 spike protein mRNA gc (1-1147)(A972C_R995C) Ferritin construct
aggagagucccgcagucggcguccagcggcucugcuuguucgugugugugucguugcaggccuuauucaagcuuaccauguucguguuccugguccuccugccccuggugagcucccagugcgugaaccucaccacccgcacgcagcugccgcccgccuacaccaacagcuucacccggggcgucuacuaccccgacaagguguuccgcuccagcgugcugcacuccacccaggaccucuuccugcccuucuucagcaacgucacgugguuccacgccauccacguguccgggaccaacggcaccaagcgguucgacaacccggugcugcccuucaacgacggggucuacuucgcgagcaccgagaaguccaacaucauccgcggcuggaucuucgggacgacccucgacagcaagacccagucccugcugaucgugaacaacgccaccaacguggucaucaaggugugcgaguuccaguucugcaacgaccccuuccucggcguguacuaccacaagaacaacaagagcuggauggaguccgaguuccgggucuacagcuccgccaacaacugcacguucgaguacgugagccagcccuuccugauggaccuggagggcaagcaggggaacuucaagaaccuccgcgaguucguguucaagaacaucgacggcuacuucaagaucuacuccaagcacaccccgaucaaccugguccgggaccugccccagggguucagcgcccucgagccccugguggaccugcccaucggcaucaacaucacccgcuuccagacccuccuggcccugcaccgguccuaccucacgccgggggacagcagcuccggcuggaccgcgggcgccgccgccuacuacgugggguaccugcagccccgcaccuuccugcucaaguacaacgagaacggcaccaucacggacgcggucgacugcgcccuggacccccugagcgagaccaagugcacccucaaguccuucaccguggagaaggggaucuaccagacgagcaacuuccgggugcagcccaccgaguccaucguccgcuucccgaacaucaccaaccugugccccuucggcgagguguucaacgccacccgguucgccagcgucuacgccuggaaccgcaagcggaucuccaacugcguggcggacuacagcgugcuguacaacuccgccagcuucuccacguucaagugcuacggcgucagccccaccaagcucaacgaccugugcuucaccaacguguacgccgacuccuucgugauccgcggggacgagguccggcagaucgcccccggccagaccgggaagaucgccgacuacaacuacaagcugccggacgacuucacgggcugcgugaucgcguggaacagcaacaaccucgacuccaaggucgggggcaacuacaacuaccuguaccgccuguuccgcaagagcaaccucaagcccuucgagcgggacaucuccaccgagaucuaccaggccggcagcacccccugcaacgggguggagggcuucaacugcuacuucccccugcaguccuacggguuccagccgaccaacggcgugggguaccagcccuaccggguggucgugcugagcuucgagcuccugcacgcccccgccacggugugcggccccaagaaguccaccaaccuggucaagaacaagugcgugaacuucaacuucaacggccucaccgggaccggcgugcugaccgagagcaacaagaaguuccugccguuccagcaguucgggcgcgacaucgccgacacgaccgacgcgguccgcgacccccagacccuggagauccucgacaucacccccugcagcuucggcgggguguccgugaucacgccgggcaccaacaccagcaaccaggucgccgugcuguaccaggacgugaacugcaccgagguccccguggccauccacgccgaccagcugacgcccaccuggcggguguacuccaccggcagcaacgucuuccagacccgcgccgggugccucaucggcgcggagcacgugaacaacuccuacgagugcgacauccccaucggggccggcaucugcgccagcuaccagacgcagaccaacuccccgcggcgcgcccggagcguggcgucccagagcaucaucgccuacaccaugucccugggcgccgagaacagcgucgccuacuccaacaacagcaucgccauccccaccaacuucacgaucuccgugaccaccgagauccugcccgugagcaugaccaagacgagcgucgacugcaccauguacaucugcggggacuccaccgagugcagcaaccuccugcugcaguacggcuccuucugcacccagcucaaccgcgcgcugacggggaucgccguggagcaggacaagaacacccaggagguguucgcccaggucaagcagaucuacaagacgcccccgaucaaggacuucggcggguucaacuucagccagauccugcccgaccccuccaagcccagcaagcgguccuucaucgaggaccuccuguucaacaaggugacccuggccgacgccggcuucaucaagcaguacggcgacugccucggggacaucgcggcccgcgaccugaucugcgcccagaaguucaacggccugaccgugcucccgccccugcugaccgacgagaugaucgcccaguacaccagcgcccuccuggcggggaccaucacguccggcuggaccuucggggccggcgccgcccugcagauccccuucgcgaugcagauggccuaccgguucaacggcaucggggucacccagaacgugcucuacgagaaccagaagcugaucgccaaccaguucaacagcgccaucggcaagauccaggacucccugagcuccaccgccagcgcgcucgggaagcugcaggacguggucaaccagaacgcccaggcccugaacacgcucgugaagcagcuguccagcaacuucggcugcaucuccagcgugcugaacgacauccucucccgccuggacaaggucgaggccgaggugcagaucgacugccugaucaccgggcgccuccagagccugcagaccuacgugacccagcagcugauccgggcggccgagauccgcgccagcgccaaccucgccgcgaccaagauguccgagugcguccugggccagagcaagcggguggacuucugcggcaagggguaccaccugauguccuucccccagagcgccccgcacggcguggucuuccuccacgugacguacguccccgcccaggagaagaacuucaccaccgcccccgcgaucugccacgacgggaaggcccacuucccccgcgagggcguguucguguccaacgggacccacugguucgucacgcagcggaacuucuacgagccgcagaucaucaccaccgacaacaccuucgugagcggcaacugcgacguggucaucggcaucgugaacaacacgguguacgacccccugcagcccgagcuggacuccggcgggggcgggagcgacaucaucaagcuccugaacgagcaggucaacaaggagaugcaguccagcaaccuguacauguccaugagcuccuggugcuacacccacagccucgacggcgccgggcuguuccuguucgaccacgccgcggaggaguacgagcacgccaagaagcucaucaucuuccugaacgagaacaacgugcccgugcagcugaccuccaucagcgccccggagcacaaguucgagggccucacgcagaucuuccagaaggccuacgagcacgagcagcacaucuccgagagcaucaacaacaucguggaccacgccaucaaguccaaggaccacgcgaccuucaacuuccugcagugguacgucgccgagcagcacgaggaggaggugcuguucaaggacauccucgacaagaucgagcugaucgggaacgagaaccacggccuguaccucgccgaccaguacgugaaggggaucgccaagagccgcaaguccugaggacuagucccuguucccagagcccacuuuuuuuucuuuuuuugaaauaaaauagccugucuuucagaucucaaaggcucuuuucagagccaccaaaaaaaaaaaaaaaaaaaaaaaaaaaaaaaaaaaaaaaaaaaaaaaaaaaaaaaaaaaaaaaaaaaaaaaaaaaaaaaaaaaaaaaaaaaaaaaaaaaaa

SEQ ID NO: 12441 - RNA, 4220 nt, Artificial Sequence
  SARS-CoV-2/Wuhan/WIV05/2019__EPI_ISL_402128 spike protein mRNA gc (1-1147)(A890C_V1040C) Ferritin construct
aggagagucccgcagucggcguccagcggcucugcuuguucgugugugugucguugcaggccuuauucaagcuuaccauguucguguuccugguccuccugccccuggugagcucccagugcgugaaccucaccacccgcacgcagcugccgcccgccuacaccaacagcuucacccggggcgucuacuaccccgacaagguguuccgcuccagcgugcugcacuccacccaggaccucuuccugcccuucuucagcaacgucacgugguuccacgccauccacguguccgggaccaacggcaccaagcgguucgacaacccggugcugcccuucaacgacggggucuacuucgcgagcaccgagaaguccaacaucauccgcggcuggaucuucgggacgacccucgacagcaagacccagucccugcugaucgugaacaacgccaccaacguggucaucaaggugugcgaguuccaguucugcaacgaccccuuccucggcguguacuaccacaagaacaacaagagcuggauggaguccgaguuccgggucuacagcuccgccaacaacugcacguucgaguacgugagccagcccuuccugauggaccuggagggcaagcaggggaacuucaagaaccuccgcgaguucguguucaagaacaucgacggcuacuucaagaucuacuccaagcacaccccgaucaaccugguccgggaccugccccagggguucagcgcccucgagccccugguggaccugcccaucggcaucaacaucacccgcuuccagacccuccuggcccugcaccgguccuaccucacgccgggggacagcagcuccggcuggaccgcgggcgccgccgccuacuacgugggguaccugcagccccgcaccuuccugcucaaguacaacgagaacggcaccaucacggacgcggucgacugcgcccuggacccccugagcgagaccaagugcacccucaaguccuucaccguggagaaggggaucuaccagacgagcaacuuccgggugcagcccaccgaguccaucguccgcuucccgaacaucaccaaccugugccccuucggcgagguguucaacgccacccgguucgccagcgucuacgccuggaaccgcaagcggaucuccaacugcguggcggacuacagcgugcuguacaacuccgccagcuucuccacguucaagugcuacggcgucagccccaccaagcucaacgaccugugcuucaccaacguguacgccgacuccuucgugauccgcggggacgagguccggcagaucgcccccggccagaccgggaagaucgccgacuacaacuacaagcugccggacgacuucacgggcugcgugaucgcguggaacagcaacaaccucgacuccaaggucgggggcaacuacaacuaccuguaccgccuguuccgcaagagcaaccucaagcccuucgagcgggacaucuccaccgagaucuaccaggccggcagcacccccugcaacgggguggagggcuucaacugcuacuucccccugcaguccuacggguuccagccgaccaacggcgugggguaccagcccuaccggguggucgugcugagcuucgagcuccugcacgcccccgccacggugugcggccccaagaaguccaccaaccuggucaagaacaagugcgugaacuucaacuucaacggccucaccgggaccggcgugcugaccgagagcaacaagaaguuccugccguuccagcaguucgggcgcgacaucgccgacacgaccgacgcgguccgcgacccccagacccuggagauccucgacaucacccccugcagcuucggcgggguguccgugaucacgccgggcaccaacaccagcaaccaggucgccgugcuguaccaggacgugaacugcaccgagguccccguggccauccacgccgaccagcugacgcccaccuggcggguguacuccaccggcagcaacgucuuccagacccgcgccgggugccucaucggcgcggagcacgugaacaacuccuacgagugcgacauccccaucggggccggcaucugcgccagcuaccagacgcagaccaacuccccgcggcgcgcccggagcguggcgucccagagcaucaucgccuacaccaugucccugggcgccgagaacagcgucgccuacuccaacaacagcaucgccauccccaccaacuucacgaucuccgugaccaccgagauccugcccgugagcaugaccaagacgagcgucgacugcaccauguacaucugcggggacuccaccgagugcagcaaccuccugcugcaguacggcuccuucugcacccagcucaaccgcgcgcugacggggaucgccguggagcaggacaagaacacccaggagguguucgcccaggucaagcagaucuacaagacgcccccgaucaaggacuucggcggguucaacuucagccagauccugcccgaccccuccaagcccagcaagcgguccuucaucgaggaccuccuguucaacaaggugacccuggccgacgccggcuucaucaagcaguacggcgacugccucggggacaucgcggcccgcgaccugaucugcgcccagaaguucaacggccugaccgugcucccgccccugcugaccgacgagaugaucgcccaguacaccagcgcccuccuggcggggaccaucacguccggcuggaccuucgggugcggcgccgcccugcagauccccuucgcgaugcagauggccuaccgguucaacggcaucggggucacccagaacgugcucuacgagaaccagaagcugaucgccaaccaguucaacagcgccaucggcaagauccaggacucccugagcuccaccgccagcgcgcucgggaagcugcaggacguggucaaccagaacgcccaggcccugaacacgcucgugaagcagcuguccagcaacuucggcgccaucuccagcgugcugaacgacauccucucccgccuggacaaggucgaggccgaggugcagaucgaccggcugaucaccgggcgccuccagagccugcagaccuacgugacccagcagcugauccgggcggccgagauccgcgccagcgccaaccucgccgcgaccaagauguccgagugcguccugggccagagcaagcggugcgacuucugcggcaagggguaccaccugauguccuucccccagagcgccccgcacggcguggucuuccuccacgugacguacguccccgcccaggagaagaacuucaccaccgcccccgcgaucugccacgacgggaaggcccacuucccccgcgagggcguguucguguccaacgggacccacugguucgucacgcagcggaacuucuacgagccgcagaucaucaccaccgacaacaccuucgugagcggcaacugcgacguggucaucggcaucgugaacaacacgguguacgacccccugcagcccgagcuggacuccggcgggggcgggagcgacaucaucaagcuccugaacgagcaggucaacaaggagaugcaguccagcaaccuguacauguccaugagcuccuggugcuacacccacagccucgacggcgccgggcuguuccuguucgaccacgccgcggaggaguacgagcacgccaagaagcucaucaucuuccugaacgagaacaacgugcccgugcagcugaccuccaucagcgccccggagcacaaguucgagggccucacgcagaucuuccagaaggccuacgagcacgagcagcacaucuccgagagcaucaacaacaucguggaccacgccaucaaguccaaggaccacgcgaccuucaacuuccugcagugguacgucgccgagcagcacgaggaggaggugcuguucaaggacauccucgacaagaucgagcugaucgggaacgagaaccacggccuguaccucgccgaccaguacgugaaggggaucgccaagagccgcaaguccugaggacuagucccuguucccagagcccacuuuuuuuucuuuuuuugaaauaaaauagccugucuuucagaucucaaaggcucuuuucagagccaccaaaaaaaaaaaaaaaaaaaaaaaaaaaaaaaaaaaaaaaaaaaaaaaaaaaaaaaaaaaaaaaaaaaaaaaaaaaaaaaaaaaaaaaaaaaaaaaaaaaaa

SEQ ID NO: 12442 - RNA, 4220 nt, Artificial Sequence
  SARS-CoV-2/Wuhan/WIV05/2019__EPI_ISL_402128 spike protein mRNA gc (1-1147)(T874C_S1055C) Ferritin construct
aggagagucccgcagucggcguccagcggcucugcuuguucgugugugugucguugcaggccuuauucaagcuuaccauguucguguuccugguccuccugccccuggugagcucccagugcgugaaccucaccacccgcacgcagcugccgcccgccuacaccaacagcuucacccggggcgucuacuaccccgacaagguguuccgcuccagcgugcugcacuccacccaggaccucuuccugcccuucuucagcaacgucacgugguuccacgccauccacguguccgggaccaacggcaccaagcgguucgacaacccggugcugcccuucaacgacggggucuacuucgcgagcaccgagaaguccaacaucauccgcggcuggaucuucgggacgacccucgacagcaagacccagucccugcugaucgugaacaacgccaccaacguggucaucaaggugugcgaguuccaguucugcaacgaccccuuccucggcguguacuaccacaagaacaacaagagcuggauggaguccgaguuccgggucuacagcuccgccaacaacugcacguucgaguacgugagccagcccuuccugauggaccuggagggcaagcaggggaacuucaagaaccuccgcgaguucguguucaagaacaucgacggcuacuucaagaucuacuccaagcacaccccgaucaaccugguccgggaccugccccagggguucagcgcccucgagccccugguggaccugcccaucggcaucaacaucacccgcuuccagacccuccuggcccugcaccgguccuaccucacgccgggggacagcagcuccggcuggaccgcgggcgccgccgccuacuacgugggguaccugcagccccgcaccuuccugcucaaguacaacgagaacggcaccaucacggacgcggucgacugcgcccuggacccccugagcgagaccaagugcacccucaaguccuucaccguggagaaggggaucuaccagacgagcaacuuccgggugcagcccaccgaguccaucguccgcuucccgaacaucaccaaccugugccccuucggcgagguguucaacgccacccgguucgccagcgucuacgccuggaaccgcaagcggaucuccaacugcguggcggacuacagcgugcuguacaacuccgccagcuucuccacguucaagugcuacggcgucagccccaccaagcucaacgaccugugcuucaccaacguguacgccgacuccuucgugauccgcggggacgagguccggcagaucgcccccggccagaccgggaagaucgccgacuacaacuacaagcugccggacgacuucacgggcugcgugaucgcguggaacagcaacaaccucgacuccaaggucgggggcaacuacaacuaccuguaccgccuguuccgcaagagcaaccucaagcccuucgagcgggacaucuccaccgagaucuaccaggccggcagcacccccugcaacgggguggagggcuucaacugcuacuucccccugcaguccuacggguuccagccgaccaacggcgugggguaccagcccuaccggguggucgugcugagcuucgagcuccugcacgcccccgccacggugugcggccccaagaaguccaccaaccuggucaagaacaagugcgugaacuucaacuucaacggccucaccgggaccggcgugcugaccgagagcaacaagaaguuccugccguuccagcaguucgggcgcgacaucgccgacacgaccgacgcgguccgcgacccccagacccuggagauccucgacaucacccccugcagcuucggcgggguguccgugaucacgccgggcaccaacaccagcaaccaggucgccgugcuguaccaggacgugaacugcaccgagguccccguggccauccacgccgaccagcugacgcccaccuggcggguguacuccaccggcagcaacgucuuccagacccgcgccgggugccucaucggcgcggagcacgugaacaacuccuacgagugcgacauccccaucggggccggcaucugcgccagcuaccagacgcagaccaacuccccgcggcgcgcccggagcguggcgucccagagcaucaucgccuacaccaugucccugggcgccgagaacagcgucgccuacuccaacaacagcaucgccauccccaccaacuucacgaucuccgugaccaccgagauccugcccgugagcaugaccaagacgagcgucgacugcaccauguacaucugcggggacuccaccgagugcagcaaccuccugcugcaguacggcuccuucugcacccagcucaaccgcgcgcugacggggaucgccguggagcaggacaagaacacccaggagguguucgcccaggucaagcagaucuacaagacgcccccgaucaaggacuucggcggguucaacuucagccagauccugcccgaccccuccaagcccagcaagcgguccuucaucgaggaccuccuguucaacaaggugacccuggccgacgccggcuucaucaagcaguacggcgacugccucggggacaucgcggcccgcgaccugaucugcgcccagaaguucaacggccugaccgugcucccgccccugcugaccgacgagaugaucgcccaguacugcagcgcccuccuggcggggaccaucacguccggcuggaccuucggggccggcgccgcccugcagauccccuucgcgaugcagauggccuaccgguucaacggcaucggggucacccagaacgugcucuacgagaaccagaagcugaucgccaaccaguucaacagcgccaucggcaagauccaggacucccugagcuccaccgccagcgcgcucgggaagcugcaggacguggucaaccagaacgcccaggcccugaacacgcucgugaagcagcuguccagcaacuucggcgccaucuccagcgugcugaacgacauccucucccgccuggacaaggucgaggccgaggugcagaucgaccggcugaucaccgggcgccuccagagccugcagaccuacgugacccagcagcugauccgggcggccgagauccgcgccagcgccaaccucgccgcgaccaagauguccgagugcguccugggccagagcaagcggguggacuucugcggcaagggguaccaccugauguccuucccccagugcgccccgcacggcguggucuuccuccacgugacguacguccccgcccaggagaagaacuucaccaccgcccccgcgaucugccacgacgggaaggcccacuucccccgcgagggcguguucguguccaacgggacccacugguucgucacgcagcggaacuucuacgagccgcagaucaucaccaccgacaacaccuucgugagcggcaacugcgacguggucaucggcaucgugaacaacacgguguacgacccccugcagcccgagcuggacuccggcgggggcgggagcgacaucaucaagcuccugaacgagcaggucaacaaggagaugcaguccagcaaccuguacauguccaugagcuccuggugcuacacccacagccucgacggcgccgggcuguuccuguucgaccacgccgcggaggaguacgagcacgccaagaagcucaucaucuuccugaacgagaacaacgugcccgugcagcugaccuccaucagcgccccggagcacaaguucgagggccucacgcagaucuuccagaaggccuacgagcacgagcagcacaucuccgagagcaucaacaacaucguggaccacgccaucaaguccaaggaccacgcgaccuucaacuuccugcagugguacgucgccgagcagcacgaggaggaggugcuguucaaggacauccucgacaagaucgagcugaucgggaacgagaaccacggccuguaccucgccgaccaguacgugaaggggaucgccaagagccgcaaguccugaggacuagucccuguucccagagcccacuuuuuuuucuuuuuuugaaauaaaauagccugucuuucagaucucaaaggcucuuuucagagccaccaaaaaaaaaaaaaaaaaaaaaaaaaaaaaaaaaaaaaaaaaaaaaaaaaaaaaaaaaaaaaaaaaaaaaaaaaaaaaaaaaaaaaaaaaaaaaaaaaaaaa

SEQ ID NO: 12443 - RNA, 3806 nt, Artificial Sequence
  SARS-CoV-2/Wuhan/WIV05/2019__EPI_ISL_402128 spike protein mRNA gc (1-1147) Foldon construct
aggagagucccgcagucggcguccagcggcucugcuuguucgugugugugucguugcaggccuuauucaagcuuaccauguucguguuccugguccuccugccccuggugagcucccagugcgugaaccucaccacccgcacgcagcugccgcccgccuacaccaacagcuucacccggggcgucuacuaccccgacaagguguuccgcuccagcgugcugcacuccacccaggaccucuuccugcccuucuucagcaacgucacgugguuccacgccauccacguguccgggaccaacggcaccaagcgguucgacaacccggugcugcccuucaacgacggggucuacuucgcgagcaccgagaaguccaacaucauccgcggcuggaucuucgggacgacccucgacagcaagacccagucccugcugaucgugaacaacgccaccaacguggucaucaaggugugcgaguuccaguucugcaacgaccccuuccucggcguguacuaccacaagaacaacaagagcuggauggaguccgaguuccgggucuacagcuccgccaacaacugcacguucgaguacgugagccagcccuuccugauggaccuggagggcaagcaggggaacuucaagaaccuccgcgaguucguguucaagaacaucgacggcuacuucaagaucuacuccaagcacaccccgaucaaccugguccgggaccugccccagggguucagcgcccucgagccccugguggaccugcccaucggcaucaacaucacccgcuuccagacccuccuggcccugcaccgguccuaccucacgccgggggacagcagcuccggcuggaccgcgggcgccgccgccuacuacgugggguaccugcagccccgcaccuuccugcucaaguacaacgagaacggcaccaucacggacgcggucgacugcgcccuggacccccugagcgagaccaagugcacccucaaguccuucaccguggagaaggggaucuaccagacgagcaacuuccgggugcagcccaccgaguccaucguccgcuucccgaacaucaccaaccugugccccuucggcgagguguucaacgccacccgguucgccagcgucuacgccuggaaccgcaagcggaucuccaacugcguggcggacuacagcgugcuguacaacuccgccagcuucuccacguucaagugcuacggcgucagccccaccaagcucaacgaccugugcuucaccaacguguacgccgacuccuucgugauccgcggggacgagguccggcagaucgcccccggccagaccgggaagaucgccgacuacaacuacaagcugccggacgacuucacgggcugcgugaucgcguggaacagcaacaaccucgacuccaaggucgggggcaacuacaacuaccuguaccgccuguuccgcaagagcaaccucaagcccuucgagcgggacaucuccaccgagaucuaccaggccggcagcacccccugcaacgggguggagggcuucaacugcuacuucccccugcaguccuacggguuccagccgaccaacggcgugggguaccagcccuaccggguggucgugcugagcuucgagcuccugcacgcccccgccacggugugcggccccaagaaguccaccaaccuggucaagaacaagugcgugaacuucaacuucaacggccucaccgggaccggcgugcugaccgagagcaacaagaaguuccugccguuccagcaguucgggcgcgacaucgccgacacgaccgacgcgguccgcgacccccagacccuggagauccucgacaucacccccugcagcuucggcgggguguccgugaucacgccgggcaccaacaccagcaaccaggucgccgugcuguaccaggacgugaacugcaccgagguccccguggccauccacgccgaccagcugacgcccaccuggcggguguacuccaccggcagcaacgucuuccagacccgcgccgggugccucaucggcgcggagcacgugaacaacuccuacgagugcgacauccccaucggggccggcaucugcgccagcuaccagacgcagaccaacuccccgcggcgcgcccggagcguggcgucccagagcaucaucgccuacaccaugucccugggcgccgagaacagcgucgccuacuccaacaacagcaucgccauccccaccaacuucacgaucuccgugaccaccgagauccugcccgugagcaugaccaagacgagcgucgacugcaccauguacaucugcggggacuccaccgagugcagcaaccuccugcugcaguacggcuccuucugcacccagcucaaccgcgcgcugacggggaucgccguggagcaggacaagaacacccaggagguguucgcccaggucaagcagaucuacaagacgcccccgaucaaggacuucggcggguucaacuucagccagauccugcccgaccccuccaagcccagcaagcgguccuucaucgaggaccuccuguucaacaaggugacccuggccgacgccggcuucaucaagcaguacggcgacugccucggggacaucgcggcccgcgaccugaucugcgcccagaaguucaacggccugaccgugcucccgccccugcugaccgacgagaugaucgcccaguacaccagcgcccuccuggcggggaccaucacguccggcuggaccuucggggccggcgccgcccugcagauccccuucgcgaugcagauggccuaccgguucaacggcaucggggucacccagaacgugcucuacgagaaccagaagcugaucgccaaccaguucaacagcgccaucggcaagauccaggacucccugagcuccaccgccagcgcgcucgggaagcugcaggacguggucaaccagaacgcccaggcccugaacacgcucgugaagcagcuguccagcaacuucggcgccaucuccagcgugcugaacgacauccucucccgccuggacaaggucgaggccgaggugcagaucgaccggcugaucaccgggcgccuccagagccugcagaccuacgugacccagcagcugauccgggcggccgagauccgcgccagcgccaaccucgccgcgaccaagauguccgagugcguccugggccagagcaagcggguggacuucugcggcaagggguaccaccugauguccuucccccagagcgccccgcacggcguggucuuccuccacgugacguacguccccgcccaggagaagaacuucaccaccgcccccgcgaucugccacgacgggaaggcccacuucccccgcgagggcguguucguguccaacgggacccacugguucgucacgcagcggaacuucuacgagccgcagaucaucaccaccgacaacaccuucgugagcggcaacugcgacguggucaucggcaucgugaacaacacgguguacgacccccugcagcccgagcuggacuccggcgggagcggcuacauccccgaggccccgcgcgacgggcaggccuacgugcggaaggacggcgaguggguccugcucagcaccuuccugugaggacuagucccuguucccagagcccacuuuuuuuucuuuuuuugaaauaaaauagccugucuuucagaucucaaaggcucuuuucagagccaccaaaaaaaaaaaaaaaaaaaaaaaaaaaaaaaaaaaaaaaaaaaaaaaaaaaaaaaaaaaaaaaaaaaaaaaaaaaaaaaaaaaaaaaaaaaaaaaaaaaaa

SEQ ID NO: 12444 - RNA, 3806 nt, Artificial Sequence
  SARS-CoV-2/Wuhan/WIV05/2019__EPI_ISL_402128 spike protein mRNA gc (1-1147)(K986P_V987P) Foldon construct
aggagagucccgcagucggcguccagcggcucugcuuguucgugugugugucguugcaggccuuauucaagcuuaccauguucguguuccugguccuccugccccuggugagcucccagugcgugaaccucaccacccgcacgcagcugccgcccgccuacaccaacagcuucacccggggcgucuacuaccccgacaagguguuccgcuccagcgugcugcacuccacccaggaccucuuccugcccuucuucagcaacgucacgugguuccacgccauccacguguccgggaccaacggcaccaagcgguucgacaacccggugcugcccuucaacgacggggucuacuucgcgagcaccgagaaguccaacaucauccgcggcuggaucuucgggacgacccucgacagcaagacccagucccugcugaucgugaacaacgccaccaacguggucaucaaggugugcgaguuccaguucugcaacgaccccuuccucggcguguacuaccacaagaacaacaagagcuggauggaguccgaguuccgggucuacagcuccgccaacaacugcacguucgaguacgugagccagcccuuccugauggaccuggagggcaagcaggggaacuucaagaaccuccgcgaguucguguucaagaacaucgacggcuacuucaagaucuacuccaagcacaccccgaucaaccugguccgggaccugccccagggguucagcgcccucgagccccugguggaccugcccaucggcaucaacaucacccgcuuccagacccuccuggcccugcaccgguccuaccucacgccgggggacagcagcuccggcuggaccgcgggcgccgccgccuacuacgugggguaccugcagccccgcaccuuccugcucaaguacaacgagaacggcaccaucacggacgcggucgacugcgcccuggacccccugagcgagaccaagugcacccucaaguccuucaccguggagaaggggaucuaccagacgagcaacuuccgggugcagcccaccgaguccaucguccgcuucccgaacaucaccaaccugugccccuucggcgagguguucaacgccacccgguucgccagcgucuacgccuggaaccgcaagcggaucuccaacugcguggcggacuacagcgugcuguacaacuccgccagcuucuccacguucaagugcuacggcgucagccccaccaagcucaacgaccugugcuucaccaacguguacgccgacuccuucgugauccgcggggacgagguccggcagaucgcccccggccagaccgggaagaucgccgacuacaacuacaagcugccggacgacuucacgggcugcgugaucgcguggaacagcaacaaccucgacuccaaggucgggggcaacuacaacuaccuguaccgccuguuccgcaagagcaaccucaagcccuucgagcgggacaucuccaccgagaucuaccaggccggcagcacccccugcaacgggguggagggcuucaacugcuacuucccccugcaguccuacggguuccagccgaccaacggcgugggguaccagcccuaccggguggucgugcugagcuucgagcuccugcacgcccccgccacggugugcggccccaagaaguccaccaaccuggucaagaacaagugcgugaacuucaacuucaacggccucaccgggaccggcgugcugaccgagagcaacaagaaguuccugccguuccagcaguucgggcgcgacaucgccgacacgaccgacgcgguccgcgacccccagacccuggagauccucgacaucacccccugcagcuucggcgggguguccgugaucacgccgggcaccaacaccagcaaccaggucgccgugcuguaccaggacgugaacugcaccgagguccccguggccauccacgccgaccagcugacgcccaccuggcggguguacuccaccggcagcaacgucuuccagacccgcgccgggugccucaucggcgcggagcacgugaacaacuccuacgagugcgacauccccaucggggccggcaucugcgccagcuaccagacgcagaccaacuccccgcggcgcgcccggagcguggcgucccagagcaucaucgccuacaccaugucccugggcgccgagaacagcgucgccuacuccaacaacagcaucgccauccccaccaacuucacgaucuccgugaccaccgagauccugcccgugagcaugaccaagacgagcgucgacugcaccauguacaucugcggggacuccaccgagugcagcaaccuccugcugcaguacggcuccuucugcacccagcucaaccgcgcgcugacggggaucgccguggagcaggacaagaacacccaggagguguucgcccaggucaagcagaucuacaagacgcccccgaucaaggacuucggcggguucaacuucagccagauccugcccgaccccuccaagcccagcaagcgguccuucaucgaggaccuccuguucaacaaggugacccuggccgacgccggcuucaucaagcaguacggcgacugccucggggacaucgcggcccgcgaccugaucugcgcccagaaguucaacggccugaccgugcucccgccccugcugaccgacgagaugaucgcccaguacaccagcgcccuccuggcggggaccaucacguccggcuggaccuucggggccggcgccgcccugcagauccccuucgcgaugcagauggccuaccgguucaacggcaucggggucacccagaacgugcucuacgagaaccagaagcugaucgccaaccaguucaacagcgccaucggcaagauccaggacucccugagcuccaccgccagcgcgcucgggaagcugcaggacguggucaaccagaacgcccaggcccugaacacgcucgugaagcagcuguccagcaacuucggcgccaucuccagcgugcugaacgacauccucucccgccuggacccgcccgaggccgaggugcagaucgaccggcugaucaccgggcgccuccagagccugcagaccuacgugacccagcagcugauccgggcggccgagauccgcgccagcgccaaccucgccgcgaccaagauguccgagugcguccugggccagagcaagcggguggacuucugcggcaagggguaccaccugauguccuucccccagagcgccccgcacggcguggucuuccuccacgugacguacguccccgcccaggagaagaacuucaccaccgcccccgcgaucugccacgacgggaaggcccacuucccccgcgagggcguguucguguccaacgggacccacugguucgucacgcagcggaacuucuacgagccgcagaucaucaccaccgacaacaccuucgugagcggcaacugcgacguggucaucggcaucgugaacaacacgguguacgacccccugcagcccgagcuggacuccggcgggagcggcuacauccccgaggccccgcgcgacgggcaggccuacgugcggaaggacggcgaguggguccugcucagcaccuuccugugaggacuagucccuguucccagagcccacuuuuuuuucuuuuuuugaaauaaaauagccugucuuucagaucucaaaggcucuuuucagagccaccaaaaaaaaaaaaaaaaaaaaaaaaaaaaaaaaaaaaaaaaaaaaaaaaaaaaaaaaaaaaaaaaaaaaaaaaaaaaaaaaaaaaaaaaaaaaaaaaaaaaa

SEQ ID NO: 12445 - RNA, 3806 nt, Artificial Sequence
  SARS-CoV-2/Wuhan/WIV05/2019__EPI_ISL_402128 spike protein mRNA gc (1-1147)(K986P_V987P_T887WN_A1020W) Foldon construct
aggagagucccgcagucggcguccagcggcucugcuuguucgugugugugucguugcaggccuuauucaagcuuaccauguucguguuccugguccuccugccccuggugagcucccagugcgugaaccucaccacccgcacgcagcugccgcccgccuacaccaacagcuucacccggggcgucuacuaccccgacaagguguuccgcuccagcgugcugcacuccacccaggaccucuuccugcccuucuucagcaacgucacgugguuccacgccauccacguguccgggaccaacggcaccaagcgguucgacaacccggugcugcccuucaacgacggggucuacuucgcgagcaccgagaaguccaacaucauccgcggcuggaucuucgggacgacccucgacagcaagacccagucccugcugaucgugaacaacgccaccaacguggucaucaaggugugcgaguuccaguucugcaacgaccccuuccucggcguguacuaccacaagaacaacaagagcuggauggaguccgaguuccgggucuacagcuccgccaacaacugcacguucgaguacgugagccagcccuuccugauggaccuggagggcaagcaggggaacuucaagaaccuccgcgaguucguguucaagaacaucgacggcuacuucaagaucuacuccaagcacaccccgaucaaccugguccgggaccugccccagggguucagcgcccucgagccccugguggaccugcccaucggcaucaacaucacccgcuuccagacccuccuggcccugcaccgguccuaccucacgccgggggacagcagcuccggcuggaccgcgggcgccgccgccuacuacgugggguaccugcagccccgcaccuuccugcucaaguacaacgagaacggcaccaucacggacgcggucgacugcgcccuggacccccugagcgagaccaagugcacccucaaguccuucaccguggagaaggggaucuaccagacgagcaacuuccgggugcagcccaccgaguccaucguccgcuucccgaacaucaccaaccugugccccuucggcgagguguucaacgccacccgguucgccagcgucuacgccuggaaccgcaagcggaucuccaacugcguggcggacuacagcgugcuguacaacuccgccagcuucuccacguucaagugcuacggcgucagccccaccaagcucaacgaccugugcuucaccaacguguacgccgacuccuucgugauccgcggggacgagguccggcagaucgcccccggccagaccgggaagaucgccgacuacaacuacaagcugccggacgacuucacgggcugcgugaucgcguggaacagcaacaaccucgacuccaaggucgggggcaacuacaacuaccuguaccgccuguuccgcaagagcaaccucaagcccuucgagcgggacaucuccaccgagaucuaccaggccggcagcacccccugcaacgggguggagggcuucaacugcuacuucccccugcaguccuacggguuccagccgaccaacggcgugggguaccagcccuaccggguggucgugcugagcuucgagcuccugcacgcccccgccacggugugcggccccaagaaguccaccaaccuggucaagaacaagugcgugaacuucaacuucaacggccucaccgggaccggcgugcugaccgagagcaacaagaaguuccugccguuccagcaguucgggcgcgacaucgccgacacgaccgacgcgguccgcgacccccagacccuggagauccucgacaucacccccugcagcuucggcgggguguccgugaucacgccgggcaccaacaccagcaaccaggucgccgugcuguaccaggacgugaacugcaccgagguccccguggccauccacgccgaccagcugacgcccaccuggcggguguacuccaccggcagcaacgucuuccagacccgcgccgggugccucaucggcgcggagcacgugaacaacuccuacgagugcgacauccccaucggggccggcaucugcgccagcuaccagacgcagaccaacuccccgcggcgcgcccggagcguggcgucccagagcaucaucgccuacaccaugucccugggcgccgagaacagcgucgccuacuccaacaacagcaucgccauccccaccaacuucacgaucuccgugaccaccgagauccugcccgugagcaugaccaagacgagcgucgacugcaccauguacaucugcggggacuccaccgagugcagcaaccuccugcugcaguacggcuccuucugcacccagcucaaccgcgcgcugacggggaucgccguggagcaggacaagaacacccaggagguguucgcccaggucaagcagaucuacaagacgcccccgaucaaggacuucggcggguucaacuucagccagauccugcccgaccccuccaagcccagcaagcgguccuucaucgaggaccuccuguucaacaaggugacccuggccgacgccggcuucaucaagcaguacggcgacugccucggggacaucgcggcccgcgaccugaucugcgcccagaaguucaacggccugaccgugcucccgccccugcugaccgacgagaugaucgcccaguacaccagcgcccuccuggcggggaccaucacguccggcuggugguucggggccggcgccgcccugcagauccccuucgcgaugcagauggccuaccgguucaacggcaucggggucacccagaacgugcucuacgagaaccagaagcugaucgccaaccaguucaacagcgccaucggcaagauccaggacucccugagcuccaccgccagcgcgcucgggaagcugcaggacguggucaaccagaacgcccaggcccugaacacgcucgugaagcagcuguccagcaacuucggcgccaucuccagcgugcugaacgacauccucucccgccuggacccgcccgaggccgaggugcagaucgaccggcugaucaccgggcgccuccagagccugcagaccuacgugacccagcagcugauccgggcggccgagauccgcuggagcgccaaccucgccgcgaccaagauguccgagugcguccugggccagagcaagcggguggacuucugcggcaagggguaccaccugauguccuucccccagagcgccccgcacggcguggucuuccuccacgugacguacguccccgcccaggagaagaacuucaccaccgcccccgcgaucugccacgacgggaaggcccacuucccccgcgagggcguguucguguccaacgggacccacugguucgucacgcagcggaacuucuacgagccgcagaucaucaccaccgacaacaccuucgugagcggcaacugcgacguggucaucggcaucgugaacaacacgguguacgacccccugcagcccgagcuggacuccggcgggagcggcuacauccccgaggccccgcgcgacgggcaggccuacgugcggaaggacggcgaguggguccugcucagcaccuuccugugaggacuagucccuguucccagagcccacuuuuuuuucuuuuuuugaaauaaaauagccugucuuucagaucucaaaggcucuuuucagagccaccaaaaaaaaaaaaaaaaaaaaaaaaaaaaaaaaaaaaaaaaaaaaaaaaaaaaaaaaaaaaaaaaaaaaaaaaaaaaaaaaaaaaaaaaaaaaaaaaaaaaa

SEQ ID NO: 12446 - RNA, 3806 nt, Artificial Sequence
  SARS-CoV-2/Wuhan/WIV05/2019__EPI_ISL_402128 spike protein mRNA gc (1-1147)(K986P_V987P_P1069F) Foldon construct
aggagagucccgcagucggcguccagcggcucugcuuguucgugugugugucguugcaggccuuauucaagcuuaccauguucguguuccugguccuccugccccuggugagcucccagugcgugaaccucaccacccgcacgcagcugccgcccgccuacaccaacagcuucacccggggcgucuacuaccccgacaagguguuccgcuccagcgugcugcacuccacccaggaccucuuccugcccuucuucagcaacgucacgugguuccacgccauccacguguccgggaccaacggcaccaagcgguucgacaacccggugcugcccuucaacgacggggucuacuucgcgagcaccgagaaguccaacaucauccgcggcuggaucuucgggacgacccucgacagcaagacccagucccugcugaucgugaacaacgccaccaacguggucaucaaggugugcgaguuccaguucugcaacgaccccuuccucggcguguacuaccacaagaacaacaagagcuggauggaguccgaguuccgggucuacagcuccgccaacaacugcacguucgaguacgugagccagcccuuccugauggaccuggagggcaagcaggggaacuucaagaaccuccgcgaguucguguucaagaacaucgacggcuacuucaagaucuacuccaagcacaccccgaucaaccugguccgggaccugccccagggguucagcgcccucgagccccugguggaccugcccaucggcaucaacaucacccgcuuccagacccuccuggcccugcaccgguccuaccucacgccgggggacagcagcuccggcuggaccgcgggcgccgccgccuacuacgugggguaccugcagccccgcaccuuccugcucaaguacaacgagaacggcaccaucacggacgcggucgacugcgcccuggacccccugagcgagaccaagugcacccucaaguccuucaccguggagaaggggaucuaccagacgagcaacuuccgggugcagcccaccgaguccaucguccgcuucccgaacaucaccaaccugugccccuucggcgagguguucaacgccacccgguucgccagcgucuacgccuggaaccgcaagcggaucuccaacugcguggcggacuacagcgugcuguacaacuccgccagcuucuccacguucaagugcuacggcgucagccccaccaagcucaacgaccugugcuucaccaacguguacgccgacuccuucgugauccgcggggacgagguccggcagaucgcccccggccagaccgggaagaucgccgacuacaacuacaagcugccggacgacuucacgggcugcgugaucgcguggaacagcaacaaccucgacuccaaggucgggggcaacuacaacuaccuguaccgccuguuccgcaagagcaaccucaagcccuucgagcgggacaucuccaccgagaucuaccaggccggcagcacccccugcaacgggguggagggcuucaacugcuacuucccccugcaguccuacggguuccagccgaccaacggcgugggguaccagcccuaccggguggucgugcugagcuucgagcuccugcacgcccccgccacggugugcggccccaagaaguccaccaaccuggucaagaacaagugcgugaacuucaacuucaacggccucaccgggaccggcgugcugaccgagagcaacaagaaguuccugccguuccagcaguucgggcgcgacaucgccgacacgaccgacgcgguccgcgacccccagacccuggagauccucgacaucacccccugcagcuucggcgggguguccgugaucacgccgggcaccaacaccagcaaccaggucgccgugcuguaccaggacgugaacugcaccgagguccccguggccauccacgccgaccagcugacgcccaccuggcggguguacuccaccggcagcaacgucuuccagacccgcgccgggugccucaucggcgcggagcacgugaacaacuccuacgagugcgacauccccaucggggccggcaucugcgccagcuaccagacgcagaccaacuccccgcggcgcgcccggagcguggcgucccagagcaucaucgccuacaccaugucccugggcgccgagaacagcgucgccuacuccaacaacagcaucgccauccccaccaacuucacgaucuccgugaccaccgagauccugcccgugagcaugaccaagacgagcgucgacugcaccauguacaucugcggggacuccaccgagugcagcaaccuccugcugcaguacggcuccuucugcacccagcucaaccgcgcgcugacggggaucgccguggagcaggacaagaacacccaggagguguucgcccaggucaagcagaucuacaagacgcccccgaucaaggacuucggcggguucaacuucagccagauccugcccgaccccuccaagcccagcaagcgguccuucaucgaggaccuccuguucaacaaggugacccuggccgacgccggcuucaucaagcaguacggcgacugccucggggacaucgcggcccgcgaccugaucugcgcccagaaguucaacggccugaccgugcucccgccccugcugaccgacgagaugaucgcccaguacaccagcgcccuccuggcggggaccaucacguccggcuggaccuucggggccggcgccgcccugcagauccccuucgcgaugcagauggccuaccgguucaacggcaucggggucacccagaacgugcucuacgagaaccagaagcugaucgccaaccaguucaacagcgccaucggcaagauccaggacucccugagcuccaccgccagcgcgcucgggaagcugcaggacguggucaaccagaacgcccaggcccugaacacgcucgugaagcagcuguccagcaacuucggcgccaucuccagcgugcugaacgacauccucucccgccuggacccgcccgaggccgaggugcagaucgaccggcugaucaccgggcgccuccagagccugcagaccuacgugacccagcagcugauccgggcggccgagauccgcgccagcgccaaccucgccgcgaccaagauguccgagugcguccugggccagagcaagcggguggacuucugcggcaagggguaccaccugauguccuucccccagagcgccccgcacggcguggucuuccuccacgugacguacgucuucgcccaggagaagaacuucaccaccgcccccgcgaucugccacgacgggaaggcccacuucccccgcgagggcguguucguguccaacgggacccacugguucgucacgcagcggaacuucuacgagccgcagaucaucaccaccgacaacaccuucgugagcggcaacugcgacguggucaucggcaucgugaacaacacgguguacgacccccugcagcccgagcuggacuccggcgggagcggcuacauccccgaggccccgcgcgacgggcaggccuacgugcggaaggacggcgaguggguccugcucagcaccuuccugugaggacuagucccuguucccagagcccacuuuuuuuucuuuuuuugaaauaaaauagccugucuuucagaucucaaaggcucuuuucagagccaccaaaaaaaaaaaaaaaaaaaaaaaaaaaaaaaaaaaaaaaaaaaaaaaaaaaaaaaaaaaaaaaaaaaaaaaaaaaaaaaaaaaaaaaaaaaaaaaaaaaaa
